United States Patent Application Publication US 2006/0046253 A1 - sequence listing, part 3

SEQ ID NO: 2363 - DNA, 2370 bp, Saccharomyces pastorianus
atggtatcaaacgagagaaaaaagaatcaaatagatatcactcccattgataatctatgtgctgcgttcgataagactttgaagtctacccctgatgttcagaaatacaatgatgctgtggatacaatctttcagttaaggcagtactctgagcctggaatgctggcgaataatctagcaggtaatgaaatcttcaaagacgtccagaaaattgaagacatattaaccagatcttaccaggaccattctgagtcccgcgcacatttgtcgaagcgcattcaagaagatatcccattcgcactcgatttgtatgaaatgctatcaagatcatctgtgcacgttcttgttggttgctttccttccgaaaatgcaacggctccattactaaatgagctgcaagcgagaatacattatggtgaagatcttcatgttacatatctactcagtgtggtcctacaactgttaaataagttcaagtatgacttcaaagatgtccgatttttagtgaaggagctttgtttacgcataaacgaagacggggtgaaatcgatgatgctgataatttttgctgaattgcaatcgagttttcagaaagattttgataaaacgtttatggatttcatgagcagtttgatcgtagaggcagaaatcgatgtggggaacgacccactatcaatcattgtcaaagttctgtctgaactgtacccttccttaactgtactgtgttccgaaatatttctaagcaatgggctaactaagctttttaaaaaaagagttttcgaacaacaagatttacagtttacaaaggagcttttgcaattgttatctgcagcatgtattgatgagaccatgagagtgtacattactgaaaactaccttcaacttttggaaacatcactaagcctagaagatataaaaatatactctgccttagtactagtcaagacgtggtcattcactaaattaacaaatataaacataacacaactatcagagattttgataagtgcaatttcaaaatgcgaaatgcctaaaatagaaagtgtggataagggcacggtgagacctgatgaagtcaagaaagtagaaatgtgcgttgaagggttagcatacctgagtttgaagccgtcagttaagaacatgatcagaaacgatgaaaattttgtcaaaatgctaataaccatggttcaaaaccagaaaatgacgcactctttatatggtctgctagttatggtagctaatttgtccaccctgccagaggaaaacaatggcagcgctcaatcgataaatgacctgagagtttatgcggacttaaaagccccaagcacgaagaatacgggaaatgacaaagaatcaaaagaggatattactttgtttgtcgaaaagtacgtattgaaggcagagttaatttcctatttgaaaaccaaaatgcaaactctgagccccaattgcaaacagcaggtagtaagagtcatctataacaccacacgctcgaaagggttcatttccgaatgcattgcgcagggtggtaccgctgtcgtcttagaatatctagtcggtaagcaagacgttggggaaccgatccgaattttgggttgccgcgccctgtcaagaatgttaatattcaccaatccggccctgatatttaaaaaatactctgcgttgaacgctattcctttcctattcgaattgctacctagatccacacctgtggacgacaatccgttgcataacgatgagcaaataaaactaacagataattatgaggctttgttggctttaacaaatctagcctcgtcagagacttctgacggtgaagaagtctgcaagcatattgtgtctacaccggcctattggtcgacaatcgagaatctgatgttagacgagaatgttccattgcaacggtcaacactggaactgataagcaatatgatgagttatccattaacgattgctgcaaagtttttcaatttagaaaacccgcagagtttgaagaacttcaaaatactggtgaaactattacaactgtctgacatcgagtcccaacgcgccgtcgttgctatctttgccaatatcgcaactactatcccgctgatagccaaagaactcttgactcaaaaagaactaatcgaaaacgccgttgaagtcttcgcggagcaagtcggcgatatcgagctaagacaaagactaattatgcttttttatggactttttgaaatgattccggacaccagctctaaggagaattatcccttgctacaagaaaactcaaaactgaagaatgctttgaacatatctctagagagaaaggactcgggaccggagttctcggcagccatccctatcatccttgccaaaattagagtctaa

SEQ ID NO: 2364 - DNA, 867 bp, Saccharomyces pastorianus
atgtcaaagaacgagttttttggtaacgaaaatgatgtaatctggagtggcccaagattcagtgattcgcctgagttccaggcaatgaaagaagacgtcgctgcagaactgtttgaaataaatggccaaataagcacactacagcaattcaccacgacgctaaagtcgtttatagataagggtgatgttagcgcaaatgtagtggagaggatcaataagaggtctgtggcgaagatagaagaaataggcgagctaatcaagaaggtcaacacatcagtgaaaaagattgatgctctagaggaagcaagtctggataagactcaaataatagccagagaaaaactggtaagggatgtgagttattctttacaagagtttcaaggtatccaacggcagtttaccggggtaatgaagcaggtcaatgacaaggcgagagagtctcttgaagcaaccgaaatggcaaacaacacagctctaatggatgaagaacaagggcagaaccaccaaatgagtaaacgaatatcaagcaaccaaatagtcatcgagagagatccaataaataacgaggaattcgcctaccagcaaaatcttatcgaacaaagagaccaggaaattagcaatattgagagaggtataacggagctgaacgagatattcaaagatctgggaagcgtcatccaacagcaaggggttttggttgataacattgaagcaaatatttatacaacatctgataacacccaaatggcttcaaatgagttaaggaaggctatgcgataccagaaaagtacgagcagatggagagtatatctgttggttgttcttctcgtgatgcttttctttatttttctcattatgaaaatttag

SEQ ID NO: 2365 - DNA, 777 bp, Saccharomyces pastorianus
atgggcagcagatcagaggatgtaggagcagtggatagagggagctccagagttgaacaggacgatgttcttatggatgatgactctgattcatcggagtacgtggatatgtggatcgatttatttcttggaagaaaaggccatgaatacttctgcgacgtagatcctgaatacattacagatcgttttaacttaatgaatttgcaaaagacagtttctaaattctcttatgtggtacaatatatcgtggacgatttggatgacagtatcttagaaaacatgactcatgtccgtttagagcaattagaatcagattctcgtaagctgtatggcctcattcatgcacgttacatcataacgattaaaggtttgcagaaaatgtacgccaaatacaaagaggctgattttggtaggtgtcctcgtgtctactgcaacctacagccgttattgcccgttggtttgcatgatgttccaggaatagattgtgttaaattatattgtccatcctgtgaggatctttatataccaaagtcttcgaggcatagctcgattgatggtgcatactttggaacaagtttcccgggtatgtttttgcaagcatttccagacatggtgcccaaacatccaacaaaaagatacgttccaaaaatttttggttttgaattacacaaacaagctcaactaacgaggtggcaggaactacagcgactcaagatggtcaagaagcttgaattcaaaaatgtggatttgacaaaaagtggtggttttaaaacctag

SEQ ID NO: 2366 - DNA, 1464 bp, Saccharomyces pastorianus
atggacgatataattactcaagtctctccaggcaatgctgagcccgcgcccattttacaagagcagcaccaacaacaacaaaactcgcaatatgagggtaatgaggaggattatggtgattctctgattcacttgaacattcaggaaaaccattatttcatcaccagagatcagctaatgtccctccctgaatccctattactatgtttatttccctcaggtgtatttttggaccgttgtggtcaagtcatcaccaatttaaccagagacgatgaagtttatattgttaatttccctcccgattgttttgagtacatcatggagatctatacaaaggcgcacgacgatttatataatcatcccgtggagaggtttttcgatagaccatcaagtagttttgtctctaatgcaaaagggtttttcggactaaacaataacagttcaatctcaggcaacaatgaacaagacattttacatcaaaagcctgctattatcgttttgagagaagatttggactattattgcgtccctcaggaacaatttcgctttgattctaccaacgaagaaaataatgaggacttgttgcgacattttatggctcaagtgaaaatggctgctggcagttatttgacttcaaagacatcgatttttcaaggtttgtattcttcgaatagactaaagcaacaacagcaacaaaatctaattgagaaggaaacagactctacttcaaaggcaaaatccatttctaaaaaactggggcccgccgaacagcatctgatggatatgctatgctcttccgggttcacaaaggaaacttgctggggcaacagaactcaagaaactggtaaaacagtcataagttcattatctctttgccggttggccaatgagaccaccgaagagtttaggaagaaattcaacggggcaagggccaagtgggaagccgagcataaaccctttcaagacaaccccatcaccccaatgcaatcaaacgtctcagtcaactctttatctgtaagtaaatctaacagtaccctttccacggctagaaatactaccagtggaggttccttaccttctgctggacgcgataagagaaaatcaagactttcgaaactagccgataacgttcgttctcattcctcatcaagacatagttcgcaaacaagaaacaagctgccagaattgcccaaattgtacgacctcgtacccaagcccaatatcaacgctaagctgctactcttttggagaaaaccagctcgtaaatgttggtggggtgaagaggatatcgaattagaagtggaggtttttggctcttggaaggatgaagcaaacagagttatcgaactggtattgccaacgaacgcggaccccgaagcagaactaaataagatcactgtacccgtccgattacacatccgtagagtatggactttagagctaagtgttattggcgtacaatga

SEQ ID NO: 2367 - DNA, 474 bp, Saccharomyces pastorianus
atgatagacgccgttaaaatcgttctgctactcgttatacagtcccttcagtacatttgtcgtacatgcataggatttttattgataccatttttgggcctgtatacgtttgatttcttcttatacctctatcggacagcgctatatctatcacaaatgtttaactacaaaagaaaattaggactctctaaaagaaatagtagaccgtatagtgcaagagtgcaaacaaaatacaacagctgggaatgcagggagattctagttggtcaaataagggatctgaggacatttttgttgtccgtaattcacagcaatgcaaagagatttttctccgcaaggtttcaaacgaaatcgaccatcaattccagctttaacgcaaatgatgctgaaacaacatcagacacatccggtttcacaaatctgcatttagcaagatcatccgaagaggcatattacatcgcaggatcgatataa

SEQ ID NO: 2368 - DNA, 186 bp, Saccharomyces pastorianus
atgaacggtatgtttgctatgccaggtgcaggtgccggtccagccgccccacaacaaccaaagtcaagattccaagctttcaaagaatcgccattatatacaattgcactaaacggcaccttcttcattgctggagtggcattcattcagtctccacttatggacatgttggctccacaattataa

SEQ ID NO: 2369 - DNA, 1449 bp, Saccharomyces pastorianus
atgagtgatacaaagaaggacccagctgatttactagcctctttgaagattgataacgataaaaaggaccccagtgcaacttcaacgaaggagaccgctgaaagtaagctagacaacaccatcgctccagtcaaggttgaggaaaaagcagttcctaaaactgacgagaaaaaggaagatgaaaaggacagcaatttggtcagctcggcatatgaagttaaggtcaaacttgctgatatccaagctgatcccgattcaccactctacagcgccaaatcctttgatgaattaggactagcgccagagttactaaagggaatatatgccatgaaatttcagaaaccatccaagattcaagaaagagccttaccattactattacataacccagctagaaatatgattgctcaatctcagtcaggtaccggtaagactgccgctttttctttgacaatgctgacaagagtaaacccggaagacgcatccccacaggcaatatgtttagccccctccagagaacttgctagacaaactttagaagttgttcaagaaatgggtaaatttacgaaaataactagtcagttgatcgtcccggactcctttgagaaaaacaaacaaatcaatgctcaagtgattgttggtactccaggtacagttcttgacctaatgcgtagaaaattgatgcaattgcaaaagatcaaaatatttgttttagatgaagctgataatatgttagatcaacaaggtcttggtgaccaatgcattcgtgtcaagaggtttttacccaaggatacccaattagttctattcagtgctactttcgctgatgcggttaggcaatatgcgaagaagattgttcctaatgcaaatacactagaattacaaacaaatgaagtcaacgttgacgctattaagcaactgtacatggattgtaaaaacgaagccgataaatttgaagttctgactgagctttatggtttaatgaccattggatcttctattatttttgttgctaccaagaaaacggcaaatgtcctatatggtaaactaaaaaacgaaggccatgaagtttctatcttgcatggtgacttgcaaactcaagaaagagatagattaatagatgatttcagagagggtaggtccaaggttttaatcactaccaatgttcttgcccgtggtattgatatccctacagtttcaatggttgtaaactatgatcttccaacacttgctaacggacaagccgatccggccacttatattcacagaatcggtagaactggtagatttggtagaaaaggtgttgccatttccttcgtacatgacaaaaactctttcaacattttatcttcaattcaaaaatactttggtgatatagaaatgacacgtgtcccaacagatgattgggatgaagtcgaaaaaatagttaagaaagtattaaaggactag

SEQ ID NO: 2370 - DNA, 1329 bp, Saccharomyces pastorianus
atgtttgtttcaccgcctccagcaacagcgaggaatcaagtattgggaaagaggaaatcaaaaagacgtggtagcaattcaaagaatgttcagcctagcgctgatagtgtagatatagataaaaacgtctcttttgtgccgaacaacaatccttcatataatgaccaagaagcaaatacaccgaatcactacagtctgaatgctagtccagggagcagcagaagcaatttcgttagcacacctccagaatacgcagacagagcaagaatagaaattaggaaaagattattgccgaccggagggaataagcccgtcaatgtaaacagtgtctttctcgacaatgcaaacattcaacaggtaacctcgccagacagccaaagttttgtttcagatcatgcatcttcatacgaatccagtatattttcacacccatctactgttctcacacatgtcaccacagatagttcgttaattgatttaaagacgccgaagttcgtgacagaagtaacgcttgaggatgcactacccaaaactttctatgacatgtattctccagaggtgcttatgtctgatccagcaaatatactttacaatggacgtcccaaatttacgaaacgtgagttgctcgattgggacctaaatgatatacgatctttgttaatcgtggagcgattaaggccggaatggggatctcgattaccgagtgtaataacctccggaataaactttccacaattcaggttacagttgcttcctctctgctccagcgacgagtttataatagcgacattggttaactcggacttgtatatagaggcgaacttggatcgcgatttcaagttaacgagtgcaaaatatacggtagcatcagcaagaaaaagacatgaagaaatcattggatataaagaaacaatcatgcacttgtctaagcccgaatggagaaatataattgaaaactacttactgaacgttgccgttgaagcgcaatgcagatatgattttaagcagaagcgctctgaatacaagaaatggaaacagctcaattccaatttgaaaaggcccgatatgccgcctccaagcctgataccccccggtttccatgctcatgaacatatttcctcaggtagtcttttgaaaaaggctttaatgaaaaacttgcaattaaaaaactataaaaatgacaccaaaacattaggtgctggtacacagaaaaatgtcgttaataaggtgtcattgactaaagaggagagggcaggtatttggttacaatgccaaacacaagtttaccaaagattgggcttagactggacgcccgacggaatgtcctag

SEQ ID NO: 2371 - DNA, 453 bp, Saccharomyces pastorianus
atgtctgacataaacggaatggaaattccatccagaaaggatgaaattagacaagtcactccaaaggatccagtgcaagaaatggaggataagagcatctaccacgcaaagataaaaaaatccgattccgggaccggcctgggtggcataccgttgcattcaaggtcttctagtaattccagcataacatctacaggccaaagcagtaggcgagtgaccaagaaaacaacgaagaaaaagaaaaagaacgcttgctatttcgataagtgttcaagtgcagcatcaaaattcattggtgactgtaatttttgcaaaggccatttttgttcgaaacacagattaatggaaaaccacgcttgtgacggcttaacaagctgcaaggaacaactacatcaaagaaacgctgacaagctagaggcagaacaaaccaaagctccaaagatacaaatttaa

SEQ ID NO: 2372 - DNA, 1398 bp, Saccharomyces pastorianus
atgactgaaaaccagacagctcatgtaagagcattagtactagatgccactccattgattacgcagtcatatacacattatcagaattatgccgaatccttttacactacccctacagtgttccaagaaattaaggatgcccaagctaggaaaaacttagagatttggcaaagtctcggaactttgaaattggttcacccaagcgaaacctcgatagctagaataagtacattcgctaagttaaccggtgattactccgtcctaagtgctaacgatttacacattcttgccttagcatacgagttagaagtgaaattcaataaaggtgattggaggctgaggaaaaaaccaggtgatgcactcgacgagttaaaaaccgaagaagaagcagaggagaaagaaaaggagactgaaaacaacgaaaaggaggagaacactggaaacataccaaagaaaaaaaacagaagaagaggaggaaagaagcaaaaggccaaaagagaggcaagagaaactgaaaagtcatcaccaactgagaacgaaaacaaggtacaccttgaccaagacactaagacagaagaacacatcgaagaaacagaaaccaaagagggagtatctaatgatgaagggacaaaggaaacatccgaattgaatgaagagttcgagaacgctgatgacgatggtagttggattaccccagataacttgacagaatcaataattagggataatggtgaagatactactggttcgttaggcgttgaagcgtccgaagaggatcgccatgttgctttgaaccgtccagacaaccaagtggcattagccaccggtgattttgctgttcaaaatgtagcactgcagatgaacttgaatctgatgaactttatgtcaggcctgaagatcaagcgacttcgtaattacatgctaaggtgccacgcctgtttcaagatgttccccttaccaaaggatggcaaaccgaagcatttctgtgcctcgtgtggtggacaaggtaccttattaagatgtgcggtttctgtggactcgcgcacaggcatgattacaccgcacttgaaggccaatttccaatggaacaatagaggtaacagatactccgtagccagccccctatccaaaaactctcagaaaagatacggtaaaaagggacatgtacattccaagccacaggaaaacgtgattctcagagaagaccaaaaagaatacgaaaaagtgataaagcaagaagactggaccagaaggcacaatgagaagattctaaataactggatcggtggcggctctgcagacaactacatctctccgttcgccattaccggcctgaagcaacataacgtccgcataggtaagggaagatatgtcaatagttccaaaagaagaagctag

SEQ ID NO: 2373 - DNA, 1203 bp, Saccharomyces pastorianus
atgcctgtggaaaaggatttgaaaagtgcttacaaaaccttgtacgatgataaagaacctttgaaagcccttcatctttatgatgcgattctgaaggactctcccacaaacctgatcgctcttattttcaaagcagcatgtcttgaaaaactctattttgggttttctgattggcataacgatgaaaccatggggaatgctaaagctctcttagacaaggcattgagaacggctgaaggtagaggcaaccgatcgaaaatagcccttgtttacttccgttactttgttcatttcttcaataacaaggattatgaacaggcgtactcatacatggagaaggccaaacaattcggttatgttgatggtactttgcccctatgggagagtcgtctggaaataaaattgaaaaggaaaagtaagaagcagaaggatactagcactacggatatagtttcaacagcagaaaatgctggagacgaaagggagaaattgccagttcctggtaaaacaactcttccctttgaaagtgaggttgttatgcaaagtcaagaacccccaaagtttagagtggattggtaccaatccaataactctgttactatatccttattcactgccaaccttcccgagtctaaagataagataaatttaataatctctccaaaggatggaagaatgttatcagtatcgtatgaagttccgataaatgggtctgaattccaattcaatgctaaactttctcacaaggtagatttacaaccactctcattaaaagttttttcgaaaaagctggaaattactttaagcaaagcagacaaagtacaatggaaaaacttagaaggagactctcaaaaggaattttcaagagctcccaagataagcgagagtttggactcttcagcattgactgcatcggcagaaacactctcgaaagagatactttcttatccatcgtcttctaaaaaaaacatagactggtctaaactcgatatcgatgatgatgatgccggtgaagaagatgcgggatctcctgatgcctttttccaaaagctttacgccggagctgatccagacactaggagagctatgatgaaatcatttatagaaagcaacggcacttcattaagcacagactgggaggatgtatctaagggtgaagtcaaaacttcacctccagaaggcatggaacctaaacattggtga

SEQ ID NO: 2374 - DNA, 774 bp, Saccharomyces pastorianus
atgtcacagaaactatgtacattaaattttgtgcttagcggaaagcagggcgatttggtcattagagatgttcaactttggggggatcacctcgtggtctgtaatccagttccggagtggaaagggcaattcgttcagtatgttgagcttggaaagctgccattgtggatccgctccaaggacatccgcacatacagatgttacagcactagcgcaaccacattagcttattttaaatcaaagcttaaaaacgcgagtcgaggcattgtcatagaactgtccgacaaggttgaccagcggtcaaacgagccagcatatgtgattctgtttcgagagaacacggaactaagttgctttcgggtggacttagcaatgaagcatgaattcgatagccaaattttcaaattaaagcaagagcttgggaaaacaagggcttctgtctcgaaagaaggtagcatcgatataataatacaacaatctcaacaaaggaagatcggaacaaaaaccaaagtgtaccgcaacgtccaaattaatgataagcgcctccagttcaatgaaacgttatccaagcttatattaggtggcctccggcttcgaggcattcccaactccactacagattttcagaggctatacaagacaactttcgataccgctgagttcgcgcacagagatgaactaaaacgcatctctatgggatctggcgaagatatttcattcgaatcattgcaggaaacagtggagactttgctaaggctatttacaaaatcatga

SEQ ID NO: 2375 - DNA, 1020 bp, Saccharomyces pastorianus
atgccactacctccgtcaacactaaaccaaaagtcaaacagagtctactccgtagctagagtatacaagaatgcctgcgaagagagaccacaagaatattgggattatgaacaaggggtgaccatcgattgggggaagatttccaattacgagattatcaacaagattggaagagggaaatattcggaagtgtttagcggtagatgtattgtaaacaaccaaaaatgtgtcattaaggtcctgaaaccagtcaagatgaagaaaatttatagagaattaaaaatcctaactaatttgacaggtggccccaacgttgtcggcctttacgatatagtacaagacgctgattccaaaatacctgctttaatctttgaggagattaagaatgttgattttaggactctatatccaactttcaaacttcctgacatccaattttacttcacccaaatattgattgcgttagattactgccattcgatggggataatgcatagagatgtaaagccacagaacgtgatgattgatcctacggaacggaagctaagactgattgattgggggctagcggagttttaccacccaggtatagactacaatgttcgtgtcgcttcacgttatcacaagggaccagaactactagtaaacttgaaccagtacgactactccttggacttgtggtcagtaggctgtatgttggctgcgattgttttcaagaaggagccatttttcaaagggtcttccaatcccgaccaactggtaaagattgccgcagtactgggaaccaaggaattattaggatacttgggcaagtacggcttacatctaccatctgaatatgacaacataatgagagacttcaccaaaaaagcatggactcatttcatcactcctgaaaccaaactagcagttcctgaagtggtcgatttgattgacaacttattaagatatgatcaccaagaaagactaacggcaaaggaagccatggaccataagtttttcaaagccaagtttgagtag

SEQ ID NO: 2376 - DNA, 807 bp, Saccharomyces pastorianus
atgactagtctagatgacactgttttaaccaagaaaaatttagctttgttggacaatgctaccaactacacgcgtcccgccctggattatttccactatgcatttaactatgataatttggatgtctccaccacatggcggttgctgataaaaatgcgcaagcatagattgctgcgattacccagttgttcctctgaaaacgagatcgactataatatatatatggctaggctgcatcattgcatgtggagacgttggtccatacaccagttcaagctggatgatttaaaaattgatccgctgagtataaactggaagaaggaaatagacgttactctcctttacggcccggacttggctgaagtaaatgagagagaacaagcttcttcaccaagtgtttctgtaaacgatacaagccgacaacaaaagcattatagaaacacagaaaggcacaggaatggctcgtcctcatcatttcaaacaaaggtgtttgccgtaaaaggtaaaccgtcccctcagcggacaatatcgttcgacgacaccgtcaataggcgagacattgataaacgtgggagatttcacgaatcgtgtagtctcataaacgatagaaatccgtttcaagattactctattgtttgggacgaaagaacacatcgctaccatcgccgagcacacacagatgcgaacgattacaatcatatccgttccaccgataatgaaattccccggaacgcgtctttcgataacacaataattcaacaaaacctgcatagcatcacggagggctcctatatctatataaagtga

SEQ ID NO: 2377 - DNA, 1164 bp, Saccharomyces pastorianus
atgtctcacagaaagttcgaagcaccacgtcacggtcatttaggtttcttgccaagaaagagagctgcctctatcagagctagagttaaggctttcccaaaggatgacaaatccaaggccgtcgctttgacctctttcttgggttacaaggctggtatgaccaccattgtcagagatttggacagaccaggttccaagttccacaagcgtgaagttgttgaagctgtcaccgttgtcgacaccccaccagtcgttatcgttggtgttgtcggttacgtcgaaaccccaagaggtttgagatctttgaccaccgtctgggctgaacatttgtctgacgaagtcaagagaagattctacaagaactggtacaagtccaagaagaaggctttcaccaagtactcttctaagtacgctcaagaaggtgctggtattgacagagaattggccagaatcaagaagtacgcttctgttgttagagtcttggtccacactcaagtcagaaagactccattgacccaaaagaaggctcatttggctgaaatccaattgaacggtggttccatctccgaaaaggttgactgggctcgtgaacatttcgaaaagactgttgctgtcgacagtgtctttgaacaaaacgaaatgattgacgctatcgctgtcaccaagggtcacggtttcgaaggtgttacccacagatggggtaccaagaaacttccaagaaagactcacagaggtttaagaaaggttgcttgtatcggtgcttggcatccagcccacgttatgtggactgttgccagagctggtcaaagaggttaccactccagaacttctattaaccacaaggtttacagagtcggtaagggtgatgacgaagctaacggtgctaccaacttcgacagaaccaagaagaccatcaccccaatgggtggtttcgtccactacggtgaaatcaacaacgatttcgtcatggttaagggttgtatcccaggtaacagaaagagaattattactttgagaaagtccttgtacaccaacacttctagaaaggccttggaagaagtcaacttgaaatggattgacactgcttctaagttcggtaagggtagattccaaactccagctgaaaagcatgctttcatgggtactttgaagaaggacttataa

SEQ ID NO: 2378 - DNA, 660 bp, Saccharomyces pastorianus
atggaacagtctgccatcgagtatccggactcggacatcaggtacagcttcctgagcactttggatcatctgccgtgcgagcttataaggtctttacggttgatgcagaccatcgatctgtctaaaaacgctggtgataagcatgagctagaaaatgcttcgacgaatctgatgctggtagctaattatgtagacgatttagttgatgaccagatccgcttcttgacacagcataggaaagaattggaaatacagaaatcagtaacgaaatctttcaatacctctgtagataatatcagatctaaactgatactggaagagccgaaagtttacaaagaaccaaagttgctgttaaagattagcctgaaaaaagcaaaatcgagggagagaaaacaaagtataaccagccccaatgttgggattaccccgagaagggctgcagctaataccactgatcaagaagaggtttattgtttttgtagaaacgcatcgtacgggcccatggtggcatgcgatcgttctgactgcccctttgagtggttccactacggttgcgtaaacttgaaacacgctccaaagggtaaatggtattgtagtgaggattgtgaaaaaatagcgaaagaaagaacgaaatcaaaacgacaaaagaaactaaagtga

SEQ ID NO: 2379 - DNA, 927 bp, Saccharomyces pastorianus
atgttttcaaatttgtctaaacgttgggctcaaaggaccctctcgaaaggattctattctaccacaacaggtgccgctaaatcaagtaagctcactcaaagattgattgccggaggtgttgctgctgccggtatcactgcatctactttactctatgcagactctttaacagccgaagctatgactgcagctgaacatgggctacatgccccagcacacgcttggtctcacaacggtcctttcgaaacatttgaccatgcatccattagaagaggttaccaagtttaccgtgaagtctgtgcggcatgtcattccctagacagagtggcctggagaactttggttggtgtttctcacaccaacgaagaggtccgtgttatggctgaggaattcgaatacgacgacgaacctgatgagcaaggtaaccctaaaaagagacctggtaaactatctgactatatcccgggtccatatccaaacgaacaggccgcaagagctgccaatcaaggtgctttgccaccagatctatccttgatcgtcaaagctagacatggtgcttgcgattacatcttctctctgttgactggttatcctgacgatccacctgctggtgtcgcattgccaccaggttccaactacaatccttatttcccaggtggttctattgccatggcaagagtattgtttgatgacatggtcgaatacgaagatggtactcctgcaacaacctcccaaatggctaaggatgttaccactttcttgaattggtgtgccgaacctgaacacgacgaaagaaaaagactaggtttgaaaaccgtaataatcttatcctctttgtacttcctatctatctgggttaagaagttcaaatgggccggtattaagaacagaaaattcgtgttcaacccaccaaagccaagaaagtag

SEQ ID NO: 2380 - DNA, 1737 bp, Saccharomyces pastorianus
atgccgaaaagaaaagtagtctcaaacaaggagaatggcaagcgtactttctctcacgatgacttaaccccgcaaatccaggagtttcaaaacctaatggacctcgaatctcagaaagtggagaccattagacagtcgtattcaaggcagaactccctattggccaaggataactccatattaaagatcaaagtaaatggattggagaagaaaataagtcagctggtacaagaaaacgtggctcttcgatctaagacatctataagcgaggctatttacagggaacggttgaacaaccaactacagactatcgaaaatgggattatacaaaggttcgatgagattttttatatattcgacaatgttcgtaagaatgaaagtctacccagttcaaatttgaaatccatgctaaaaagaaccagttccagatcgagatcatgctcactgtcgtcacccacgtacttgaaaagctgcacagagccattgaattgtcagaacaatccgtcaaatgattcaagctttaataaagacgacggccaggaccaagagcacaaggctaaaaaaaggaaaagctctaggcggcaatccatgtttatttccacaagtttagagccagacgatgacgctgacgaaaaggaaccaacaatagacgaaccttccataaacctacccagagaactgcacgagactttgcaagtaaaggacacaatgggccaactagatgtagacgaagatattgagtcaaccagtaattttactaactctattattgaatattctatacctgaggaaaactctacggaacccgagcattcatcttccaaactagaaatatttaatgatagtacaaacatgctaggtacggcatcgtcgaatccattacccttacctttacccttaccggttctctcgactactttaccggctacaaccacgtctgcgcctaattcttcaacgaattcgcattcgaaaaccaaaatcaaacattccatgaagccacctaggatagaactgaagaaaaaaatcattgatgaagtcatgcctgtaagtaatatgagcaatagcagtgatatcacttttagtaggacaagaagaactcggggcaaagctgtagattatacgttgccttcattaagggccaagatgaggaggccttcggaaaaactagtagatgccactactatgattgatatacacgacttacaagtttccaaaaaaaacagcatcactgtaagtaacaggaagagtctctctcccaatccaatacccgacgaaccgcagttgaaagaagtggtcgtttctaaagattatggaactccaaaggaaaagataatagaaaaccaagtaacaaatgagatcatcccgcttactaatattaacaacaataataacaacaaaaaaataaccaataattatagcgtcaaaaaagcatcgcccttacttgatattaccaacagatccgagaataagagaaaagtagtaaaaactaaaaaattgttcaaaaatgcaattgtcaacaatctatccgatgaaaactctacttcgcgacgttcgaagttgccaaatggaaccataaacatcaacagaaacagtaataattgcgatcctaatgccaatagtgctaataataaatccgttagcttcagattaaatgaggatgatttagcgatatttgatctatttggaaatgacaagacaatgaaacatcaaccgaagacatatcgaaccaagaaatga

SEQ ID NO: 2381 - DNA, 915 bp, Saccharomyces pastorianus
atgacaatgaaagagcaaaacaaagaagaacagcaataccttgatttatgtgaaagaatcatcaaagaaggtgaatttagaccagatagaacaggcactggtacattgagtctctttgcaccacctcagttgcgttttagtttgcgtgacgatactttcccgttgctgacgacaaagaaggtcttcaccagggggatcatactagaattactatggtttgtagctggtgctacagatgctaatatcttatctgaacaaggtgttagaatttgggacggtaatggatctcgtgaatatttggacaagatgggactcatggataggaaagtaggggatctgggtcctgtttatgggttccaatggagacattttggtgccaaatacaagacctgcgacgatgactataccggacaaggtatcgatcagctgaagcaggttatacacaaattaaagacaaacccttatgatagaagaatcatcatgagcgcttggaaccctgcagattttgacaagatggccttaccgccatgccacattttttcacaattttatgtcagtttccccaaagagggaagtggaagtggtaaacctcgcctttcgtgcttgctgtaccaacgttcctgtgatatggggctcggtgtgccatttaatatcgcctcatatgcgctactgactagaatgatagctaaagtcgttgatatggaaccgggtgagttcattcatactttgggggatgcacatgtgtataaggatcatattgatgccttgaatgaacaaatttcaagagatccaagaccattccccaaattaaagattaaaagggacattacagaaattgatgactttaagttagaagatttcgaaattgaagactacaatcctcacccaagaatccaaatgaaaatgagcgtataa

SEQ ID NO: 2382 - DNA, 708 bp, Saccharomyces pastorianus
atggcagaacatgatagtgccaaatactgggctaaacagggcgttcgtcgaggattacagaagactcgctactactgccaaatatgccaaaggcagtgcaaagatgcaaatggattccaatcacataataaatcgccctcacacttaaggaaagttggccaggtgacagcggaagacgctaaacgatacaatgatcagtttgagaagggttttctgcagttgctgaagcagcggcatggagaaaaatgggtcaatgctaataaagtttacaatgagtatgtccaggaccgcgaccacatccacatgaatgcaaccatgcatcgctctttgacgcagtttgttcgtcacctgggtcgagctggaaaagtggacgttgatatagacatggatgacaaatctgagaatgttgaaggccccttgctcatcagggtgcattcatcctctctattgccaccttcagaggaaagtttcctacaagatcaacaagaggaacaagaaacggtagccgccgagcttttgaaaagacaggttgatcgtgccaagcgacaaatactagagcaggacgaactgccccaacccaagcttaaagcggaaataaacgaagacatcaccttagagccggtgcgagtcgctttccacggtgtcgggcgggtaaacaagaagaaaaagaaggctcttccacggaaggacgggatcaagttccgatga

SEQ ID NO: 2383 - DNA, 942 bp, Saccharomyces pastorianus
atgaatttttggggagtaatattattggctggtttccttttgattgctactttcctcattgggctaatcccgctatactatattgataaacagagaagttctatcgtgattgatcaagaaggtgatgattcaaactccgatattagcacaaatgcaaacatgcaaacgagtagcagtggaattagtggctaccgtgtcaaaattgccgttctatcccaatttggtatagggatgttgctaggaacctcgttcatgttggtaataccagaaggtatcaaagcatgtgtagaacataatggtaatatcggactaattttgctaattgggtttttaggagtttatattatcgacaggttggtgacgttatggatttccggaaagcaaacaatatatacacatgatgctgtaaagtttcaaagttggaaagacataataaatcatccaaaacaaatatggataaatttaatacaaaataatgtggtattcgcattattcattcatggattgaccgacggaattgcgctcggtaccacaacaaataacgattcgttacttattgtggttttgattgccatcgtgattcataaggtccctgcagttctttcgttaactagtttaatgatatcaagacagaatttattaaaatgggaggtcatctgtaatgttttcttgtttgcatcatccacaccaattggatacatagtattatccgttttgaatttgagtcaatcctcaacaatggatcggattagtggatatcttttgttaatgagtggtggtagtttattgtatgcctctttcacagcatttgttggtggaggctcacacgatcatgacttgagcgtagaagaggaagttgttttaccccatgatgaatccatttatgtgttgctaggtgtgagcattccgttagtgatatcgttttgcatttctgaagactag

SEQ ID NO: 2384 - DNA, 633 bp, Saccharomyces pastorianus
atgaacacatccgtcacttcaataaagttagtactattgggtgaagcagcagttggtaaatcctcaatagttttaaggtttgtatcgaatgatttcgctgaaaacaaggagcccactatcggtgctgcattccttactcaaagagtcactataaatgaacataccgttaagtttgagatatgggatacagctgggcaagagagatttgcatcgttagcacccatgtactatagaaatgcacaggctgctcttgtagtatacgacgtgacgaaaccacaatcttttatcaaggcacgccattgggttaaggaactgcatgaacaagcatcgaaggacatcattatcgctttggtcggtaacaagatcgatatgttacaagaagacggagaaaggaaagttgcaagagaggaaggtgaaaagttggcagaagaaaatggcctactgttttttgaaacaagtgcaaaaacaggagaaaacgttaacaacgtatttttgggaattggtgaaaagataccattgaaaaacgctgaagaacaaaataacgctaataatgaacgtgaatcgaataatcaaagagtggatttgaatgctattaataacggtgccagtgcgaacagtggttgcagttgctag

SEQ ID NO: 2385 - DNA, 1710 bp, Saccharomyces pastorianus
atgtcccccctaacaagaaccgtagctataaggaaaacgattaaggtcttatccaaatgtcaatctggtaaagagtacactcaaaaatttctccaacgtgcgtactcaacgtcgcatgcaaatagctcgtactgctcaaggaccaaaatatttgtatcttcccattacaaagccctaaatattgctttactaagcgggtccctgcttttaacctattcttactattctcctaaaaagattctttctctagatacgataaacggaatcaaggattactccacaagcactcgtggaaataccggtatgcgcacgcctaattcaaaggaatcacaaggaccaaaagatcaacaaccccagaatgatcaatccgtacctatcttgaacgatgctaaaatagaggctaaactacacgatagggaggaaagccatttcgttaaccgaggtacaggtattttcaggtacgatgtggcccagctgccctctaaccacccaatagaagacgaccatgtagagcaaatcatcactattccaataacgggtgaagatgggaagtcctcggaaaaggacctatacttttttgggatctttgatggccatggtggcccttttacttcggaaaaactttcgaaagatttgatccgttatgtagcttaccaattgggtcaagtttatgaccaaaacaaatcaatcttccactctgatcctaatggtttaattgactctgcaatttctaaggggtttttgaaattagatgacgatatcgtgatgaaatcatttaggaagctgttccaagatccaagcaactcgaatatcgcaaatacgctacccgccatctcaggatcttgcgcactgttgagtttgtacaactctacaaactctattttgaaagtggccgtgactggggactcaagagctttaatttgtggtttggatagcgacggaaaatggaccgtcagatccttatccactgatcagaccggtgatagtttggaagaagtgcaaagaattagaaatgaacacccaggtgagcctaatgtcataagaaacggaagagttttgggttcgttgcaaccctccagagcatttggagactaccgctataaggttaaagaagtcgatgggaaacccttatcggatttgcccgaagtcgctaaactttattttagaaaagaaccaagagacttcaagacgcctccatacgtgactgcagaaccagcaattacatctgctaaaattggtaaagactccaaattcatggtgatgggttctgatggtttattcgaattattgactaatgaagaaattgcttcattggttatcagatggatggataagaatatgagtttgccaacaccgtttaaggcagaaccggggaagctaccgaaggtcgttgatgtgtcggatgacaaagaagctcaaagaccggcattcagatacaaggatgataaatcgagttcaaacacggagtatcttttggaagacaaaaacgttgctactcatttaatcaggaatgctttaagcgctggtggaagaaaagaatacgtctcggcactagttagcattccatcaccaatgagtagaagatacagagatgacttgacggttacagtggcgtttttcggggattctggaacaccttctaacgtatcgaacgccacttccattgtgatgaacccagacgcaacgacaaagccaaagcctaggttatga

SEQ ID NO: 2386 - DNA, 552 bp, Saccharomyces pastorianus
atgggtaattcaatttcaaaagctctaggcaaattattcggctcaaaagaaatgaaaatattgatgctaggtttagataaggccggtaagacgacgatactgtacaaattgaaactaaacaaaattaagacagctacccccactgttggattcaatgtcgaaaccgttacttacaaaaatgtgaaatttaatatgtgggatgtaggcgggcaacaacgactaagacccctctggagacactatttccctgccactactgcattgatatttgtggtggactctagcactgaaggccgtatgcaggaggccaaagaggagctatatagtatcattggggagaaagagatggagaatgtggtactacttgtatgggcaaacaagcaagatttgaaagatgcaatgaagccccaagaggtttctaattttttggaattgaagcaaaacttgaaaaatcaaccctggtgcgtaatcggtagtaatgctttgtccggacagggtcttgtggaagggttatcttggatttccagtaactcagacgttcccagaaaatag

SEQ ID NO: 2387 - DNA, 777 bp, Saccharomyces pastorianus
atggctgctggcgttcctagaattgatggattagagtccttaggtaaccctttggaggatgccaaaagagctgctgcatacagagctgtcgatgaaaatttaaagtttgatgagcataaaattgtcggaatcggtagtggtagtacggtggtctacgttgccgagagaatcgggcagtatttgcacgattctgaatattccgaactggtgtctaaattcatttgtattccaacaggcttccaatcaaggaacttgatcctagataacaaattgcaattaggctctattgaacaatatcctcgtattgacatagcttttgacggtgccgatgaagtagatgaacatttgcaattgattaaaggtggcggagcctgtttattccaagaaaaattggtcagcaccagtgccaaaacgttcattattgttgctgattcaaggaagaaatctccacagtatttaggtaagaactggagacaaggtgtacccatcgaaatcgtaccttctgcgtatgttagagtcaaggacgacttgttagaacaattgcatgcagacaaggttgatatcagacaaggcgggtctgctaaagcaggtcctgttgtaactgacaatagcaactttattatcgatgcggactttggcgaaatcaaggatccaagagcattgcatacggatatcaaattgttagtcggtgtagtggaaacgggtttgttcatcgacaatgcttcgaaagcttactttggtaattccgatggcactgttgaacttgtaacaaaataa

SEQ ID NO: 2388 - DNA, 777 bp, Saccharomyces pastorianus
atggctgccggtgtcccaaaaattgatgcgttagaatctttgggtaatcctttggaggatgccaagagagctgcagcatacagagcagttgatgaaaatttaaaatttgatgatcacaaaataattggaattggtagtggtagcacagtggtttatgttgccgaaagaattggacaatatttgcatgaccctaaattttatgaagtagcgtctaaattcatttgcattccaacaggattccaatcaagaaacttgattttggataacaagttgcaattaggctccattgaacagtatcctcgcattgatatagcgtttgacggtgctgatgaagtggatgagaatttacaattgattaaaggtggtggtgcttgtctatttcaagaaaaattggttagtactagtgctaaaaccttcattgtcgttgctgattcaagaaaaaagtcaccaaaacatttaggtaagaactggaggcaaggtgttcccattgaaattgtaccttcctcatacgtgagggtcaagaatgatctattagaacaattgcatgctgaaaaagttgacatcagacaaggaggttctgctaaagcaggtcctgttgtaactgacaataataacttcattatcgatgcggatttcggtgaaatttccgatccaagaaaattgcatagagaaatcaaactgttagtgggcgtggtggaaacaggtttattcatcgacaacgcttcaaaagcctacttcggtaattctgacggtagtgttgaagttacggaaaagtga

SEQ ID NO: 2389 - DNA, 567 bp, Saccharomyces pastorianus
atggatttaaacagaaactggttacgatggaaaattgcaataggtgggccaaacggcattgtacttgattttccatcgtttttagtgggttgcatgtttacaacaatgattgggccacttttacaaaaactcataggtaggcttttagtaggtttggtatccgtaatcaaatttctccttattattggaagcattgtctttattactggtgtggtatcaaataaatacacttacgatgatttcaaaataagtataagaaaatctggagaagaagtgactgaaccaatcaaaacagcgaagaagaagactatgccaatggaaaaagatgataccgtaggatcttttaattactttgaaatccccataacaaaggaagtaccaacaattccttatattgacggtggtacaagggctcttaaaaatccacccaaggatcctttaacaacgattccttatattggcagtggtacaaaggcttgtaaaaaccctcctaaggatgcatcgagagcagctttatctaactcgaataggtacgaaaactttataaacatggcgcaacataagtag

SEQ ID NO: 2390 - DNA, 3270 bp, Saccharomyces pastorianus
atgactgcgagcacttcttccgtcatgtcttctccacgcgaaggaaagagatctttttcttccactatcaaatcattctttttgaattcgaataaaaaacggctatcgaataagaagcttttcacttcagacatcccatacgcgaatcatcttgatgattcggatccagagactacattacatgttagaaagagaaagaggatggccggtacatcacaacacaatgagcgcgttattaatgacaatagtaatgtaccaattataatatacggagctgaaggaacagagagaccgcccgttctacccatcttgcccatacaaaggttgatgttgttaagggaaaagcagaagcttaggaatatgcgtgatcttagattattacaagcctttagatctccttccgtttcatcttcaatgttcgtagatcctcagaatgaagcgggtgacaaagagtcatacatacgtacatccactacaccttctccgatcaagaagacggttttcacagaacaaattcccggagaaggcgttgacaatacaggcattaaactgcctctgctaaaatctttgaagaacaaggctagtagagagaagtttcaaagccaatcgaaggggactgtatggtcagctaactttgaatatgatttatcagaatatgacactatgcaaaaacaacagaatagcaaaaatgttattactaccactgctgatgagaataaaattgacacgagtaacaatgataacaagaacaatgatgtgaatggcgatttcgcgggaggtcccacatcagcaagtaattttgaagacctaagatcagatatcaactctagtaggctgtcaaactctcaaaaaaatttacttttgaatggttctacttctacagttacaaaacatgccgcagtgccgaaggattttgctgttactataaagccactagatacgcctacactaaagaaaattgccgaaaccaaaaaggacaaagaaagcattgtcttgcctactattggattcgactttatcaaagacaatgaaactccctcgaagaaaacctcccctgtagcaaacgtttctacagacacagtcatcaatgcaaatctatccgacatccataaaccaaccaatatggcagagatccccaagctatcattcaataccggacagaagatcaatgaacctaaaaaaactgaacaatctgcctcttcctccactttattcaactttggtggcaaatcagatgcttcttcaattaaaaaacctttctcattcggaaaagcctctgagagagaagagatgcctatgaaaccacaggcgcctgcattttctttctcaaaaccagcagctctctcagacgtcgctccaaaatcaactgctgcggcattttcttttggtaaacatgaaaaaaatgatgaacaagatggcgatgatagtaatgatgataatgaacccagaagaaaaaggcgtgctcaaactaatgaatccgtgaacgctggttcattgtttagtcttgataaccaaggagaagctaacaaaggggagccgaaaatcggtacgtccgaaaaaccaagctttccttttggttcaagcaataagcaagtggaaagcggaccgtcatttgcattcggtaaaaagcccgatgaaaatggccagactaaatcccccattgcatttacatttggcaaaccagtggtcgccaaagaaccggaagtgaaatcatcagaaacgctcgcttctgtttctgggaaacctagttttacatttggtcaatccacaagtgaaaatgaagcttctggagcacatggcaagccagcattttctttcggcaagtcagcaatggaaccgaaaagtggtccaacttcgaattcagcacccaagccattatttacatttggcagcaagcctgctgacatccaaacattaccagataacaccacatcgaaacccacactttccttttctaagcctgtccaagaagactcatccaccgccccagattccaaaatgccctcgttcgcttttggagcatcttcgaacccctcacaacaaaagtcatcgttctcatttggcaagccagaagcggcaaaagaaccaacggattccaaatcttcatttacttttaccaaaccttcttttgaaaagactgagactaagggtgcaccctcttttacattcggtgcgccagcaacgaatcgcatcacagaaaatagtacaaagccatctttcagctttggagctcccaagccgactgagccctctgcagttgtgatagcaggaagtactaacaagacatccggtggattttccttttcaaaatttgatgacaagaaggaaaattctgcaactgcaactcctttattcaaacggtcagcttccacaacaccagtttccgctttgggtaagccaattggtactaataacaatacatcatctaaaactgcattttcattcggcactgccaataccgaagctaccaacgccgccccaacttccacaccattctcttttaatggtccaactaccgacaacatcacaagcaatacgatcagcagtatctcaggtactaacatagtaggtggatttaatttagggaaacgagcccaaagtagcgctgctaatagtgatgccagtggtgaaagctcaagatttagtttggctagaccaggaaccactgtaaatagcataacttcagatcagccctcttttaattttggtagcaatagtacggcaggccctaaccctttcacatcggccgctccatcgaataacactggtctctttaataaaccggtttctacgggtgcacaaagtactaatgcgccttccagtttcaactttactggaaataatcccgcgtcaggttctgtattcaacatgaacaacaatactggtgctactaccatgtttggcggatctagtactaacttatcgcagcaaccgcagaacacatccttcaacgcaaataattcattcacaccgtcaacagttccaaatatccattttggcggatttgatggtggtaacagtaatagtgccacgggtgctttgaagccaagtgatatatttggtgggaattctgcatctggttctaatgtaaacggaattaacccatcatctgttttcggaggctcagatggagcaccttcctttggacagccacaagcggctccaaatcaaatgggcatgaataccggcatgaagatgggcatgaaccttgctggcaatggtggtatgacaaacaggaaaattgcaagaatgaggcatacgaagagataa

SEQ ID NO: 2391 - DNA, 1182 bp, Saccharomyces pastorianus
atggcgaaaattatgatccctgctagcaagcagcctttgtacaagaagctagctcttcttttggtcgctgtgtttactgtctatgtgtttttccatggcgcccaatacggcattggctcttcaccaacacccaagtacagtaacgttgtatcgtcggacacgggtttcaaatactcaagagtagaaacacctaaatatacaggtgctcgtgaaaaagcaacttttgtcactctggtgcgtaatagagacctttattcgttggccgaatccatcaaatctgttgaggataggttcaactccaaattcaattacgattgggtatttttgaatgacgaagagttcactgaagaattcaagaatgttaccactgctttagttagtggtacaactaaatatggtgttatcccacatgaacattggtcttttccagattggattgatgaatcaaaagccgctcaagttagaaaggaaatgggagataaaagaattatctacggtgattctatctcttacagacacatgtgtcgttttgaatctgggttcttttacagacaccctttgatgaatgattatgattggtattggcgtgtggaacctgatatcaagttgcagtgtgatatcaattacgatgttttcaaattcatgggggaaaataacaagaagtacgcctttgccatttccatcaaggagtatgaagcaactatccccactctatgggaaacaactcgcgagtttatgaaattaaatccagggcttctacatgaaaacaatatgttagactttgtcagcgacgatgagggtctttcttataatttgtgtcacttttggtctaattttgagatcgcctcattggatttatggaggtcaccagaatattccgcatactttgattatttggataaagcaggaggatttttctatgaaagatggggcgatgctccagtgcattctatcggtgcttcattgttcttagatcggtctgaaatccaccattttggtgatattggttattaccatgtgccattctactcttgtccaattgacaccggtatcaggttggccaacaaatgtagttgtgatccacaaaccgatttcacatggcacagttactcatgtacaaataagttttacaccgtgaacaagctgcaaaaacctgcaggctggcaaaaccatattggttag

SEQ ID NO: 2392 - DNA, 984 bp, Saccharomyces pastorianus
atgtcctctgacacttcattatcagaatcttcgttgctcaaagaggaaagcggcagcttaaagatgtctcctccgcctgtaacaccaaatccagtacgtgataatctcaaatctttcgtggctggtggtgtcggtggtgtatgcgcagtgtttacaggccatccgtttgatttgatcaaagtgagatgtcaaaatggtcaggcgaactctgcgatgcacgcagtcgcaaacatcttaaaagaagccagaactcaggtgaatggttctatgttcaccaactccataaaagggttctacaaaggtgttattccgcccttattgggtgtcacgcccatctttgccgtttctttctggggttatgatgtgggtaagaaactggtcacctataataacaaaagtacgggcaccggtgagttgaccatgggacagatggccgcggcaggcttcatcagcgccatccccaccactctggtgactgcccccacagaaagagttaaagttgtcttgcaaacctcttccaaagggtctttcattcaagctgcaaaaactattgttaaggagggcggcatttcttctttgttcaaaggttcattggctaccctagcaagagatgggcctggctcggcactatactttgcatcttatgaaatttctaaaaaccacctaaataataggcaaccccatccaagtgcgggcgaagaccagccagtcaacattatgaatgtttgtcttgctggtggtattgcgggtatgtctatgtggttggctgttttcccgatagataccataaagacgaaattgcaggcctcttccacgaagcaaaatatgatttctgcgacaaaggaaatctaccttcaaaggggaggcattaaggggttcttccctggtttaggccctgcattattgagatctttccctgctaatgcggctacgtttttgggtgtagagttgacgcattctttatttaagaaatacggtatatga

SEQ ID NO: 2393 - DNA, 951 bp, Saccharomyces pastorianus
atgccgataaacaaatcaaccataagagaatataagttagtagttgttggtggtggtggcgttggtaaatccgctttaaccattcaattgattcagtcgtacttcgtggacgagtatgacccaacaatcgaagactcttacagaaaacaagttgtcatcgacgataaggtgtccatcttggatattttggatactgctggccaagaagagtactcggccatgagagaacagtacatgagaaccggtgaaggttttttgttggtttactctgtgacttctagaaattcctttgatgagttgttgtcttactaccagcaaattcaaagggtcaaggattctgactacattcccgtggtcgtggttggtaacaagttggaccttgaaaatgaaagacaagtttcttatgaagatgggttacgcttggctaaacaattgaacgcacctttccttgaaacttctgctaaacaggccatcaatgtagacgaggcattctacggtctcattcgtttggtgagggacgatggtgggaaatataatagcactaatgaccaaccggatagttctgctaatgcaaaaaatgcgagaaaccctaatgctacttcatctcaaacccagaatggaagcaacgttaatcgcggggcttatggccctggtagtgtattgacaaatggtgacaccaactctagtcctaattcaaatcttgaacataatgttgagacttctagaagagctgatgaaaaaaataatagtaacaacaacaataataataataatgatgatgacaatgataattatgatgcaagtaacgacaatgaggatagaaatggaaataatggtggtaatggtgataatgcgccaaaagcaagaacaaaacaatctactgtaccacaaaaaaatgcaagttcaaccacgaaaaaggaatccagtggcggttgttgtacaatttgttga

SEQ ID NO: 2394 - DNA, 852 bp, Saccharomyces pastorianus
atgagtatttgcaagttgaaaaatgctgtttctctttttccgagatcatcttttacagatggtgtagtaagcacaagtaaaagtttccgtagttgggacacctgcatggacaacaaagcatgtaaaattattgcaattgtgggtatcgtattggctagcatactagtgatttggctaatcggaggactactgacatgtttcagacagggggtaacaggtattggccagttcgtttgttggtgctgtcattgttctggtaaccaaaataggaataacggaatgcccgtaaatgagggctttaatagagtcaatatgggtgcggtacctccttctacagttatctaccaacccattcaacaacctgaaaacgcatattatagaaacgatgcgaaacccgacacattttatgatgaagttaaaacaccaagtaatgaagtttatgaattagaagaggatttcgatttagagaagcaaagagaaaagaccagaaggaaacaaaggagacagagaaacaaagaaggacaaagccctagtagagtggcgcctctagtttacgatgaagatcctactgaaaatgatattcctcagcctcaatacgatgcaagaggctcattcattcaaaacgcaaaccataccaataccaatagcaatagcaacactaacctcaccggtcaacccccaatatttgatatcagcgattacggtgaaaactattactataataacaataacgctcagggcaacagcaacaatgcacacatcccagatcacaggagtccgtacccgactgaaagtcaccaaccataccaaggctacaatccaaaccaaaaccaaaatggaagatattactga

SEQ ID NO: 2395 - DNA, 3327 bp, Saccharomyces pastorianus
atgattatctttgtttcagaagagcctgaaagaaggttagccattgtgtccaactcatttgctcttgttcttaaaccagtgggaaaaaaactatcagataaacccctttgtgctattgaacttcttcaaaaggacgatttgaaaaaatacggtttcaaaagactcacctcgcatgagatctttggtgtcatcggtctaatcgaagttaatggcctgttgtttgtaggtgctatcactggtaagtcgaaagttgcacagccatgtccaggagagacagtgaacaaaatttttgccgttgatttcttctgtttgaatgataacagctgggactttattgatgtcgactcctcaggctatcctgtacaacctgagaccgcttctacggaataccaagaagctttgcccaaacacccatgttacgaattgaagaagctattatctaacgggtccttctattacagttcagattttgatttgacatctaccttacaacaccgtggatttggccaacactcattgagtacggatacctatgaagaagaatatatgtggaactcttttctaatgcaagaaatgataacctacagagaccacttggatattaatttgaaacaagtcttggatgatgaagggtttttaactaccgttattcgcggatttgcagagacgtttgtctcttatgttaaaaaattgaaagttgccgttaccattatctcgaaacaaagttggaaaagagcaggaacaagatttaatgcacgtggtgttgatgacgaagcaaatgttgctaattttgtggaaacagaattcataatgtactccagccaatactgttatgcatttacacaaatcagaggcagtatacctgtgttctgggaacaaggcacctctctgatcaacccgagggtacaaattactagatcatttgaagctactcagccagtgtttgacaagcacattatgaagtcagtagaaaaatacggccccgttcacgttgtcaacctgttatcaacaaaatcttcagaaatagaactttcaaagcgatacaaagagcatctaacgcactcaaaaaagttgaatttcaataaagatgtattcttaacagagttcgattttcacaaagagacttctcaggaagggttttccggtgttaggaaagttattccactaataatggactctcttctttcatctggctattactcctatgatgtccgagaaagaaaaaacatatccgagcaacacggtatatttagaactaattgtttagattgtttggataggacaaatttagctcagcagattatttcgttagctgctttaagaacttttctagaagattttagattgattagttcaaactccttcattgatgatgatgatttcgtttccaagcacaataccctctgggcggaccacggtgatcaggtctcccaaatatatactggtaccaatgctttaaagtcttcattttcaagaaagggtaagatgtcacttgccggggccttatcagacgcaacaaagtctgtcagcagaatatatatcaacaactttatggataaggaaaagcagcagaatattgatactttgttgggaaggttaccataccagaaagcagtacaattatatgatcctgtgaatgaatacgtcagcaccaagctacagagcatgtctgataaatttacatcctcctcgaacatcagcttgctaataggttcttataatgttaatgggaccaccaaaaaagcagatttgtcaaagtggttatttccgataggcgaaaaattcaaaccagacatcgttgtgttaggtcttcaagaagttatagaattatctgctggatcgattttaaatgcggattattcgaagagttcattttgggaaagtttagttggtgactgtttaaatcagtatgaagacaagtacctattgttgagagtagagcaaatgacatctttattgatcttattttttgttaaagcagataaagccaaatacgtaaagcaggtagaaggggctaccaaaaagacaggttttagaggtatggccggaaacaaaggtgctgtatccattagatttgagtatggtgccacttcattttgttttatcaactctcatcttgcagcaggtgccacaaatatcgaagaacgtcgtagtgattacgaaagtattgtcaaaggcattacatttacaagaactaaaatgattcctcatcacgactctatattctggttaggcgacatgaactatagaataaatttaccgaacgaagacgttagaagggaactttacaaccaagaagagggatatatcgaaaaactgttgcattttgaccagctcactcaaggaataaatgccggtaatgtctttaaagggtttaaagaaccaacattacaattccgtccaacatataagtatgacccaggtacggatacttatgattcttctgaaaaggaaagaacaccatcatggacggatagaatcatttacaaaggggaaaacttacttcctttatcttattcggatgctcctctaatgacgagcgatcaccgcccggtctatgcggcatatagagcgaaaataacttttattgacaataaagagagactgtccctcaagaagcgtttatttactgaatataaacaagagcacccagaagagccaggttctttgatatcagaacttctcaatcttgatatagatgacaagagcaccgataggcttggaagcccttccgaagcctctttactggatattgacccgatatcaacacaacctacagcgtccagctccgcttctccatcatctgtttctttaacatcagcttcgctacaatccatcagaactcaagataataaccagacgcccacttctgtcaaaaaaccaatattacgtccccctcctccacctgctcataaatctgtgtcaccacctgcttctgcaacagtagagggaaaagcaataccaccacaggcctcatcagccccaatatcatctccaggaaatattatacaagagaacaaaccgttggcacaaaatagacgaatcccgcctcctggatttagccaaaatattttaactccaaaaagtacgagtaatttggcctcacctgcgtcatctaaaattgatctaaataacaacgtggtagaaactacgcatccgacgcaagctacaagacaactgactcctacatcatcattttcaatatcgatggatgcgaataatcagtccaagggcttacaatctaatgaagcttccattaaaccggagacaaaagccaaactgaaccacatgactttagattcatggcaaccattaactcctaaataa

SEQ ID NO: 2396 - DNA, 1314 bp, Saccharomyces pastorianus
atggtagtgaacacaatatacatcgcaaggcacggatataggtccaattggctccccgaaggcccatacccagacccacttacaggaattgacagcgatgtccctttggcagaacatggcgttcaccaggctaaagaactggcgcattacctcttatcattggacaaccaaccagaagcagttttcacttctccgttttatagatgtcttcaaacaacacagccggtagctaaattgttagaaattcctgtttatttagaaagaggtattggtgaatggtatagaccagacaggaaacctgtcattccagtgccagctggttatgagatattaagtagttttttcccaggtatcatcagctcagaatgggaatccactttaataccttgtgaaaagggtgagactgagcaggagatgtacgaaaggtgtaaaactttttggcctttattcattgaacatgtagaaaaagagtatccaaacgtcgaatgtattttattggtcacacatgctgcatcaaaaattgcccttggtatgagcttgctggggttcgcttatccacgaatgtcattagatgaaaacggtaatataataagaagtggtagttgctccttagataaatatgaagttctcaggaaaagctacgatactacaggagaagttgacaatcaagaccaaaccgctttgtcgtacattccgtttagtgatagaaaatgggttctaactatgaatggaaacactgaatttttgagtggaggcgaggaaatgaattggagttttgattgtgttgtagaggctggatctgatgctgatatcaaaagtagacaagagacaaagaaaacgagttcaccggtaccagaaatgggtgaaaatcccgaattggaaactgtctacatcagcgttgatatacctagcgacagctataaagagaaaactgaaataatgaatagcgcaattttgcaatattccggtttagacactgatgctccactgttcaggattggagataagctgtatgagggaagttgggagagactggttggcactgaacttgcgttcccaaatgctgcacacatacataaaaaaacagtcagcttactggcatctactgaaggcaataagtctgtaacgattaatcaaaatacagagttgtctgctaatagcgactcagacgcacctaaacaggaaaacgatgctacagtaccgaattcaactaacgaagacgataatcgcttggaagataaagaaaaaatccaacccgagaagatttatagaataaaagaacgaatcgtactaagtaatgtccgccctatgtag

SEQ ID NO: 2397 - DNA, 699 bp, Saccharomyces pastorianus
atgtccactgatagccaattaccatctggcataatagattctctatgtttgaagtatgacattattttggctagctcttctccccgaagatatgaaatcttacatgatataatgggaatcactgatttaaaaacaatggtttctacattcgaagaagacctcgataaaaccaaatactctatagacccaattggatatgttcgggataccagctggtgcaaagcgcaaagcattattgaaattttgactgactacgagaacgaggaaacatatcaaatgggcaaacccaagctcattgtatgtgcggatacaatcattatagacaaagacggaaagatctatgagaagcctaagacgaaagaagttcaaacgagattcttaatgaagttttgctatgaagatgacgaacctgttaacgttgtcacagctgtgaccttgataaaatggtacagtaaggagaattttgaattggtaccatttcaagatgagaccaaggtatacttcgataacaaggttccattagaagtattgaaagagtacgtaaagagcggagatggtcttaacgttggtggcggattcaagatacaaggacggagtgctatatttattgagaaaattgaaggtgattattataacgtagttgggctgccccttaacaagacattcaaaggtctctatgcggaggctagtgtagtataa

SEQ ID NO: 2398 - DNA, 882 bp, Saccharomyces pastorianus
atgaaggccactttattgttgaaggcacatttgtcttctgttagctatacaaccaaaaaatcattccaaaaacaacttgatcgctcaccgtatacagccttccaatacttcttccaaattgaagtccagaaattacacaacgtctcaaagtacgacgatattacaaattacgtaaaaggcaacagtaattttaaaagatttacaagaaatgaatgggacaacatgtcattgaccaagaagaggctgtactatgcatcattttgccagtctatgaacattgatgtttggaatgtcagtaaagttgaactcgccaaaaggctagagattcctataccagcgatgagtgaatacttgttttttagaaacaagttcaagttgaagtttgactctcactggagcgctttgaaacctaataactataagggtcactcgaaaccatctaccgctaaaaaaaatgttacagaaccatactcaagaagccgcaccatcacatctatgaacaatacgaaacctcggaaacggttggtcgcgatgaagagaatttcttgttcagagaactttccaaatggtcagtctcatgacgctcagaagcatctttatgactacatgaaaaggtttcagctaatgtgtaaagaatgccggtatgcttggaacgaaaaggttgactataaccaaaaattggaaataagaaagaaattacagctatggaggttgaaatttgaggagatgatggataatgaaatacaaatattgcaaaacaacatggatactatgtcaaaatttggacacagaagcgaagcatacttcttaacgtcggatcctgatacaaatgcattaccaaataatattcttcccatggcgtttttgccaaaaaaaaaataa

SEQ ID NO: 2399 - DNA, 807 bp, Saccharomyces pastorianus
atgtcatcgacacataataacaatgtagaaggttctcaatctgtaccacaaagttcgctgacagagcagcaaagagcacagcagcaatatcaaatcttcgaaaactcattaccgaaaataagtcaatcggcttaccagatgctgttaaatgagatggttccaatggcaatgggaatcgaaaaacagttatcaggtgatattgttagttctgaaagcaatgtggcttcggaaaacggtaatatcaacagcatgatgaagaaattgaaaatagaggaaaatcatactgtagacatcatgtcttcacacaatttgataaatgaattgtataaagcagaagaagtggaaagggaaagagttctagcaaggctgaggaatatggggttccagattggatcaaagctgtcagaacttttgatattttctaacaatccaaatttacaattcaaagaaatggaccttttattaataatgaagttcgtgtgtagagacgtctggaaacaaatattcggtaggcagattgacaatttgaaaacaaaccatagaggaactttctatctccttgactatgactatcgacctatccaatcattctctttaagtgaagaagcaaaagacgaggaattaaagatgatcgaaccctttttagaaatacctgtgggtattattagaggcgtgttatcttcattgggttattcctctgaagaggtcatctgtttggcatcttttatcgataggcctacagagcgacctaaaacaacttttcctaagggagtcagtttccatgttcaaataacaatgtcacaataa

SEQ ID NO: 2400 - DNA, 4383 bp, Saccharomyces pastorianus
atgaaggaagtcgtcgttagtgaaactccgaagaggatcaaagggctggagtttagcgctctaagcgctgccgatattgtcgcccaatctgaggtggaagtctctactagggatctcttcgatttagagaaggatcgtgctcccagggctaatggtgccttagaccctaaaatgggtgtttcatcctctagtcttgaatgtaccacctgtcacggtaatctggcgtcgtgccatggtcattttggccatttgaaattggccctacctgtcttccacattgggtactttaaggctactatacaaatactgcagggtatttgtaaaaactgttctgcaatcctattatcagagacagacaaaagaaaattcttgcatgaattacgtcgtctgggcgtggataatttgagacgtatgggtattctgaagaagattcttgaccaatgtaagaagcagagaagatgtctgcactgtggtgctcttaacggtgtcgtgaaaaaagctgctgctggtgctggttcagccgcattgaaaatcattcatgatacattccgttgggtgggtaaaaaatctgctccagaaaaggatatttgggtcggcgaatggaaagaagtccttactcataaccctgaactagaacgttatgtcaaacgttgtatggatgatctaaatccattgaaaactttaaatcttttcaagcaaatcaagtccgcagattgtgaattattaggtatagatgccactgttccctccggtagaccagaaacctacatttggagatatttaccggcacctccagtttgtattagaccctctgttatgatgcaagattctccagcttctaatgaagatgacttaaccgtaaagctgacagaaatagtttggacttcgtctttgatcaaagccggtcttgacaagggtatttccatcaataacatgatggagcactgggactatttacaactaacagttgctatgtacatcaactcagactcggtcaatcctgctatgctcccaggttcatccaatggaggcgggaaagtaaaaccaatcagagggttctgtcaaagactgaaaggtaaacaaggtagatttagaggtaatttatctggtaagcgtgtcgatttttcaggtagaactgttatatccccagatccaaacttgtctattgacgaagtcgccgtcccagatcgtgtcgcaaaagttttaacgtacccagaaaaggtcactagatataacagacataaattacaggaattagttgtaaatggccccaatgttcatccaggtgctaattacttactgaaaaaaaatgaagatgcaagaagaaacctaaggtacggtgatcgtatgaaactggcaaaaaatttacaaattggtgacgttattgaaagacatttggaagacggtgatgtggttttattcaatcgtcaaccatctctacatagactatcgattttgtcacattacgcgaagattcgtccatggagaacttttagactaaatgaatgtgtttgcacaccttataacgcagattttgatggtgacgaaatgaatttacatgttccacaaactgaagaggctcgtgcggaggctatcaatttgatgggtgtgaaaaataatcttttgactcctaaatcaggtgagcctattattgcggccacccaagattttattaccggttcatatttgatatcgcataaagattccttttatgaccgtgctacgttgacgcaattgttgtgtatgatgtccgatggtattgaacaatttgatattccacctcctgctattatgaagccgtattatttatggactggtaaacaagttttttcattactgataaagccgagtcataaatccccagttgttattaatctagacgcaaagaacaaagtctttgttcccccaaaatcaaaatccttaccgagtgaaatgtcccaaaatgatgggttcgtagttattagaggttcacaaattttgagtggggtgatggataaatctgtcttaggtgacggtaagaagcattctgtgttctatacaatactaagagactatggtccccaagaggccgctaatgccatgaatagaatggcaaaattgtgcgcaagatttttgggtaacagggggttttctattggtattaatgacgttacacctgcagatgatttaaagcaaaagaaggaagagctggtagagatcgcgtatcgtaagtgtgatgagttaatcactttattcaataagggtgaattagaaacgcaacctggttgtaatgaagaacaaactttggaagctaagattggtgggttcttatcaaaggttagagaagaagtcggtgatgtgtgtattaatgaattagataattggaatgcgccattaattatggcgacgtgtggttctaaaggttccacattaaatgtgtcacaaatggtggctgttgtgggtcaacaaattatttctggtaaccgtgttcctgatgggtttcaagatcgttccttaccacattttcccaagaattcaaaaacgccacaatccaaagggtttgtcaggaattctttcttttcaggtttatctcctccagaatttctgtttcatgccatttccggtcgtgaaggtttagtcgatacagctgtcaaaaccgcagagactggttacatgtctcgtagattaatgaaatctttagaagatttatcctgtcaatatgataacacagtcaggacctcagccaatggtattgtccagtttacatatggtggggatggtttggatccactagaaatggaaggcaacgctcaaccagtgaatttcaatagaagttgggaccacgcatacaatattacttttaataaccaagatgaaggtctattaccatacgccattatgaataccgcaaacaaaatattgatgccactagaagacagactagttagatatgataacagaggatttttggttaaggacgaagacaaggacaaagcagaacatgtcgaccagtatgatgccgaaagagatttttaccgttcactaagggagtatattaacctgaaagccactgctttggctaatttaagaaaatctagaggaatgctagaactagtggatgctccacctacagaattacaaggtatggatccagatgaagccgttccacaaaatgttagaacttctgtgagccaactatatagaattagtgaacaatcggtgaaaaagtttttggagattgcccttttcaaataccgtaaagctaggcttgagccaggtactgccattgatgccattggcgctcaatccatcggtgagccaggtacgcaaatgacattaaagacttttcatttcgctggtgttgcttccatgaatgtcacgttaggtgtgcctcgtattaaggaaattattaatgcttctaaggttatttctactcctattatcaatgccgtactagtcaatgataaggatgaaagagctgccagagttgttaaaggtagagtggagaagacattgttatccgatgttgcctattacgtccaagatgtttacaaagataacttatcatttatccaggtgcgtatcgatttaggcaccattgacaaactgcaattggaattgacgatagaagatatcgcagttgcaataaccagagcttccaagctaaaaatacaggcgcctgatgtcattattattgggaaagacaaaatcgcaattaacgtgttcccagagggatacaaagcaaagtccgtatctacgtcagcgaaagaaccaagtgaaaatgacgttttctacagaatgcaacagctacgtcgtgctctacctgatgttgttgtgaaaggtttagctgacatatcccgtgcggttattaatattcgcgatgacggcaaaagagaactgttagtagaaggttacggactgcgagatgtcatgtgcacagacggtgttattggttctaagactacaactaatcatattttggaagttttttccgtccttggtattgaagctgcaagatacagtatcgttagggaaatcaactatactatgagtaatcacggtatgagtgtcgacccacgtcacattcaattgctgggtgatgtgatgacatataaaggtgaagttctaggtattacaagatttggtttgagtaaaatgagagattctgttttacagttagcctcctttgaaaagacaacagatcatttattcgacgccgccttttatatgaaaaaggatgctgtcgaaggtgtttctgaatgtatcattttgggtcaaactatgtcaatcggtaccggttcattcaaagtcatcaaaggtaccaacatttctgaaaaagacttgatgccaaagccatgtttgtttgaaagtttgtccaatgaagcagctttgaaagctaactag

SEQ ID NO: 2401 - DNA, 1305 bp, Saccharomyces pastorianus
atggccactttagaagaattggatgctcaaactttaccgggagatgatgaattagaccaagagatcttgaatctctccacccaagaacttcaaacaagagctaagctcctggacaatgaaatccgtattttcaggtccgaattgcaaagattgtcccacgaaaacaacgtaatgctcgagaagatcaaggacaataaagaaaaaatcaagaataatagacagttgccttacctggtggctaatgtcgtcgaggtaatggacatgaacgagattgaagacaaggaaaatagcgaatccaccacgcaaggtggcaatgtcaatttagacaacaccaccgtgggcaaggcagccgtggtaaagacgtcttccagacaaaccgttttcttgccaatggttggcctagtggatcctgataaacttaaaccaaatgacttggtaggtgtgaataaagactcatatttgattctggatacgctaccttccgaattcgattctcgtgtaaaggctatggaggttgacgaaaaacccacagaaacatactctgatgtgggtgggttggacaaacaaattgaagaactagtggaggccattgtgttgccaatgaaacgtgcagataaattcaaagatatgggtattagagcaccaaagggtgccctaatgtacgggcctccaggtacaggtaaaactttattggcgcgtgcgtgtgcagcacaaaccaatgccacatttctaaaattggcagcccctcaactagtgcaaatgtatatcggtgaaggtgccaaattggtgcgtgatgcattcgcattagccaaggaaaaggcccctactattattttcattgatgaattggatgccattggtacgaaaagatttgattcagaaaaatccggtgatagagaggtgcagagaactatgttggaactattaaaccaactggacggtttcagttctgacgatcgtgttaaagtcttggctgccaccaatagagtcgatgttctagaccccgctctgttgagatcgggtagattggacagaaaaatcgagttcccattgccatcagaagattcaagagctcaaatcttacaaatccattcaaggaaaatgaccactgatgatgatattaactggcaagaactcgctagatcgactgatgagttcaatggtgcgcagttaaaggcggtgacggtagaagctggtatgattgccttaagaaatggacagtcttctgtcaaacatgaagatttcgtcgaaggtataagtgaagttcaagcaagaaagtcaaaatcagtctccttttatgcataa

SEQ ID NO: 2402 - DNA, 1704 bp, Saccharomyces pastorianus
atgggacagtcttcctcgactccttccagtaatgaagaaaaatcttctagttcaaggaaattcactaataatagggatgttttagcgtatttcaacaataaagcacagaaacaagttactctacccgagttggttagcttgaagggaaatctgcaaattgaagacatgaatacgccaatttccgacaagtccttatgtagcgtacttcattttccacagaaacatactctactcgtgggaatagtgactaatatgttaagagttctgagtaatttcccactaatgaactcatcttatgaaccaattacagggtacgggctactgaaatgtgttttgttattaaacaacacacgatgcgggaagtacctaaaattcaaatcatacgatcaactaaaattactattcatatcgttatcacttcaaaaaactgacaaagaagaaatacctgaagaaaatgaggacactgtaaaaaaggagagaaacataaagcaaattataacaaacttcgatgatgtcgaccctgaagtactgtatattcccgctgactttatgcttcaattcttgagttggcttttaatcctgagtaccgaatgtcctactagcaattctaagatgggtaatgataaaatctatgaccagtgggatagtttcaaaatttcagcaatgaatcttcttagaacaatgaatccagatgtggtgaacaatacggaatcacatctcataacatttgatcaattctcaacttcaattaaaactgtaatgccaaatctattaaagcctttagaaaatttaatggaacactttttttatttggacaatgatctagtgaattatgacaccaacttgtcgaatatccaagattcgagaataatgacaccagcattgctagcacagctatccacgggactaccaaaggaattgttcattcagaagttacaaagtttatatattgggagaaaaagtgggttctcaatgaggtcattgcaagctaaagtttttaaatggatggctccttcaattttgattgtcagcggaacgagaattacaaattctgatgaatatgcagctcagaaaaatccaaggtatcgtcattttcttgaagaatttcctaaattaaaggattcagaccaaaaaatggatgcatcgtacataaataagaagaagaccacttttgccgtatatatagacgatccatggaaagtgacaaacaaagactattttggtgatctgaacacaagaataatccaaatatcgccagtgcaagatatctataaagtaaaccgaaagggcacaatttatttcaatacaattggtggtggaattggaatcggagataagcaaccattaataaagcccgcatctaaaagatttgtaccaggaaacgtgtcattaactttcgatagcaccttagagttcgctgtttttaggcacactggctacggaggatcattggagcctggatctttatcggtagaaagaaaagaagaggactcattttttgaattacacttcttgattcaagatgtcgaggtatggggatgtggtggcgaaaaggagttagaggaacagatgaaacaaatggcatgggaagaagctgagtctaagaggagacaacaaattaatttgagaagcttaggagaagaccgtgccttgctggtaatggcaggtttagtgggacaaaacagaggcggtggttctatgtga

SEQ ID NO: 2403 - DNA, 1464 bp, Saccharomyces pastorianus
atgtcatttgaggataagtttgaaaagttatctgtgtcgcagagggcttcagaccatatcaataatcagctcttagagaagtttagtcacaaaattaaaactgatgaactatcattcagcaaagccaaaacttcgaaggataaagctaaccgggcaactgtggagaatgtcttggatcccagaactatgagatttctgaaatcaatggtcaacagaggtgtcattgcggatctgaacggttgcttaagtactgggaaagaagccaacgtctaccatgcttttgcaggtacaggtaaagcgcccgtggtagatgaagaaacagggaaatacgaagttttagagacggacggacttcgtgcagaatacgccattaagatctataaaacatctattttagtttttaaagatcgtgagaagtacgttgatggtgaatttagatttagaaatgccagatctcaacataatccaagaaagatgattaaaatttgggctgagaaagaattcagaaatctgaaaagaattcaccaaagtggtgtcattccggcgcctaaaccaatagaagttaagaataatgtcctggttatggaatttctaagtaggggaaatggatttgcgtcaccaaaattaaaagattacccatacaaagatcgtgaagagattctacattattaccatacaatggtagcatatatgaggttgttataccaagtctgtcgtctggtacatgctgatttgtcggaatacaacactatcatccatgatgatcagttgtacatgattgatgtttctcagagtgtagaacctgagcacccaatgagtttagatttcttgagaatggatatcaagaacgttaatttttattttgagaaaatgggtcttaatatttttcctgaaagggttattttccagtttataatatcggaagccttagaaaaatttaaaggtgattataagaatgttactgatttgattggatatattgcgaagaacttaccaataaaatccacggaacaagatgaagcagaagatgagatattcaggtccctgcacttggttaggtcattaggtggcttagaagaaagagattttgatagatatacagacggtaagttcgatttgttgaaaagtttaattgcccatgacaatgaacgaaatttcgctgcctctgaacagtttgatttaaatgacaatgatcacggaagtacttcagaatcagaagaatcttctggaagtgaagacgaggatttaagtggaagcgaagagaatgaggaaagtgacagtgatgatcgcgagtattatgacgacgatgagccaaaaatactaaagggtaagaaatatgaggacaaagacgttaaaaaattacgcaagcaggaagctaaagacaccaaaagagaaaaaaggaaaaccaaggtcaagaagcacattaaaaagaagttagtgaagaagactaaatcgaagaaataa

SEQ ID NO: 2404 - DNA, 939 bp, Saccharomyces pastorianus
atgtctgcaattttacactactctacgaaaactttatctctgaatactggtgccaaaattcctcaagtgggtttaggtacgtggcaatcgaaggacaatgatgcttacaagtcggtcgtggctgctttgaaagacggctataggcacatcgacactgctgctatttacggtaatgaagaccaagtcggccaagctatcaaggactcaggtgttcctcgtgaagaaatcttcgttaccacgaagttatggtgtacgcaacaccatgagcctgcgaaggccctagatcaatccttaaaaagactaggtttggaatacatcgatttgtatctgatgcattggcctgtccgcttagacccaaactatgttaaagatggtaacgtcttgagtgtaccaactaaagcagatggctctcgtccagtagacatcactaattggaattttatcaagacctgggagttgatgcaagagctgcccaaaaccaataaggtgaaggcggttggtgtctctaacttttctataaacaacctgaaggacctactggcatccccaggtaaccagctcacgccagctgctaatcaagtggagctacacccattattgcctcagaatgaattaatcgatttttgtaagagtaaaggtattatggttgaagcttattccccattgggtagcactaatgctccactattgaaagaaccggtggttcttgaaattgcaaagaaaaacaatgtacaaccaggccacgtggtcattagctggcatgcacagaggggttatgttgtattgcccaaatccgtcaatcccgatagaatcaagacgaaccgtaaagtgttcactttatctgacgaggactttgaggccataaataatatctcaaaggaaaaaggcgaaaagagagttgtccatccagactggtctccatttgaagcatttaagtag

SEQ ID NO: 2405 - DNA, 717 bp, Saccharomyces pastorianus
atggaatacgagaagtttctattgttcggggattccatcactgaatttgcattcaatactaggcccacagaggatgataaagattattatgctcttggagccgcgttggttaacgagtatacaagaaaaatggacatccttcagcgaggattcaaagggtacaactccaagtgggcactgaaggttcttcctgaaatcttaaacaatgagcccaacattgccatggccaccatctttttcggtgccaacgatgcatgcttagctggccctcaatgtgtgcctctcttagaatttgtcgataatataggtcaaatggtgtctgtcatgaaagctcatcacgttcttcctattattgtaggcccggcactggtggatagagagaagtgggaaaaagcaagggctgacgaaacagctctcggatatgtgcgtaccaacgagaactttacagtctattctgatgcgttagcaaagctggccgacgacgaaaaaatccccttcgtgaacttgaataaagcgtttcaaaagatagacggtgatgcctggaagagcctactaacggatggactacacttctctggggaaggatacaaaatcttccatgatgaattgatcaaagccatcgaggcacactatcctcaataccatcctaataacatggaatacaaactaacagactggagagatgtgttggatgacggctccaacattttgtcttaa

SEQ ID NO: 2406 - DNA, 1716 bp, Saccharomyces pastorianus
atggattctagaactgtcggtatattaggtggtggacaattgggtcgtatgattgttgaagcagctaacaggctcaacgtcaaaacggtcatattggatgctgaaaattctccagccaaacagataaccaattccaccgagcatgttaacggttctttttctaatcctcttgatatcgaaaagatagccgaaaaatgtgacgtgttgactattgagattgagcatgtagatgttcctacattgaagaatctgcaagtcaaatacccaaaattgaagatctatccttctccagagactattgagttgatccaagacaagtacgtccaaaaggaacatttaattaagaatagtattgccgtcaccaaaagcattcctgtggaacaacctagtgaagcgtcactgttaaaagttggtagtgaattgggcttcccatttgttctcaagtctagaactttggcatacgatggaagaggtaactttgttgtgaaaaataaggaaatgatcccggaagctttggaagtattgaaaaatcgtcccttgtatgctgaaaaatgggctccatttactaaagaactagccgtcatgattgtaagatcagtcaacggcttggtattttcctatcctattgtagaaactatccataaggacaacatatgtgacttatgctatgcaccagctagagttccagactctattcaacttaaggcaaaattattagccgaaaacgcaattaagtcctttccaggttgcggtatatttggtgtggagatgttctatttggaaactggggaattgcttatcaacgaaatcgcaccgaggccccacaattctggtcattataccatcgacgcttgtgtaacttctcaattcgaagctcatataagatctgtcttagatctgccaatgccaaaaaattttacatctttttcaactatttcaactaacgccattatgttgaatgttctcggagataaacaaacgaaggatagagaactggaaacttgcaaaagagcattggctactccaggctcctcagtatatctgtatggtaaagagtcaaagcctaacagaaaagtaggtcacataaacattatagcttcaagtatggatgaatgtgaagaaaggctgaattatattaccggtagaactaacatcccaatcaaaatatctgttgctcagaagttagacttagaagcaatggctaaaccattggttggtatcataatggggtctgattcagacttaccagtaatgtctgctgcctgtgcggttttgaaagactttgacgttccatttgaagtcactatagtctctgcccatagaactccacacagaatggcagaatatgccatctctgctagtaagcgtggtatcaagacaataatcgccggtgccggtggtgcagctcatttgccaggtatggtggcagcaatgacaccactacctgtcatcggtgtacccgtaaagggttcctgtctagacggtgtggattcgttacattcaatcgtacaaatgcctagaggtgttccagtagccaccgttgctatcaacaacagtacaaatgccgcattgttggccatcagactgcttggtgcttatgattcaagttacacaacgaaaatggaacaatttctattaaagcaagaggaggaagtccttcttaaagcgaagaaattagaaaccataggttacgaagcttatttaggaaacaaataa

SEQ ID NO: 2407 - DNA, 879 bp, Saccharomyces pastorianus
atggacgacagtggaaacaaaggttggttagaaggtgccattcgcgatatagtaaatggttccatcgcaggtgcatgtggtaaagtaatcgaatttccattcgatactgtgaaagtcaggttgcaaacacaagcgtcaagtgtctttccaacgacttggtcgtgcataaaatacacttaccagcatgagggtatagcgcgaggattcttccaagggattgcttcgcctctggtgggggcatccctagagaacgccatgttgttcgtttcatataaccaatgtcacaagcttttagagaagcacacaaacgtttctccgttaggagagatattaatctctggtggagtggcgggctcgtgtgcaagcctggtactgacacctgtagaattggtaaaatgtaaactgcaagttgccaacttacagagtacctctactaaagtgaagcatacaaaggttctgcctacaataaaggcgatcgtaagcgagagaggtgtaacaggattgtggcaaggacaatcagggacttttattcgagagagtcttggaggtatcgcctggtttgcgacctatgaactaatgaaacagtctttgaaagacaggcatactcttgatgacccgaaaagaaacgaaaataagatatgggaacttctcgttagtggagggagtgctggtttggcattcaacgctagtattttccctgcagatacggtgaagtcaataatgcaaacagagcatataagccttaccaatgcggtgaagaatatatacgccaagtttggtataaaagggttttatagagggttgggtataacactctttagagctgtgccagccaatgcagctgttttctacatctttgaaactctttctgctctgtaa

SEQ ID NO: 2408 - DNA, 1656 bp, Saccharomyces pastorianus
atggcgtcggctgtaccttatgatccatatgatgatctggataacaatccatttgctgaaccacaggaagatcaccagccaattgcagcaaccgctgatggatcttcctctatgaaggaagagcaagcaagtgctgaagaagccactgtttctgaccaggctaccagtgtggtcaacagtgctcaagaggaactgggcggagaagaaaattcaacactgtcaaaaccagttaccaaacgagacggagataaccctatactggcacaaccccttcaacgtgatatacttcctgaaagaaatgacgaaaagaaaaaatacactatgcttgtcaaagtatcagggctggaacgcttcggatctaccactggtaagaaaggtaatccaactatcgtatttgactgctcaacaaacctacccacatttcgcaaaaaacaatataagaacgtcaaaaaatcatacgaagaatttcatcaactgttcaaatatttaaatgctgctatacaagaatcctttgttcccacccttcctcccgcatacacatcatttggtattaatagcgaagaagataaaactaaagtttcacggaatttccagctctggttcaacagagtatcacaagacccgctgattcttcggaatgaagaagtggcttttttcatcgaaagcgacttcggtacgtacactcccatcaacaagtacaaatcacttgcatcagggttgaggagaaaaactttaaagcagttggcacctccttatgatgaaaccacagaactagcagagttccggccattagtcaaatctatatatgttgtctctcaaaatttgcaagaaaaactgctaaaggtttcaaggaaccgtaaaataatggttcaggaagaaaatgcatttggccaggacttcggtaatttggatgaacacaacaaactatacaagagatacggtaagattttgactgctgtgggtgatattgatagcattatagccactatggatatggcgacattatacgatggtttggaatgggttgttagagatagctatgtcgtgaaagaggcattgactaacagacattttatcatgcgaaatctaaaccaagcacaacagaattcaaaggctaaacaggaacaagctcgcagattcaggtccagaagagacattaatcccatgaaaatcgatgaagcactacgccagttgaaaacagcaaccaaggatgaacaagttttgactttaaagcttcagcggattacatccaacatgcttattgagaggaagcaatggctcgcctggtacgaggaatggataagaaattctattaaagaatttacactgcggaaaatagaatacgaaaggaagaagctaacgttactggaacgagtccgctccgatatcaggaaggctgacgagaacggtggtttatcacgtctgggacgccaggctgtttctgccaacagcaccgatacttctcagactgtcaagggcgacagttggactggagagagtaatcgtaaaagtcaaatcccgatcaataagattgctcataccgaatttgacaatgaactgttcacagaagacgatggatgtgcctcccaagactctgacactacatcgctgaacgctcgtcatgctgcatcgctgttgggtatgtctactaaatag

SEQ ID NO: 2409 - DNA, 1110 bp, Saccharomyces pastorianus
atgttgagaaacacttttctaagaaacacctcgagaaggtttttgtctaccgtcaagcaaccttccatcggaagatacactggtaagccagatccttccacgggaagatacacagtctcattcatcgaaggtgatggtatcggtccggaaatttctaaatcagtgaaaaaaatctttagtgcagcagacgttcccataaattgggagttttgtgatgtaagccccatcttcgtgaacgggttaactaccatcccagatcctgccgtacaatctatcaccaagaatttagttgctttgaaaggccctctagccacaccaattggtaaaggtcacagatctttgaacctgaccctaagaaaaacattcggtctgtttgctaatgttcgtcctgccaaatctatcgaaggtttcaagactacttatgaaaacgttgacttagtccttatcagagaaaatactgaaggtgaatactccggtatcgaacacatagtttgccccggtgttgttcaatccatcaaattgattacaagagaggcctccgagagagtcatcagatatgcttttgaatacgcaagagccattggcagaccaagaatcatcgtggtacataaatctactatccagagactagctgatggtcttttcgttagtgttgccaaagaattatctaaggaataccctgatattacctttgaaaccgaacttatcgataacaaagtgttgaatgtcgttactaacccatcttcctacactgatgctgtctctgtctgtccaaatctttacggtgatatcctatctgacttgaactctggtttgagtgccggttctttgggtttaactccttctgcgaatattggtcataaagtctctatctttgaagctgttcatggttctgctccagatattgccggaaaagacaaagccaacccaactgcgctacttttgtcctcagttatgatgttaaaccacatgggcctaacttctcatgctgatcaaattcagaatgcagttttgtctaccatcgcatctggttcagaaaacagaaccggcgatttggctggtactgctactacttcctctttcactgaggcagtcatcaagagattataa

SEQ ID NO: 2410 - DNA, 990 bp, Saccharomyces pastorianus
atgttgagatctactgttaccaaaacgccattaagaatatgtcgttccttccacagagaatctgttccttacgataagacaatcaaaaatctgttgcttcccaaggaaactaaggtgatctttcagggatttacaggcaagcaaggtacgttccatgccagtatctctcaagagtacggtaccaacgtcgttggtggtacaaacccaaagaaggcgggccagacgcatttgggccagcctgtttttgcttctgtgaaagatgccattaaggaaactggcgcaactgcgagcgccatttttgtccctccgccaattgctgctgctgctatcaaggaagctattgaagctgaaattcccttggctgtctgtatcactgaaggtattccccagcatgacatgttatatgttgcagaaatgctgcaatcgcaaaacaaaacaagactggtcggacccaactgccccggtatcattaacccggagacaaaggtcagaatcggtattcagcctccaaaaatttttctacctggtaagatcggtattatttctagatccggaactttgacatatgaggctgtccaacaaaccacaaaaactaaccttggccaatctctagtcatcggtatgggtggtgatgcattccctggtactgatttcatcgatgctttgaagttattcatggaagatgaaactacagaaggtatcatcatgctgggtgaaattggtggtaaagcggagatagaagccgctcaattcctgaaagagtacaacttcagcaagagtaagccaatgcccgtggcatctttcattgccggagctgttgctggtcaaatgaaaggtgttagaatgggtcattctggtgccattgtggaagggtccggtactgatgcagaatccaagaagcaagctctaagagacgttggagttgctgttgtcgaatctccaggttacttaggacaagctttgctagaccaatttgccaaattcaaatga

SEQ ID NO: 2411 - DNA, 2364 bp, Saccharomyces pastorianus
atgaaaagacacgtgtctttatctgacatattgacaggcaacaagaaaaaagtaaaaagacaagatactcttcagattaccattgatgaggataatgatactaaacctggtactttcaatgccaaaacgaccaatcatgtcaactctccagtaatacttctgaatcactctatggtcaagccaattgacgccacgcccactacgcacctctctgccaaagagtttttgatgatgaaacacgccaaagaaaaaagcgatgataccaacgatgatcttattgtcatcgatgaaaatgtctctaaacatgcgaaagttgtttcttcaccagaacaggatgatgatattgctataatatccacatcaagaataaaatcatcgctgcttatcgaacgagctgcaagactaaaaaatctactcaagtatgaagcaatagatacttcgaagagatttaatagcatttccaaactaaaagaaattgagccaccactatcaccgtgtcaatcatttcacccagatgatgatttggatttattatatgagtctgttgaaataccactcctttcccgcacaataccgtcactagaacaccatttcactccgcatgattatgaaacactcagtaaaggtaagaagttgaccgcctctaccccggtccgttaccaaacttctaaattatttgacacaaatgtcaagagaaacaaaaacgtatggccacaactattcaagccagctacattaaggcaagttttgattgaacctaaatcaaaatcgcaaataaaaaattggattaaaacatctttccacatactagagaagcctaccgcaagaaatcgtttattaaacatattaagacccaacaaacaacaagggattgacgacgaaattgctagttttatcgtacctgacttcgaagaaaacgaaaagttacgcataaattcccacgaagatggcgaaataaatcttaatttgcgtgaatttgtgcccttaatgatcatacatggtaacgcgataggaaagaagacactggtacaaacaatcatgaaagaagttgccggtgatgataaatcgtaccaaatatttgaagtaaatgcaaacatgaacaggagtaggaaagatctatttgaaactctactagatttcacaactacacattatgtcaaggactcttcgaaaaggaaatccgattatgggctcgtactattcaatgacgttgatgtattatttaaggaacatgacaaaggattttggtcaatgatcaacaaactctgcgaattctcaaggagacctctggtattggtctgtactgatttgtcatttgtccctaatgagtttattaccttggcaagcgagcaagactctttatttcatactaagaaaattagttcatctacgattcatgcatttttagcaaaatatatgaaatcgttacaaatagaagtttgcgacaattggcttcaagatatgataagacaaaataacgcggacattagaaaatgcttaatgtgtttacagttttggtgcgttgataccgagagtgatttgatactatacaagaacgaaccgccggcttcaacatcaatgtgcggtttgagtattgaagaaatgttaaaaataacagaaatattatccctaaacgatgtcgttggccaagcaacgcaaaatcactcactgataagacaggaagtagattccactataatgacaccagaaaacatttgtgctttccaagatccaaacatggatgatgaagcgaaactaaaagctgattacatgatagattataaactgcatttaaacgacctcaataagcagaaattattaccattcgaattgaatgtttaccaatatatccaagaactactggaagcccactttcattacaatcaggagttgtcaccaaagcttgacgacgagttgcttattaataagttcaaaaaaatgactggatctacaataaattttctagcctctagggtaccgaaatatgaccaattacagtcaacaagaagaacaagaaactctaaaaaaatttctgacatcctagaccaattcaggggaatttataacgtcgatactctagacgaagatgtcgagtttcatatgttaagcagcactacccaaaaaatgagagcagaaatcaatccctacgttttcgaaatcgccaaaagtgatgccaacgccaagaatgaaaacaaacaaatatttaagtgtcatagcggcaacgtatcagaaagacgacacaaggacttgatctaccagctatcacaagatggaatcttgagaaatatttggtttaaagctgatccaaacatagtggtaagtaattggaaccattttcgttcagcaatttcgaaacacaaataa

SEQ ID NO: 2412 - DNA, 825 bp, Saccharomyces pastorianus
atggttgcacctactgctttaaagaaggataccatagtgagtgttaacggggaagacagcagcaaaagcagaattataggaataaataatactgaaagcattgaagaagacgatgacgatgacgttctattggaggatgtcagcgataacacaacaaaagatgagggaaatggcgaagatgaaagtgagaaagtgagggaatccaaaaccgtagtggttgatgaccaggggaagcctcgtttcacttcagctaccaaaacacaaggtaacaagataaaatttgaatcgagaaaaattatggtcccaccacacagactgactccattaagaaataactggaccaagatttatcctccattggtagaacacttgaagctgcaagtcagaatgaacttgaaaaccaaatcggtggaactgagaacaaacccaaaatttaccacagaccccggtgccttgcaaaaaggtgccgatttcatcaaggcctttgctttagggtttgatctcgatgattccattgcgctactaagactggatgacttatatatcgagacttttgaagtcaaagatgtcaagacactaacaggagaccatctgtcgagggccattggtcgtattgctggtaaagacggtaagacgaagttcgctattgagaatgccacaagaacaagaattgtcttggccgactccaaaatccacatcttgggcgggttcacccatataagaatggcaagagaatttgtagtcagtttaattttaggttccccaccaggcaaagtttacgggaacttgcgtaccgttgcatctagattaaaagaacgttactga

SEQ ID NO: 2413 - DNA, 3675 bp, Saccharomyces pastorianus
atgtctgacgttgaaaactcagaaaagtattatgaagaggatccatatggatttgaggacggaagtgccccaattactgccgaagattcgtgggctgtcatatctgcgttttttcgggagaaaggtttagtctcacagcaacttgactccttcaaccaatttgttgactatactttacaagacattatttgcgaggactccactttgattttagaacagctggcacaacacaccaccgaatcggataatataagtagaaagtatgagattagctttgggaaaatatatgttacgaaacctatggtaaatgaatctgatggtgtaactcacgcattgtatccacaagaagcacgtttacgtaatctgacgtattcatctggtttgttcgttgatgttaagaagagaacatatgaagctgttgatgttccaggtagagaattgaaatacgagttaatcgccgaagagtctgaagatgatagcgagagcgggaaagtcttcattggtcgtctacctatcatgttaagatccaagaattgttacctaagtgaagctaccgaatcagatttatacaagttgaaagaatgtcccttcgatatgggtggttattttatcattaatggttctgaaaaagttttaattgcacaagagcgttccgcaggtaatattgtacaagtgttcaaaaaggctgcaccatctccaatttctcatgtggcagaaatcagatcagctcttgaaaagggatccagattcatcagcacccttcaagtcaaactttacggtcgtgagggtagttcggcccgtaccattaaagctactttaccatatattaaacaagatattcctattgtaattatattcagagctttagggattattccagatggtgaaattttagaacatatttgttacgacgtaaacgattggcaaatgctagaaatgcttaaaccgtgtgtggaagatgggtttgttattcaagatcgtgaaactgcattagattttattggtcgtcgtggtactgcccttggtattaagaaggaaaagagaattcaatatgcaaaggatattttacaaaaggaattcctacctcacattactcagttagaaggttttgaaagtagaaaggcatttttcttaggttatatgatcaacagattattattatgtgctttagatcgtaaagatcaagatgatcgtgaccacttcgggaaaaagagattagatttggcaggtccattgttggcccaacttttcaaaagtttattcagaaaattgactaaagatattttccgttacatgcaaagaactgtggaggaagcccatgacttcaatatgaaattagccattaatgcaaaaactataacatctggtttgaagtatgccttggccaccggtaactggggtgaacaaaagaaggccatgtcttcaagagccggtgtttctcaagttctgaaccgttatacttattcatccactttatcacatttaagaagaactaacactcctatcggccgtgatggtaaattagccaaaccacgtcaactgcataatacccattgggggttggtctgtcctgcagaaaccccagaaggtcaagcgtgtggtttagtaaaaaatttatcactaatgtcctgtatttccgttggtacagatccaatgccaattatcacttttttaagtgaatggggtatggaaccattagaagactacgtgccacatcaatcgcctgatgctacaagagttttcgttaatggtgtgtggcatggtgttcacagaaacccagctagattaatggagacattaagaactttaagaaggaagggtgatattaacccagaagtctctatgatcagagatatccgtgaaaaggaattgaagatcttcacagatgccggtagagtttatagaccattatttattgttgaggatgatgaaacactcggtcataaggaactaaaggtgagaaagggtcacgttgctaaattaatgactacagaatatcaagatattgaaggtggttttgaagatgtagaggaattcacatggtcatcattattaaacgaaggtttagtagagtatattgatgctgaggaagaagaatccattttaattgctatgcaacctgaagatctcgagccaacagaaggtaacgaagaaaacggtctcggtgttgaccacgctaaacgtattagagtatcccaccatgccaccactttcacacattgtgaaatccatccatctatgattcttggtgttgctgcatcgatcattccattccctgaccataatcaatctccacgtaatacttaccaatctgcgatgggtaagcaagccatgggtgtatttttaactaattacaatgttcgtatggataccatggccaatattttatactatccgcaaaaaccattaggtactacacgtgctatggaatacctgaagttcagagagttacctgctggtcaaaatgcgatcgtcgccattgcatgttactcaggttataaccaagaagattctatgattatgaaccagtcttcaattgatcgcgggttattcagatccttatttttcagatcctatatggatcaagaaaagaaatatggtatgtctataacagaaacttttgaaaaaccacaacgcacaaacacactaagaatgaaacatggtacctacgacaaattagacgacgatggtttaatcgcgcctggtgttagagtttcaggtgaagatgttattattggtaagaccacaccaatttcacctgacgaggaagagctaggtcaaaggacagcataccattccaagcgtgacgcttctacaccattaagaagtactgaaaacggtatcgttgatcaagttttagtaacaacaaaccaagatgggttaaagtttgttaaagttcgtgttagaaccaccaaggttcctcaaatcggtgacaaattcgcttctcgtcatggtcaaaagggtactattggtatcacatatcgtagagaagatatgccatttacagcagaaggtatcgttccagatttaattatcaatcctcatgctattccatctcgtatgactgtggcgcatttaatcgaatgtttattgagtaaggtggctgcattatctggtaatgaaggtgacgcttctccattcacagacatcacagtagaaggtatatctaaattattacgtgaacatggttaccaatctcgtgggtttgaagttatgtacaatggtcacacaggtaaaaaactgatggctcaaattttctttggtcctacatattaccaacgtttaagacatatggtggatgacaagatccacgccagagcccgtggtccaatgcaagttttaacaagacagccggtggaaggtagatcgagagacggtggtttaagattcggtgaaatggaacgtgattgtatgatcgctcacggtgctgcttcatttttaaaggaaagactaatggaagcatccgacgccttcagagttcatatctgtggtatctgcgggttgatgacagttattgccaaattaaatcataatcaatttgaatgtaaaggatgtgataataagattgacatctaccaaatccatattccatatgctgcgaagttattatttcaagaactaatggctatgaacattacgccacggttatataccgatcgttcaagagatttttaa

SEQ ID NO: 2414 - DNA, 774 bp, Saccharomyces pastorianus
atgttcaatttaattttatggccattatttttgctcacctctgttgccgttcctttgcaactgacactggaagtaatttatctgacctcttccgtaaacttctcagaggcgagtgctgccaagaccgctacttctttggggcaatctccagtggtcatcactgtctataaatcactgttgaaatattggagtctttatgaattcttacattttatttacctctatactccgatcgatgcctttttgaatttcttaccattttcctccttacttatgtcgtttgggagtatttgcctgacaagagagttgatgtacgatttcattagcttcatggaatctcaaggcaagctcaccgggttccttaataaaataacagaacctaacttcaacagttaccggctattttcctcggtttacaatatctggtttgcagaagacgccaacgacaaatttctattcggtaaactgacccagattctaatttccttaaccaagagatacgaatttccaagaacctactacctgtcaaaggcttccgatttccttcaaaacctaatattgacgaggctgaggccctttgttacagaacaaacacaagatgacacatttaagcatcaaaacggtaaccgtgattcttcagatagtggtacccagtacaataagacttcacaacaatcatcctcttcttatgagaataatttcactagtaccgaatttcccaatgattacgattttatggatgacatcctcgaagaaacaacagagctagattag

SEQ ID NO: 2415 - DNA, 4536 bp, Saccharomyces pastorianus
atgtccgagacaaagctcactagtaacgtcaatggcgtcagcagctactcctccgcatcttcctctactgaaaacgatgcggatctgcatgagtacaatggatttgatgagcagacagaagctcgcatccagaaactggcaagaactttgactgctcagagtgcgcagcactcgactcaatcggcgtccaacaaacaagacgttcaatctatcttctccagtggcgtggaaggtgtcaacccggtctttatcgaccctcaagccccaggctataatgaaaaattggatccaaattctgaaaacttctccagtgctgcttgggttaaaaacatggcccatttaagtgcggctgacccagagttttataaaccgtattccttgggttgtgcctggaagaacttaagtgcctccggtgattccgctgatgtcgcataccagcccaccgtgctcaatactccattcaaacttattcgaaactccatgagaatgttacaaaaatcaaacgatggtaacaccttccaaatcttgaaacccatggacggttgtctaagcccaggtgaactattggtcgtcttgggtagaccaggttctggttgtaccactctattgaaatccatttcttcaaatacccacggtttcgatgttggcgaagacacagaaatcacttacagtgggtattctagcgaagatatcaaaaaacattatcgtggtgaagttgtttacaatgcagaagctgatatccatttacctcacttaacagttttccaaactttactcacagtcgctagactaaagacacctcaaaatcgtataaagggtgtagatagagaaagttatgctcagcacttggctgaagttgctatggctacctatggtttatctcataccagaaataccaaggtcggtagtgatttagttagaggtgtgtccggtggtgaaagaaaacgtgtttctatcgcagaagtctccatttgtgggtctaagttccagtgttgggataatgctacaagaggtttggattccgccaccgctttggaattcatccgtgctttgaaaattcaagccaacacttcgaacacatctgctactgtggctatttaccaatgttctcaagatgcatatgatctatttaataaagtgtgtgtcttagatgacggttatcagatttattatggcccaggtgataaggccaagaaatatttcgaagatatgggatacgtgtgtccaagcagacagacaaccgccgatttcttgacctccgtgaccagtgtctcagaaagaacactgaacgaagacatgttaaaaaaaggcattaccattccacaaacaccaaaggacatgaatgcttactggatgaagtcccaaaattacaaagaattaatggaagaaatcgatcaaaaaatcaatggtaatgatgaggccgcccgtgaagccatcaaagaagctcacattgctaaacaatcaaagagagcaagaccctcttctccttacactgtcaattatatgatgcaagttaaacacctactcgcgagaaatatgtggagaatacgaaataatattgggtttacattattcatgatcttaggtaatgccagtatggctttgattttgggttccatgttttacaaaatcatgaaaaagggtgacacctctactttcttcttccgtggttctgctatgtttttcgccattttgtttaatgcgttctcttctttactggaaattttctcgttatatgaagctaggccaattactgagaagcatagaacttactcattatatcatccaagtgcagatgcctttgcatcagtgctttccgaagttcctacaaaggtcactattgccatatgtttcaacatcatcttctacttcttagtcgacttcaaaagagacggtggcattttctttttctacctactgatcaatatcgttgctgttttctctatgtctcatttgtttagatgcgttggttcactagcaaaaacattatcggaggctatggttcccgcttctatgttactgttggctctttctatgtacaccgggtttgctattccaaagaagaagattttaggatggtctaaatggatttggtatatcaacccgctggcttacttattcgaatctctgttaatcaatgaatttcacgatagaaaatttccatgtgctcaatatattcctcgtggtactgcttacacaaatgcaacgggcacagaaaccatctgcagcgtcgtcggtgctattcctggccaagattatgtgttgggagatgatttcattagagaaagttatcaatattaccataaccacaaatggcgtggattcggtattggtatggcgtatgtcgttttctttttcttcgtttatctattcctatgtgaatataatgaaggtgctaaacaaaaaggtgaaattttggtttttccacgtagtattgtgaaaaagatgcagaagcaaggctctttgaaagagaagaatgctaatgatcctgaaaatgttggtgaacgtagcgatttttccagtgataaaaaaatgctacaagaaagttctgaggaagaatccgaaacttatgcggatgttggtttatctaagtctgaagctattttccactggagaaatctgtgttacgaagtccagattaaaactgaaacaagacgtattttgaacaacgttgatggctgggttaaaccaggtactttaactgctttaatgggtgcttccggagctggtaaaactacgcttttggattgtttagctgaaagagttaccatgggtgtcatcactggtgatatctttgtcaatggtattcctcgtgatcaatctttcccaagatctattggttactgtcaacaacaagatttacacttaaaaacttctactgtgagagaatctttaaggttctctgcatatctacgtcaaccagctgaggtctccattgaagagaaaaatgcctatgttgaagaagttatcaaaattttggaaatggagaaatatgccgatgctgttgtcggtattgccggtgaaggtttaaatgtcgagcaaagaaaaagattgaccattggtgttgaattaactgccaagccaaaactattagtctttttggatgaacccacgtctggtttagattctcaaactgcttggtccatttgccaattgatgaaaaaactagcagaccatggtcaagcaattctttgtaccattcatcaaccttccgctattttgatgcaagagtttgaccgtttgctatttatgcaacgtggtggtaagacagtttactttggggacttaggtgatggttgcaagactatgattaattatttcgaaagccatggttctcataagtgtcctcctgatgccaacccagctgagtggatgttagaagttgtgggtgctgctcctggttctcatgctgaccaagattatcatgaagtttggagaaattctgatgaatacagagctgttcaatctgaattagattggatggaaaaggaattaccaaagaagggccctattaccgccgaatctgaccaacatgagtttgctcaatcactcagttatcaaacaaaattggtcagtgttcgtttattccaacaatattggagaaccccagaatatttgtggtccaaattcattttgactattttcaatcaattgtttatcggtttcacatttttcaaggctgggacctcattacagggtttacagaatcaaatgttagcagttttcatgttcacggttatcttcaatcctattttgcaacagtacttaccatcctttgttcaacaaagagatttatatgaagctagagaacgtccttcaagaactttttcttggctaccatttatccttgctcagatctttgtggaggttccatggaacattctagcaggtacaatcgcttatttcatctattactacccaatcggcttttacgcaaatgcatcagctgctcatcaattgcacgaaagaggtgctttgttttggctattctccattgctttctatgtttacgtgggttcaatgggtttgctcgttatatctttcaacaaagttgctgaaagtgctgctaacctcggttctctgttgtttactatggccttgtctttctgtggtgttatggtgaccccagaaggtctacctaggttttggattttcatgtacagagtctcaccattgacttacttcattcaagcccttttgtctgttggtgtcgcaaatgtggacgtcaagtgtgacgattacgaactattaagatttacacccccatccgatatgacttgtggagaatacatgaagccgtatctactgcaggccggcactggttatttgactgatgaaagcgctactgacacttgtaagttttgcccggtttctacaacgaacgcttacttagccagcgtcaattcatattacagtgaaaggtggagaaattacggtattttcatttgctacattgcctttaattacatcgcaggtgtctttttgtattggctagcaagagtacccaagaagaacaagaaaatctccaagaaatag

SEQ ID NO: 2416 - DNA, 1764 bp, Saccharomyces pastorianus
atgactaatcgtctcctcatatacggacttattctttggacaagtataattggatcttttgcattagatagaaacagagctgcgcaatatgcgagggaaaatctacataacgccaccctgaccaccaatagtacctccacgaatgtacaaaaagaactatcttcgttactatcaagtggttcctcaaccagccgagattttagacagcctactaaagttgatatacggcaggctgaaatacgagaaaacagtataaagacagagaaaggagcattggtacaatacgcaagcgcggtaagctcgagcgattcgagcaattcgtttttatcattcgatgaatggaaaaaggtcaagtcgaacgagcactcatcgaacccggaaaggcattctgctcgaataagagagccaatcgatccatcatgttataaggataaggaatgtataggagaggaattagaaattgatttgggatttttaactagcacggatgaaccgaatgaaagtgaaggacatccaaaaaattttcaagaggaagaagaaagtataggcaaagtatacaaaaaaagattcaactatgcgtctttagactgcgctgccaccattgtcaaaagcaactctgaagctgttggagccacatccatcctagttgaaagcaaagataagtatttgctgaacccttgttcggcgccgcaacaatttgttgtcatagaactctgtgaagatatcttagtcgaagaagtgagtattgctaactatgagtttttttcgtcaacattcaagaaattaagattttcggtttctgatagactcccggtagtgaagaacgactggaccatactgggagagtttgaagcagaaaattctagagatttacagagatttaaaatacataatcctcaaatttgggcaagttatttgaaagttgaaattttatcccattatgatgatgaattttactgtcctatatctttaattagagcacatggtaaaacgatgatggatgaattcaaactcgaccaacttaaaacccaagaagataaggagcaatccataattacaacggagatagataactcggaggatgacgttgttcaagacaaatgcaataacatagaaacacatttggaagccttcaacacaagtgcgatgacagatatagctggtttattatcgtgcacttccaagcttgcccctttgaaattcgatgagtttttcaaagaggttaacgcctccttttgtcctccaaagcaaatggtatcgtcctcatcttctgtagttcctgtgatcccagaagagtccatttttaagaacataatgaaaagattgtcgcaattggagacaaattccagtttgacagtgtcctatattgaagaacagagcaaattgctatctcggtcatttgaacaacttgaaatggctcatgaagcaaaattcggtcatcttgtcacagtcttcaacgaaaccatgacgcgcaacttagatctactaaacaactttgctaaccagttgaaagatcagtcactacggatattagaggagcaaaaactggaaaatgacaagttcactaatcgccatgtgttgcatctggaaaaattggagaaggaagtaagttttcaaagaagaattgtgtacgcttcattctttgctttcgttgggctaatatcctatttattaataacaagggagctctattttgaagatttcgaagggaacaaaaacgaaagtattggaaaatcggacattattcagcaagcaattaggtaa

SEQ ID NO: 2417 - DNA, 1353 bp, Saccharomyces pastorianus
atgtcttcaagatatagggtggaataccacctaaaaagccaccgcaaagatgaatttatagattgggtaaaaggcctactggcctcaccctttgttctgcatgcagtttctcatgaaggtgactacaatgatgacttggcaacaactcagcgtgtaaggtcacagtacgctgacattttcaaagatattgagggattaatcaaggacaagattgaatttgattctagaaacattatacaagacgaaattgaagatggtgcctcttctcaatctttgaacgtattggggcaatcacgcttaaaccttttggtcccatctattgggacatttttcaccgagcttccgttagagcaagcctttttatgggatgattcgcaaagagccatatctgcacgcagaatggtggcaccgagcttcaacgatgtcagacatattttaaatactgctcaaatttttcattttaagaaacagaaaattttacgcaatggcaaagttttgaggttggtaacttttgatggtgatgtcactctttatgaagacggtggctcccttgtttacactaatccggtaataccttatattcttaagctgctacgatacggtatcaacgtaggcatagtcacagcagctggatatgatgaagccggaacttacgaaaacagattgaagggactgattgtagctttgcatgactcaaccgatatatcggtttctcaaaagcagaatttgactattatgggtggtgagtcgagttatcttttccgttattatgaagatcccgaagaagacaaatttggatttaggcagattgacaaagaggaatggttacttcctaggatgaaaggttggtctcttgatgatgtggaaaagacattggactttgctgagagaactttgaacagactcagaaaaaggctaaatttaccttcagaaatctctatcattcgtaaagtaagagccgtaggcatcgttccaggtgaaaggtatgatgaggcctctaaaaggcaggtcccagttaaacttgatagagaacagttggaagagatagtgttgactcttcaaaatactttagagtcctttgcgccttctagaaggattcaatttagttgttttgatggcggtagtgatgtttggtgcgatattggaggtaaagatcttggcgttcgctcattgcaacaattttacaatccggaagccccaattaaaccctctgagaccttgcatgttggtgaccagtttgccccagtcggatcagcaaatgattttaaggcaagattagccggatgtacactttggatagcttcccctcaagaaactgtaaactatcttcatagattgctagaaactgattag

SEQ ID NO: 2418 - DNA, 2172 bp, Saccharomyces pastorianus
atgacaagtgtcatgaccgacaacaatagcgatattaatgccagccagatcttcacaactcctttgtctagtacggggggcggtctcattaacgaaatcaaagatgcaataactgagatggaacaactaaaagttttagagttaaagcaaatatgtaaatctttggatttagcaataacaggtaaaaaatccatcctacaagaccgaataaaacagtttctgagaaaatcctgtgatattggccatatagatccttggaggcccaagacaataaagatcctcattgccaaagtaaggataaactcatcgttacctaaatactctattctttgggaaactttgaaaacaggtgcatttaagcatcctgtagcatcgggagaactacccgtaactgctctccagaatactgtaacaccaacttcttcccaacaacaagtcttaccgtattccttcacgtcaccgttttacaaccccatagcacaagttccggatgctagtaaaaagataaagcaatttataggaagaagttgtgcaaagatgaagtttaaaataggcaagtcaaatcacgatcttttgaaatccaataaaaatcacaaactttacttgttttgtgggttctcgataccatttatatatgacaccgtaggtcacgaagctgtagatttcccatacccttgtgaattagtcttcaatggtaccaagctagaggacaatgtgaaaggtttgaagaagcagaatgggaccggaagccctgccaacttaacgccttatgtcaaatcttcatctgagcttaatcagttggacttacattatctcagtgccgaaaaagattactctataagttgctttatagtggaggcttttccacctgaaactcttttgggaaaaatcctagagaagcccaagattatcaaacaagctactattgcatacatcaaaagaactttgaatgaacaagatgacgaagatatcataactacttccacagtgctgaccttgcaatgtcccatatcatgtacgagaatgaaatatcctgcaaagacggaaaaatgtaagcacatccaatgttttgatgctctttggtttcttcattctcaatcccaagtacccacatggcaatgtcccatttgtcaacagcctgtgaaatttgatcaattgaaaatttccgaatttgtcaacgacattattcaaaattgtaaagaggatgtggaacaagttgagatatctgttgatgggtcgtggaaaccagtgcatgacagttccgcgattacggcggacgatgctaatcaagatttccaagggaagagtgagcaattagatgctgtcaaacaagaacaggataatgacaacaggaatgtgttcgacattaacatggatgatggcgtgaaccataatgagcctgaaatcatatccttagatagctcagacgatgaaccctttgttcccgctaatggaacctacccaacacatgcaggctctagaaattatcaattaagggcagacgtatttccatctgaatcagaaggctcaagtgagtacaaccctaaccatacttcaacgccgaaaggttcccctactgtagatcaaaatgaatgtcaagatcctttccaaatgagatcgattctcaatcaaggtataaacccaagcgtgaatgatacgcccacgaataacagtagtatcaattcctttgttacagctacgaacggtgatagtaggatattctataacagagggccatcgacgccgctacttccgaacgttttacaaaatttaaccaatcaaacagaagctcaaaggaatctccataaccccaattataatactgtagagagtgatgtcaatttgttgggtatatccggcggttttccccctatccccacgatggaaccaaattctgaagcagaaactggagtagcgccaagagccacatcagccactcagccgccaccattcatacctgtgagcactaccggccatggtgatgatggcaagagcagaaaaagaaggtattctaatgtctctatttacattccaaagaacccgtatgccaccctaatgaagcggagaccgcaagcaaatcgcaccgtaatcaataaaccaccagcccaacctaatgactctaacgcaacaacccaagataactcagaagtgatcgatctaacctctgattga

SEQ ID NO: 2419 - DNA, 786 bp, Saccharomyces pastorianus
atggcaggtttatcatttgacaattaccaaagaaacagcttcctagcagggaactcgcacacacagcccaaggccacttccacaggtaccactattgtgggggtgaagtataaaaacggtgttgtgatcgctgcagacacaagatccactcaaggccccatcgtggcagacaagaactgtgcgaaattacacagaatctcccccaagatatggtgtgctggtgccggtactgccgccgatactgaggctgtgacacagttgatcgggtccaacattgaactgcattctttatacacttcgagagagccacgggtggtgtccgctttgcagatgcttaagcagcatctgttcaagtaccagggccacattggtgcctatttgattgtcgctggtgtagaccccacgggagctcacttgttttcaattcacgcacacggatccactgatgtgggctactacttgtccctgggttctggttctctcgcggctatggccgtgttggaatctcactggaagcaagacctttcaaaagatgaagccatcaaattggcctccgatgcgatccaggctggtatctggaacgatttagggtccggttccaacgtagacgtctgtgttatggaaataggtaaagatgcggagtacctgagaaactacttgactccaaatgttagagaatcgaagcaaaggagctataaattccctagaggcaccactgctgtgcttaaggaaagtatcattaacgtttgtgatgtacaagaagaacaaatcgatataaccgcataa

SEQ ID NO: 2420 - DNA, 285 bp, Saccharomyces pastorianus
atgtcaaataacaatagaagcaaggcgatggtgccaccaatcaactgtatattcaactatttacaacaacagacattagtaacgatatggttatttgagcaagttggcataagaatcagaggcaaaatagcagggtttgatgaatttatgaatgtagtcatcgatgacgctatagagatacctgttaatagtgcaaacggtaaagaagatgtagaaaagggcacgccgctcgggaaaatactgttaaaaggtgataatataacattaataacatcagtagattaa

SEQ ID NO: 2421 - DNA, 1611 bp, Saccharomyces pastorianus
atgttatccaacgaaaaatatcaaaggcctgtacagccacctccagtgtacgagccgaagcgctcatcgctcggctcgtccgagaactcggtcacggctgacggaccaacgccgtaccacttcagacaggaccagtactacaacctgaactccaagtctagtggcgcacccattgggagctatgaggaagcctttcccacggctaacaacaacaagcctaagtggaatgactggcccttcaccattttgttcctaatcacggtaggcgggttcatcgccattgcaggtatcactttaagagcatggaccaaggaatacagtagcacagggtccgggatctacgatggtgtggcaactggcactctgaatacgaacgcagttatcttgctgattttctcgtgcgtcattgcgatgatcttttcccttttttatatcatcctttgccggatgcacccgaagtacttcatatattgcggtatgatctcgaacatcgtgacttctttgggtaccgccatcttgtacatggctttgaagtactggtctgcgggggtcgtgtttctggtcttcacctttttgaccgcctggagttactggggcatgagatccaggattcccctctctgtggcagttttgaaggttgtcggtgatgcagccaagaaatgtcctcaaatgtatattgtttcgcttatcggatccattgttgccagtgcatttgggcttttattctcagcggtcgtcgtgtccacgtatatgaaatatgatccagccgattcaaacggtggttgtgacgtctctggtggcagctgttctcattcgaaactggtcggtgtcttggttgtggtgttttactgtgggtattacatctctgaagttataaggactgtcatccattgtgtcatttccggtatctttggtagctggtactatatgtccaagtccgatcaaggcatgccaaggaggcccgcattaggatcgttcaaaagagccatgactcgctcgtttggttccatttgcttcgggtctttactggccgccttaatggatcttttgagggcaatattaaaaatgcttagaaagaacgtcacctccaaaagtagtagcaggtttgttctccagattgtgttctcggtgctggactggattattgggtgtgtagaatgggtggccgagtactttaaccgttatgcctactcatttgtctcactttatggtaagtcttatttgagatccgctaaggaaacttggcatatggtaagagaaaagggtatggatgcattgattaacgataatttgattggtgctgcactggccttattttccatgttcaccagttacaccacctgtttgtttgctttcctatacatgagatttacgaaacctgaatacaactcgaataatggtattaagggtgccttgatggctttctcgtttatgatagctcttcaggtttctaatatcacaacagaggcaatcagatcttgtacatcaactttctttgttgcactcagtaacgatccagaggtcttccaacagtcctatcctgatagattcgatgaaatatttagagcctatccagatgtccttaagaaattgaaccatcaggacatctaa

SEQ ID NO: 2422 - DNA, 939 bp, Saccharomyces pastorianus
atggcctcagcagaaaccgatgctgtacaagcaaaattggctaagaccctacaaagattcgaaagtaaaatcaaagccggagattattacgaagcacatcagacattgagaactattgctaatagatatgttagaagtaaatcatacgagcatgccattgaactgattagtcagggtgctctctcatttttaaaggcaaagcaaggcggttcgggcacagacttgatcttctatcttcttgaagtctataatttagcggacattaaagtggatgacgtctcagttgccagattggtcaggttaatagccgagttagatcctagcgaacctaatttgagagatgtcattaccggtatgaataactggtctatcaagtttagtgagtataagtttggagacccatacttacataatgttattggaatcaagctattagaaggtggcttcgtttatgaggctgaaagatactttatgttgggcacacacgattcaatggttaaatatgttgatttgttatggaattggttatgccaagtggacgaaattgaagacagcacagtggcagaatacttcagcagattgattttcaattatctattcatctgtaacatatcatttgcacacgaatcaaaggatattttcttggcaagatttattgagaaatttcaacccaagtacgaggaaattgaaaagaacggttataaaatatttttcttcgaagattattctgatttaaatttcttgcagttattgctaattacatgtcagaccaaggataaaaactacttccaaaatttgaagaatcactatttggatttctctcaagtttacaaaagcgaattggaattcttgggccaagagtatttcaatattgttgctcccaagcagtccaacttcttacaagatatgatgtcaggtttcctaggaggatcaaaatga

SEQ ID NO: 2423 - DNA, 1368 bp, Saccharomyces pastorianus
atgactgatgaaaaacaatcctcttcacaagacagcgaccatatgatacgagaccctctgaatggctcactattttacaaaatatctgaatctataaagaatattgctgatacaagaccacagggcaaatacactgttcaagatatcgataatatcatagcgtttacatctgaaggtgcagatactgttcaaccaagtgtcattagcgcaagtacaggacacgacgaagacggcgatatgccaatgtttgacttgaatgacgaaaccgatgttgaaatgatttctaagtatgtttcgaatcaaagagggttgggcgcacattcaataacgccttccatgcaacagattgacgatagtataccctcattaaatccggcaactttgaaaacagtttttgttgtggacacaaacttcattatttcgcacctgaatactttggaaactctgaggtcgttttcaagtacttatcatcatttaatcgttgtgccaagcactgttattcaagaattggatgggttgaaaaaaaactccaatgtcattaaggatggtgacactgataaggaacaaggtagaacaataggcgtattggccagatggggtaatgaatggatctataaaaatctagccaatttagattctggtttaatgggtcaaaaactgaagcagagattgaacccaaactgtcggaaagatgactcgatattggactgttgtttgtatttcaaagaagtactaaattgctttgtgattttgttgtctaatgataaaaacctttgtacgaaggcgttgactgaaggtttattaactgtatcttttaggaaaggcatggatgcgaatctaattgcttcaaaagcatatgaagagaatcagttgagattcggtagttcacctattcctatcgctgttacacaccacgatataatattacattctcatacgcctaatccagaaactacctctttgccattagatgagcttttacaaaatatttttgagcaagtaaaggacacaattttcttcgccattgaccacgctttgagaaaagagtatggtgaagatattgaatttattgattacaacccagataaactaaccacaatagcaatcgcttcacattacattcatacgttttgggtatctgtcttttcagattttttcaagcactcaaaaatcaagaagaacgactggaaaaatttacccaatatcttagtatcgaaaccaacgaacctgaatgacttgagaacgttcgaacaattttgggaaaatgtgttaaattttctattcaccaaattcacgaatgagcacaaacagctactagaggaacaaattcaccgatggcaagcgtctattaatgccacatctacttga

SEQ ID NO: 2424 - DNA, 204 bp, Saccharomyces pastorianus
atggataacaaaaccccagtcactttagccaaggtcatcaaagtcttaggaagaaccggttctcgtggtggtgtcacccaagtccgtgtcgaatttttggaagacactaccagaactattgtcagaaacgtcaagggcccagttagagaaaacgatattttggttctaatggaatctgaacgtgaagctcgtcgtttgcgttaa

SEQ ID NO: 2425 - DNA, 2430 bp, Saccharomyces pastorianus
atgtcgtctgtggaagaattgactcatctcttttcccaagttgggtttgaagataataaagttaaggagatcgtcaagaataaaaaggtttccgactctctttccaaattgattaaggagacaccttccgattaccaatggaacaaatctactagagcactagtgcacaatttagcttcccttataaaaggtgctgaccttcctaagtctgacttgattattagtggtattatcaatggtaacttaaagacgtctttgcaagtcgatggggcattcaaatatgtgaaagctaatggcgatgcatctaccgtggacggtatgaatgaaaactctggtgtgggcattgaagtcaccgaggatcaagtcaggaactatgttatgcaatacattcaagaaaataaagaaagcattatgaaggaacgttacaagctagtacctggcattttcgctaatgttaaaaacttaaaggaattaaaatgggctgacccacgtagctttaagccaattattgaccaagaaattctaaaacttttaggcccaaaggacggaagggacttagtcaagaaaaaggtcaagaataacgaaaaaaagaaaactacttctgccaagaaaacttcagatgattccgccacaaccggcccaaagagaaccatgtttaatgaaggtttcttgggtgatttgcataaggtcggcgaaaacccacaagcttacccagagttaatgaaaaaacatctggaggttacaggtggtaaagtccgcactagattcccaccggaacccaatggttatttgcatattggtcattctaaagctatcatggtcaacttcggctacgccaaataccacggtggcacttgctatttaagatttgatgataccaacccagaaaaggaagctcctgaatattttgaatctatcaagagaatggtctcttggctaggtttcgaaccatggaaaattacttattccagtgattactttgacgaactatatggattggctgaagttctgatcaataatgacaaaggttatatctgccattgtactgcggaggatattaaaagaggacgtggtattaaagaagatggtaccccaggtggtgaaagatttgcttgtaaacatcgtgatcaatcgatagagctaaactttcaagagttcagaaacatgagggatggcaaatataaacctggtgaagctattttaagaatgaaacaagacctaggttcaccaagtccacaaatgtgggatttgattgcttatagagtcttgaatgctccacatccaagaactggtactaaatggaagatataccctacttatgactttacccattgtttagtagattctatggaaaatatcactcattctttgtgcaccactgaattttacctatccagggaaagttacgaatggttatgtgaccaagttcatgtctttagacctgctcaaagagaatatggtcgtttgaacattactggtacagttttatccaagagaaagattgctcagctagtagatgaaaaattcgttagaggctgggatgatccaaggttattcacccttgaagctattcgcagacgtggtgtcccacctggtgccattttatcatttattaacactttgggtgttacaacaagtactacaaacattcaagttgtcagatttgaaagcgccattagaaagtacctagaggatactacaccaagattaatgtttgtcttggatcctgttgaagttgttgtagacaatttaactgacggctttgaagaattggcaactattccattcagacctggtactccagaattcggcgagagaactgtaccatttacaaacaaattctatatcgaaagatcagacttctcagaaaatgtcgatgataaagaatttttcagattaactccaaaccaatcagttggtttgatcaaagtttctcacacagtttccttcaaaagcttggaaaaagatgaaactggtaaaatcataagagtccacgttaactatgataataaggttgaagaaggtacgaagccaaagaaaccaaagacttatattcaatgggttccagtctcttctaagtacaactctccgttaagagttgttgaaactagagttcacaaccaattgttcaaatctgaaaatccatcgtctcatcctcaaggtttcttaaaggatattaatccagaaagtgaaatcgtttataaagaatctgttatggaacacaactttggccacgttgtcaaaaacagtccatgggtcgttgattctgtcaaaaattcggaattttacgtcggggaagataaggaagctaaggaagtttgtagattccaagctatgagagtaggatattttactttggataaagatagtacagctgataaggtcgttttgaatagaattgttagtttaaaggatgccgcttccaaataa

SEQ ID NO: 2426 - DNA, 1887 bp, Saccharomyces pastorianus
atggcagcgcaaaagaaactgagagctattttgaccgatgaaggtgtgctgatcaaatcacaatctcaccatatgttcagtaagcatggtcaacttagaagcggcgattcgttatctttgttgagctgtctgtcctgtctggatgatgggaccctgagctctgacggaggttcttttgacgaggacgattccctagaactgctacctcttaatactaccatcccattcaacaggattttaaatgcaaaatatttaaacgctgatcaaacaagggctaataacggaaaaattctttccgatctttctcaaatcgagaatacgggctcctcatcagaaaatgatgaagtagagaaccgtagtttgagtaatgataaaggtcaacagttccaatcatctctaaatgaactaaactcatcctcgaataaggataagtggaactcgaagacgagcaacatcgtaccatctaccgatgtttcacgggatgcctctccaatgtttggaatgagagacaatcaacacttgatcgaattgacattcgctgtacccaagggtcatgacattgtaccacaaaaattaacgctattgatagaccacgtctctaaaaaatcaaaaacgaattccgggttaaattcaagctcatctggtgtcgtggaagaaatcctggaaaaaagttatgagaattccaagaggaacaggaaggtcttagtcatcatcaacccctatggtggtaaaggtaaagccaaaaaattatttttaaccaaggcaaggccaattctgctagaaagtggttgtaaaatagaaatcgcatataccaagtatgctcgccatgccattgatattgccaaagatttggatatcagcaaatacgatactattgcatgtgcatcgggtgatggtattccatatgaagtgataaatggactctacagaaggcctgatagagtagaagcattcaataagctagctgtgacgcagctgccatgtggttccggaaacgccatgagtatttcttgccactggacaaataacccatcctacgctgctctatgcctcgttaaatctatcgaaacaagaatagacctaatgtgttgttctcaaccttcttacatgaatgagtggccgaggttatcgtttttaagtcaaacttatggtgttattgctgaatccgatattaacactgaattcatcagatggatggggtccattagattcaatttgggtgtagcatttaatatctttcaaggtaaaaagtatccttgtgaagtattcgttaaatatgctgccaaatctaaaaaggaactaaaggttcattttttggagaacaaagataaaaataaaggatatttggccttcgaaccaaacactgatccagactcttcactcgattctttatctaaaaacgacagaaataatagaaatgatgagctctcaccgacttttcttaccgaagataattttaagctaaaatatccaatgactgaaccagtgcccgatgattgggagaaagtggattctgagctaaccgataatctaacaatattctacacgggtaaaatgccttatattgctgaagataccaaattttttcctgcagctttaccagcagatggtactatcgacttaatcatgacagatggaagaacttcagtcgcgaaaataacaccaattctattgtccttagataagggctctcacgtgttggaaccagaagtcgttcactctaaaattttggcttacaaaatcataccaaaaatcaagtctggtttgttttcagtcgatggcgaacggtttccgttggaacctttacaggtcgaaattatgcccatgttatgtaagacattgctcaaaaacggcagatatattgataccgaattcgaatctatgtag

SEQ ID NO: 2427 - DNA, 870 bp, Saccharomyces pastorianus
atgtccgttcaagatactaaagcggtcgagctttctatgggtcacattagatcatcatccgtatcgttggtagcagaggctacctcaaatatgaatagtgaacacaaaatttctaaagtccagatttatgaggatttgtgccgatacgaagatatattgggtaaattagtggaatcagtagatcgttttaagccaaacctagaaatcgctaaggatttgattagaaccgacgagagtctgtttaataatgtcaaactgctcgctgactatgataagattgatcttgatttgcgaaaaatagacaaagactccgaagaactggattctaaaactagaaagatattagaaattttgaatgaatgccatgatgaattgagtgcactaccgatgctagaacaagtggagttcgagaaaaagacaatcttacaacagagatccaaaatcaactctactgcactattggattacgctacaaagttatccaagtttactagaataccaccaacgttcgataaaggaacggtgggtcccaataattttatatggcctgcagaagacgcactacggagaggtatgcttgctatggcctcattacacagtaaagaattaactagaatgccaggcgaagaagagcaaggagctgaagaagtgccgaatgacactctctctcaaaatggacgccagaaggagaagaaagagagcagggaaaattcacccgaaaatttaccggtgaaggactcatttatattcaatggtgccgctaataaagacactgagcaagcaggtgatgacaaagacaaaactgaagaagataacaatgaagatgccctagaccttgatctagatttatttgatccagaagatttctaa

SEQ ID NO: 2428 - DNA, 1857 bp, Saccharomyces pastorianus
atgtacaatccggtggatgccgtcttaacaaaagtaactactcactacgggattgatggttttactctaagatatgccatttgtctattaggctctttccctctgaacgctattttaaagaggatccctgagaagcgtgttactttgaaatgttgctttatcatctctatgtcaatattttacttatttggtgtgcttaacctagtaagcggatttcggaccttgtttattagcaccatgttcacgtacttgatctctagattctaccgctccaagtttatgccacatttgaatttcatcttcgttatgggtcatttggcgctgaaccatattcacgcccaattccttaatgagcagactcaaacgactgttgatattacaagttcacaaatggtcttagccatgaaactaacttcctttgcctggtcatactatgatggctcgtgcaccagtgagagtgatttcaaagacttgactaaacaccagcagtctcgtgccgttaaaggccacccatctttattgaaattcttagcatacgcctttttctattcaacgttgttgactgggccaagttttgattatgctgactttgacagctggctgaattgtgagatgttccgtgacttacctgaaagtaaaaaaccaatgagaagatatcattctggaaaaagacaaattccaaaaaatggtaaattggcttcatggaaagtggttcaaggtctcctgtggatggctttaagcgcactagggatgaaatacttccctccttcatatgttttggatagaaagactttcgggcaaaggtcctttattttcaggtcacattacttattcttactaggttttattcacagatttaagtattatgctgcctggaccatttccgaagcatcttgtgtattatgtggattagggtataatggttatgatccaaagactcaaaagatcagatgggatcgtgttagaaatattgacatttggaccgtagaaacggcacaaagtacacgtgaaatgttggaggcatggaatatgaacactaacaagtggctgaagtactccgtttatttgcgtgttactaaaaagggtgagaagcccggtttccgttcaactttgttcactttcttaacttcagcattttggcacggtaccagacctggttactacctgacgtttgccacgggggcgttgtaccaaacatgtggtaaaatttacaggcgtaatttcaggccaatgttcttacgggaagatggtgttacgcctctaccctccaaaataatttatgatctcatcggcatatacgcgatcaagttagcatttggctatatggtacaaccattcatcatacttgatttgaaaccatccttaatggtttgggggtctgtttatttctatgtccatatcgtcgttgctttttcattctttttgttcaagggaccttatgctaaacaggtcactgcattttgtagatccaagcagcctaaagagatcttcatcagaaaacaaaaaaaattggaaaaggatatcagcgcaagttctcctaacttgggcgatatattaaaggcaaaaatggatcacgaaaagaataaaacacctgaagaagatgaaatgaatttaggtattccgcctatagaattgggcaaatgggacaatgctaaaaaagactgggacgatttctgtaatgattataaagattggagaaataaaaatggtcttgaaatagaggagaaaaatctatccagagctttcgaaagatttaaacaagagttttctaatgctacaggaagtccaggtgaaggcgtgaggaagatgagtttcagtggatactcaccgaagcccattccaaagaaagagcagtag

SEQ ID NO: 2429 - DNA, 1182 bp, Saccharomyces pastorianus
atgctatctagaacaattcgtgcccaaggtacagccctgaaaatgtcgcaactaactgttacaaggtcattgtcaagtacactcaacttgcagaatgtcaaaaccaggccccccacaggaattgttttgatgaatatgggaggcccatccaaagtggaagacacgtatgattttttgtatcagttatttgctgataatgacttgattcccattagtgccaaataccagaagacaattgcgaagtacattgcaaaattccgtactcctaagattgagaagcagtacaaggaaattggcgggggctctccaattcgtaaatggtcagagtaccaagcctcagaagtttgtaaaatcttggatgaaacttgtccagaaacagcacctcataagccttatgtggcattccgctatgcaaaaccactgaccgaagagacttacaagcaaatgttgaaggatggtgtgaagaaagctgtggccttttcccagtaccctcatttctcctactccactactgggtcgtctatcaatgaattatggaggcaaatcaagacattggattccaagagatctatttcttggtccattatcgatcgctggcctacgaatgaaggtctgatcaaggcgttctccgaaaacattaccaagaaattgcaagagttcccagaacctattagagacaaggtggttttgttattttccgcccattctctacccatggacgttgttaacactggtgatgcataccccgctgaagtggcagccactgtctacagcatcatgaagaatttgaagtttaaaaatccttacaggttagtctggcagtcccaagttggacctaaaccatggctgggtgctcaaacagctgacattgctgaatttctgggcccaaaggttgacggactggttttcatccctattgcctttacctctgaccatattgaaactttgcatgaaattgatttgggtgtgattggggagtctgcatataaggacaaattcaaaagatgtgaatctttaaatggtaaccaaactttcattaaaggtatggcagatcttgtcaaagatcatctggatagtaaccaattgtattccaatcaattacctctagatttcacacttggtaagtctagcgatcctgtaaaggatctttcattagtgtttggaaatcacgaatctacttag

SEQ ID NO: 2430 - DNA, 816 bp, Saccharomyces pastorianus
atgagtgaacgtgtaagtcaccatatacatgggaagtttttcataattaaactgaatgatccaaaacacctaaactctttgacctttgcggattttgtatccatcgcattactactaaataaggcaaacaatattgactctgttttatttacggtcttgcaaagctcaggtaagtacttttcctcaggaggtaaattcacagcggtaaatgaattacatgtcgaagaaaatgccagtgaagtagataaagtttctaagctggtgtctgccatttgttcccctaatatatttgttgcgaatgcgtttgaaacgcataagaaggttttgatatgctgcttaaacggacctgccgttggccttagtgcttctctggtggccctttgtgatattgtatattctaaaaatgattctgtattccttcttttcccattcagtaatctcggctttgttgcagaagtaggaacttcagttacgttgactcagaagctaggggttaattctgctaatgagcatctgattttcagctcaccgattctattcaaggagttactaggaacaatgatcacaaagaattaccaattgaccgacactgatgccttcaacatgaaagttcttgaggatctaaaacaaaatgtaaaggggctttacccaaagagcataataggtatgaaatatttgctacatagtcaaatgagagaaaagcttatcaaatcccaagcaatggaggctaacggtaccttgcctttttgggctagtggcgagccattcaaaagatttaaacagcttcaaaagggaaacagacgccacaagctataa

SEQ ID NO: 2431 - DNA, 2052 bp, Saccharomyces pastorianus
atggggcttctaaattctgcggataaagaaatcattaagagagctctaccaaaagcttcgaataagattattgatgtcgcggtagccagactatacattgcataccccaacaaggatgagtggcagtgcaccggactatcaggagctattgctttagtggatgatctggtgggaagtacatttttcctgaaattggtcgatatcagcggccatagaggggttatctgggatcaagagctatatgtaaattttgaatactaccaagaccggactttcttccacacatttgaaatggaagagtgctttgcaggtttactattcgttgatattaacgaggcatcgcatttcttgaaaagagtccagaaacgtgaaaggtatggtaacaggaaaactttgttgaataaaaatgccattgcgttgtccaagaaagtaagacaggaagagaaatctcaggttgtacatggtccaagaggggagcccttacttgacaaccaaagaaaaaggtataactatgaaaacgcggatacgattccaaccacaaagcataaagctcctcctcctcctcctccaacaactgatactttcgattctgatcaagaaagttcattttccgatatcaaatcaataacaccatctgcacccactaccccagcaccaacgcttcctcctacatctcctgaagtgagaaaagaagaagcacaccctaaacatactttaccacctttaccggcccagatggcacctttaccagatcctccacaacatagcgttcctgtacaacacaatgctcctgcacaggctcaaaacaatccatttccgtttcccgtcccagaaaattcgccagcacaatcccaaacaaacccatttccatttccggtacctcaacaacaattcaatcaaccaccctcaatgggaatgccacaacagaatagacctcttccacagctgcctaataggaacagtcgtcccgtaccaccgccaccgccaatgcgtgctaataacggaggcgtaaatgcttactcgtcgggacctacacctgcacctccaccaaggcgtgggcctgctccaccacctcctccaccacatagactggcaactgctaacacatttaacgcaatttctactgcaggaaacagcgtccctccgcaggctactggaagaagaggtcctgcaccaccaccacctccaagagcttctcggtctatgccaagcgcacccatgcaacctaatctacaacaatacagtaatcccaaccaaccctttggatatcaaccaagcaccaatatgccttccgcacctcctcctccaatgacgacttttaacaatctaacaccgcaaatgactgctgcgagcgaacaaactcatatgaatgcagcagcaacaccagcattcttcccacaatccaacatgtctcagatacctacgcaaactaaaaatccacaagtggcacctccgccacctccagcgttccttggacagtcgcagacgcctcaaccagcagtgccagcagcgccagcattcctcggacaatcacagacatatcaaccaccacccccaccaccggctccaccagcacaacaatcgatgacgaatgctgcaccacctccacctccgccagcattcctagcacagcaacctcaatccggaggtgctcctccacctccgccagcattcctaacacagcaacctcagtctggaagcgctcctccacccccagcaccaccccaaatgccagcagcaggaacgtccggaggcggatcattcactgaaactaccggcgatacaggacgcgatgctttattggcttcaatcagaggcgcaggtggcataggcgccttaaagaaagtagacaaaacgcaacttgataaaccttcggtcttacttcaagaagtacgcggagaacctgccacacagccacctgtagctgcaagtaatggcggctcgtccgggggaccacaggcatctttagccgatgcattggcagcagctctaaataaaagaaaaaataaagtgggagctaccgacgacatggacaatggtgatgattggtaa

SEQ ID NO: 2432 - DNA, 1188 bp, Saccharomyces pastorianus
atgtctttagaaagagaggaaccacaacatttcggagcagggccagcccagatgcccacaccggttctacaacaagctgctaaggacttgatcaattttaatgatctaggtcttggtatcggtgaaatttctcatcgttcgaaagatgctaccaaagtgattgaagattccaaaaagcacttgaccgaattgttagatattcctgacacccacgaagtgttctacatgcaaggtggtggtactactgggttctcatctgtagctaccaacttggctgctgcatatgtgggaaaacacggagaaattgcacctgctggttacttagttactggtagttggtcccagaaatcgtacgaggaagcaaagagattgcatgttccagccgaagtcatctttaatgctaaagactacaaaaatggaaagtttggcacaattccagatgaatctctttggagagataaggtcactggtaagaagttttcatatgtatacttgtgtgagaatgaaactgtccatggtgtggaatggccaaatttaccaaaatgtctggtagatgacccaaatattgaaatcgttgctgatttatccagtgatattttgtctcgtaagatagatgtatcccaatatggtgttattatggcaggtgcccagaaaaacattggtttagcgggcttaactctatacatcatcaagaaatctattcttaaaaatatttctggcgcttccgaagaaaccttacatgaacttggagtaccaatcacaccaattgcattcgactatccaacagtggtaaagaataactccgcttataacacaattccaattttcacattgcatgttatggatctcgttttccaacatattttaaagaaaggtggtattgatgctcaacaagctgaaaatgagcaaaaggccaagatattgtacgaagttttagattcaaacccaagcttttacaatgtaccagtggatccaaaatgtagatccaaaatgaatgttgttttcactctaaagaaggagggccttgatgaaaagttcttgaaggaagcagcagctcggaaattgacaggtttgaaaggtcatcgttcggttggtgggtttagagcttccatctataacgccttatcagtacaagccgtgcaaaacttggtagatttcatcaaggaatttgccgaaaggaacgcttga

SEQ ID NO: 2433 - DNA, 663 bp, Saccharomyces pastorianus
atgtctgcacctgttcaaagtaatggcgaagtccccactttcaagctagtgcttgttggtgatggtggtaccggtaagaccacttttgtgaagagacatttgactggtgaattcgaaaagaaatacatcgccactatcggtgttgaggtccatcctttatccttttacactaatttcggtgagatcaaattcgacgtctgggataccgcaggccaggagaagttcggtggattaagggatggctattacatcaacgctcaatgtgccattatcatgttcgatgtgacttctaggattacctacaagaatgttcccaactggcatagagacttggtccgtgtgtgcgaaaatatcccgatagtgttatgtggtaacaaagtcgatgttaaagaaagaaaggtcaaggccaagaccataactttccacagaaaaaagaacttgcaatactacgatatttctgcaaaatccaactacaattttgagaaaccgttcttatggctggctagaaaactggctggtaacccacaattggagtttgttgcctcgcctgctttggctccaccggaagtccaagtcgacgagcaattgatgcaccaataccagcaagaaatggaccaagccactgccttgccattgcctgatgaagacgacgctgatttataa

SEQ ID NO: 2434 - DNA, 1320 bp, Saccharomyces pastorianus
atgtcagttacattaccaaaattccttacgagaacagctcttaaagcttctctatcgagaaacctattaaggctctcttctatagcttccagaagtttttctcaaactgcaagtccctacgcagcagcttttgatcgttctaaaccacatgtaaatataggtacgattggccatgttgatcacgggaagacaacgttgactgctgccatcaccaagactttggctgcaaaaggtggtgccaacttcctagattatgctgctatcgacaaggcacctgaagaaagagcccgtggtattaccatttccaccgctcatgtggaatatgaaaccgctaaaagacattattctcatgttgactgtccaggtcacgcagattacatcaagaatatgattacaggtgccgcccaaatggacggtgccattattgttgtggctgctactgatggccaaatgcctcaaactagagaacatttgctattagccagacaggtcggtgtccaacatatagtcgttttcgtcaataaggtggatactatcgatgacccagaaatgttagaattggtggagatggaaatgagagaactattgaacgaatacgggttcgacggtgacaatgctccaattatcatgggttctgctctttgtgctttggaaggtcgtcaacctgaaattggtgaacaggccatcatgaagcttttggatgccgtggacgagtatattcctacaccagaaagagatttgaacaagcctttcttgatgcctgttgaagatatcttctccatctccggtagaggtaccgttgtcactggtcgtgtggaaagaggtaatttgaagaagggtgaagaactagaaattgtcggccacaacaccactcccttgaaggctattgttaccggtattgaaatgtttagaaaggaattagactctgccatggcgggtgataacgcaggtgttttactaagaggtatcagaagagatcaattaaagagaggtatggtcttggccaaaccgggtactgttaaggcccataccaagattctagcctcattatatattctatctaaggaagaaggtggcagacactctggatttggtgaaaactacaggccgcaaatgtttatcagaactgctgatgttacagttgtgatgagattccccaacgaagtggaagaccattcgatgcaagtgatgccaggtgacaacgtcgaaatggaatgtgatttgattcacccaaccccattagaagttggtcaacgtttcaacatcagagaaggtggtagaactgttggtaccggtctaataacacgtatcatcgaataa

SEQ ID NO: 2435 - DNA, 363 bp, Saccharomyces pastorianus
atgtcgcaagaaagcagcgctttatctgaatctcaggaacagcttgacaacaactctaaaatagagaacggagaggcagcctccaatagccccagagacaatagtaaacctgtgcttccttgggatcatgaaagcaaagcggtagaaatcaagagtttcagtggttataaagtagagttgaccggctggataaggagggatataaggcaggaacgtcaaaagcaaccagtatcagagtcagaatctaatgcatctgatataaaagaaccggaggacaaaagcatggaacataaagaaccagagaaggatgaacgtgaaaagaaagaggtcaaggagggaaggagagacggctcggagtcgtga

SEQ ID NO: 2436 - DNA, 4863 bp, Saccharomyces pastorianus
atggcagcggtacccactatcgatcttacactagctgactcagataatgaagacatattctattccttctcatcttctacaagtatggataatacagacgttaaaaaagaaaacatcaaaacaaagaaaacgggtgtagaaccctcaccgtttgttggcagtatgaaacaaccactttcacatccttacaaagtgagtctatcaaaaagtaagaaatataatattctttcgaaaaatgaaacaattacaaacaaagattttattatagaaggaaacacaaagtctttcaacatggcaaaccgacataacgttgtaaagggagggattgtggtgtcacctgatgacagtgaagaaaagaaagacagcaatttaaataagcaaatcacagagctatttagtgaaaacgagtatgcaaactcagcaaaagaccaagagcaaaacgaaacagaaagagaaatgatccaggataaaatggaaaaagaggcggttgccaacattccgtcttcatatttctctaaagattacaacgctagtgaagatgatttcgagcccaactacagccagaatagtactttcaaattccaaaatgatccgaacccaaatatggacacacatcgtttaatagagggggatagaaacatcagaacggaagataattgtttaaaggaagacgaagatccaacgaaggaaatggcagccgtgaaccaccatgctatcccttttgaagctggcgctagtccgaaacctgaagttgaaagcgactttaaagacattacaacaaaaatctctaatagtgagccaactctaccatcaccatcctacgtaatgcctgatgaagatatatttaaaaacgggacggccggggtagacgaaaatgcgactgttcgacttccaggactgcgaagtgatgttccttcccttgaacaagaagaaagtgaactattcaagcattttagtgagcaacctttcaatatcaaagaagttgattttacaaacaaaagaaagtacagtagcgatttagaggataaaaatacagtcaagaggccaatattacccctaagacacttagacgatggaactcatgagggttctgctgctgagcaggagaataattcgatcatcatactttctgacgaggaagaacccgatgtccctatggatgatgttcaacatgacgtgaaacttcctgaatttaccacagcagataaatttggtactgttatgccagaagttatatccttacttgaccttcctaacattaatttggacagtccattcataaaaggggtcagtgatagtgattcagcgattacaccggaaaaacaaacacctagatcaaattcatttattccccaaagagacgtaaagtcagagcaaggcccagaatcttttcacaaagaatataactcacttgaaactttgaaaaaagaacatcaggttttattaaaggaattgaattctaaagaatccgaattacgtaatgctcttaattcgtccaagacgaactctgagatcttaaggagaaaactaacgagaagagaaaaagaagtttcagaggctgaaagacattggaaacttctgttgacgttaatgaataggagcggtagaaccattagctcgacccagcaaattctagtcgatgaagctcaaaaccagttaaatatatcaaaggaaaaaaggcaattgacaaaagcaaagttggattcaatcaatatgaagatgtataactataatgaacagtggaaatcctttgtacacctaaaaaatttaaaactacaaaaatcattgaccgcactcgaacaatcaattagggaaaatgaagcctctgaaactgtaaacaaaagaagcgaacatctggctgagaaggaaaagctagaccagatgctaaaagaaggaacactgagcttcagtaaatacaagcagttaacgagtgaaatccagaagaagctgaatgacctgaatatagaaaatcaacgcaaaaaagataacagtcatgacacatcaatactacagcagcccctggcgaagagagacttatttattaaatctatcgataccgcgaaagatttattagcaaaaaacacatccagaacagaaatgacaaaacgaattctttataaacatctggacaatttgattacctataaaaacttttttgaagggggaaaatctttaatagatgtcaacagaagaaacatcgcacgtgaatctgctcaagtgttatttaccaatggtgttaaaatgccaattgtttttgaaaccctacaagattacggtatcaagttttctaatccgtcacttgttaatcctgacagaagagcccaatattttaaaagtattgaagttgctcgcgaccttattatgaagtccaatagatcggaggatgcgaagaggaagattactcgattcttaaatattctggaagaattccgaaaggatatagacacgggatttccgccgacacccttaaagagagaaggcgttgggaaagctatcgttgggctgagacaacaaggattgaaaatggaaaaactgtatgaaaatcttaggaaatataaagttcctttaacaaatgaagaactgctacagcaaagctatttatttccagcaaacgctggccaacctcttccttccaactggaacactatggaaaatgcagaaaatgataatcctgcaaatagtaatatttcaacgcaagatgaattccacatttccaacatgcatgcggctgaagatcaagaacagattagggctcttttagaaaatgttaaacaatcagaatcaattattgacggtgaagcacttactccagaagacatgaccgtgaacttattaaaacaccagaggctaggtctacattggttgttacaagttgaaagctctgccaagaaaggtggactacttgctgatgatatgggtttaggtaaaactattcaagccattgcactgatgctggaaaataggtcagaagaccataaatgcagaaccaatttgattgtcgcaccagtttctgtcttaagggtttggaaaggtgaaatagaaacgaaagtgaaaaagcgtgcaaaatttaacacgtttatttttggaggagccggaaatggaaaagtaaagcattggaaagatttggccagatatgatgccgtcttggtatcttatcaaacgttggcaaacgaatttaagaagcactggccagaaaagttaggtggtgaacaaaagcagttaccacccgtgcctcaaattcaggcattaaatgcattaaagactcgaaatgagtactactctccgttttactgtaatgactcgatgttttacagagttttattggatgaaggccaaaacattaaaaacaaaaatacaagagcgtctaaagcatgctgcactataaacagtatgtatagatggattctgtccggtacacccattcaaaatagtatggatgaactgtactccttaataagatttttaaggatcccaccttatcacaaagagcaacggtttaaattagatatcggaaggttcttccaaaagaataagcaatacgaatatgacaatgaggatagaaaaaacgcactaaaaaaggtcagggttttattaaacgccatcatgcttcgccgttctaaggctgataaaatcgacggcgaacctctcctagagcttccgcctaaaatcgtagagatagatgaatcgcagctgaagggcggagaactagaattttacacagctttagaatcaaagaatcaagtattggccaaaagattgctaaataattctgctaggggtagttattccggtgttcttacgttgctgttacgcctaaggcaagcttgctgtcattcagaattagtcgtcatgggtgaaaaaaaggcagaaggtacaaaggtagcaaatgggaaaagctttgaaaacgactggctcagactctactttaaaatcggtcatatgagcgaggatgcacaggctcaagtaatcacctcgatggattctatgacttgtttctggtgtatggagcaattagaaccagaagccatgtctattttgacaggatgtggtcatttaatttgcgatgcttgcattgaaccgtttatcgaagagtcgtctatgttacctcaggcaaagaaagctaaaggtggagctttggtacttccctgcaaagattgccaacgtttaacaaatgaaaaagagattgtttcacataaactatatgaccaggtaataaaccaaggattcactagggaggatttacatgccgagtacttaagcgaaatggagagacaaaaattacaacagaagaacgtatatgtgccagatttcgagaagttggaaccgtcaacgaaaatagaacaatgtatggaagttatccaaagagttttcgatgagtcgccaactgaaaaaattatcattttctctcagtttacaactttttttgaaattcttgaacattttctgagaaacagactacatattccatatttgaaatatattggatctatgaatgcacagagaagatcagatgttatcaacgagttttaccgtgactcagaaaagagggtacttctcatttcaatgaaagctggtaattcagggctcacgttgacatgcgcgaaccatgtggtaattgttgacccattttggaatccctacgtcgaagagcaggctcaagatcgttgttatagaatcagtcaaacgaagaaggttcaggttcataagcttttcatcaaaaattctgtcgaggatcgtattgctgaattacagaagaggaaaaaggaaatggtcgattctgccatggatccaggtaaaataaaagaagtgaacagtttaggccgtcgggaattaggttttttgtttggtttgaacggtttgtaa

SEQ ID NO: 2437 - DNA, 858 bp, Saccharomyces pastorianus
atgtcgaatgcagaagccagcagagcgtatgaaatcatcgtagagtccgttgtgaatgaagtaagagaggactttgaaaatgctggtatagatgaacaaactctacaagatctgaagaatatttggcaaaaaaagcttacagagactaaagtgactactttctcatgggataatcaattcaatgagagcaacgttaatggtgtacagaatgatttaaattttaatctttctacgcccaatataaattccaatgagttcaatattaaggaggaacatggcggtaacgaaagattgattctacccaatgccaatgccaatgccaataacagcatgtctcacactggagggactaatactggtaataatacgggagatgcaagtaacgacacaggtgcccgtacagacatgagtacagatgcaaacacaaatacagatacaactacagctagcgggccgaacattgaagtaaaaccggagatagaaataaccatcgaaaacgcccatataaataccgtagaaagtgtagatggagaagaggaaaaggagggagaagaggaggaaaaaacccagaaggaaaaggagcagatagagcaagtaaaattgcaagcaaagaaggaaaaaagaagtgcattgttagatacggatgaggtgggttctgaattagatgattctgacgacgactatctaatttctgagggcgaagaagatggaccagatgagaacttaatgctctgtttatacgataaagtcacaaggaccaaagctaggtggaagtgtagtttgaaggatggggtagtgaccattaatagaaacgactacacctttcaaaaggctcaggttgaagcagaatgggtataa

SEQ ID NO: 2438 - DNA, 1413 bp, Saccharomyces pastorianus
atgtcctcccaacaacataagttcaagcgtccagacgtctctatcagggacaagaaactggacactcttaacgttcaattgaagaaaatcgacaccgaaatcaatttgatcagaaagcaagttgatcaacaccaggtcaacgatggcactcaacaagaacgtaagaagttgcaagacaagagtagagaaattatcaagactcaagctgaattgaagaaccgtagaagcaacattcatgattctattaagcaattggatgctcaaatcaagagaaagaacaaccaaatcgaggaaaagttgggcaaaaaggctaagatttcctccaccgcagaagccaagcaaagaattaatgaaatcgaagattccattgcctccggtgatctttctttggtgcaggaaaaactactagtcaaagaaatgcaatctttaaacaaattgatcaaggacttggttaacatcgaccctattagaaagtccgtcgacgctgacaaggccaagatcaatcagttgaaggaagaattgaacggattgaacccaaaggaagtctctagccaattcgaggaaaaccaagagaaattgaatgacattcattcaaagactcaaggtgtttacgataaaagacaaaacttgttcaacaagcgtactgccttgtataagaaacgtgacgaattgtacactcaaattagacaaatcagagctgacttcgacaacgaattcaaatctttcagagctaaattggacaaggagcgtttaaagcgtgaagaagaacacaagctttccaaattattggaacaaaaagatgttgacatgggcaaattgcaagaaaaattgactcacgccaagatcgctgctttcacctacgaaattggagctatcgagaattccttacttgtcttggacccaacctatgtgaaacctaagaaaaatattttggctgacttgaacgaaactgttttggaaaccaagcctgccagaaaagttgttgctgatgatttagtcttggtcaccccaaagaaggatgattttgtcaatgttgctccatccaaatctaaaaagcacaagaagaagaaccaacaaaagaacaccgaaaatgaacaacctgcatccattttcaacaaactcgatggtaagttcactttggaaccaaccttgattgctactctagctgaattggatgttactgtcccaattaacaatgatgatgtcaagatcaccattgagcaattgaagaagaagcatgaagaactgttgtccaagcaagaagagcaaacaaagcaaaatattgaatctgttgaaaaggaaattgaaaaattgaatttagattactccaacaaagaacaacaagtaaagaaggaattggaagaaaaaagattgaaagaacaggaagaagctgaaaaggacaaggaaaattaa

SEQ ID NO: 2439 - DNA, 1236 bp, Saccharomyces pastorianus
atgacttctctggctaatgcggtgttcaaaaggtatctggcggtgaggcctcaccaagctgtccaggcaagaggcaagaagaagtcgtcgtcgtcgttcgacaagtttttcccacaacaggacaatggcaggaaaaagcaatgggaggtgctgaatgaggacaaggcctcgtggttcaagaggaagtacgctcatgtgcacgccagggagcaggaccatacagcggatccgtatggcaagaggaaagcccacgtcgataagctaaaggaaatcaaggtccaggcgaaattagatcaaaagaggcacaaatctaagttcccaaataggaacattgtgcagaagctcttgaacgacaacccccttctggagtatgtctacggtaccaacagcgtgtatgcggcgttgctgaaccctggaaggagttcccactcgcgagtgctgtactacgggagcataccggcaaagatccttcagaaagtcaatgagttgaagatcgcgacggagcttgtggacaagcacagactgaatttgctaaccaactacggggtgcacaataacattgccctcgagaccaagccactgcagccgttggagatcgcatacctgggcgacgtggacaccaccgcagcggatctaaccatccacgagtcgggcttcgacaacgaagaagtcgtgcacagtttgccctacagcacacgggaggactccaaggggttccccctggggctgtacttggacgaaatcaccgatccgcacaacatcggggccattgtaaggagcgcatactttcttggggcagacttcattgtgatgtcgaggagaaactgttcccccttgacacccgtggtgtgtaaaactagtagtggggccctcgagctcctgcccattttctacgttgacaagccgctggagttcttcaccaagtcgcaagaaatgggaggctggacgttcgtcacgagccacttggctgacgctaccgcagaaaagtacacgacagggaaggcgctcagcgtacatgacctgaacggcatgtgcaccaagctgcccgttgtgctggtggtggggagtgaaagccaaggtgtaagaaccaacctcaagatgaggagcgacttcttcgtcgaaattccctttgccggttccgggactcacgagcgggatcccgaccgcattgtagactcgctcaacgtgagtgtggccactgcactgttaatagacaatatcctcgcctgtaaatag

SEQ ID NO: 2440 - DNA, 663 bp, Saccharomyces pastorianus
atgtcagagcaaaaggccctagtgaagcgtattacaaacgaaaccaaaatccagattgcgatcgccctgaagggtggtccgctggcgctggaacactcgatcttcccagcacgggaggcggacgcagttgcagagcaggccacgcagtcgcaggtgatcaacgtccagacaggcatcgggttcctggaccacatggtccacgccctggccaagcacgccgggtggtcgctgatcgtcgagtgcatcggggacctgcacatcgacgaccaccacaccaccgaggattgtgggatcgcgttgggacaagccttcaaagaggccttaggggccgtgcgtggtgtgaagcggttcggttcagggttcgcacccttggacgaggctctgtccagggccgtggtcgacctctcgaacaggccgtacgcggtggtcgagcttggcctgcagagagagaaggtcggtgacctctcctgcgagatgatctcgcactttctcgaaagcttcgcagaggccagcagaatcaccctgcacgtggactgtctgcggggcaagaacgatcaccaccgcagcgagagcgccttcaaggccctcgccgtggccatcagagaggcaacctcccccaacggcaccaacgacgtgccctccaccaagggtgttctcatgtag

SEQ ID NO: 2441 - DNA, 1860 bp, Saccharomyces pastorianus
atggctgaactgagcgaacaagtgcaaaacttaagcatcaacgacaacaacgagaatggttacgttcctcctcacttaagaggcaaaccaagaggtgccagaaacaacagcagcaactacaacaacagcaacggcggcggctacaacggtggccgtggtggcagtttcttcggtggtaacaaccgtcgtggcggtggtggctacagcagcggcgggttcttcggtggcaacaacggaggcagcggcggtagcagaggcaacggccgttccggtggtagatgggtcgatggcaaacacgtcccagccgccagaaacgaaagaaccgaggcaaccttattcggtgttcctgaggatccaaacttccaatcctccggtatcaacttcgataactacgatgatattccagtggacgcttccggtaaggatgctcctgaaccaattacagaatttacctctccaccattggacgaattgttattggaaaatatcaagctagcccgtttcaccaagccaactccagtgcaaaaatactctgtccctatcgttgccaacggtagagatttgatggcttgtgcgcaaactggttccggtaagaccggtgggtttttgttccccgtcttgtccgaatctttcaagaccggtccatcccctcaaccagaagcccaaggctccttctaccaaagaaaggcctacccaaccgccgttatcatggccccaaccagagaattggctacacaaattttcgacgaagccaagaaattcacctacagatcctgggtcaaggcttgtgtcgtgtacggtggttctccaatcggtaaccaactaagagaaatcgaacgtggttgcgatcttttggtcgctaccccaggtcgtttgaacgatttgttggaacgtggtaagatctctttggccaacgtcaagtacctggtcttggatgaagctgatagaatgttggatatgggtttcgaacctcaaatcagacatatcgtcgaagactgtgacatgacacctgttggtgaaagacaaacccttatgttctcagccactttcccagctgatatccaacatttggcccgtgatttcttaagtgactacatctttttatccgtcggtagagtcggttctacttctgaaaacattacccaaaaggtcttgtacgttgaaaaccaagataagaaatccgccctattagatttattgtctgccaccactgatgatggtttgactttgattttcgtggaaacaaagagaatggccgaccaattgacagatttcttgatcatgcaaaacttcagagctactgccattcacggtgaccgtactcaatccgaaagagaacgtgccttggctgctttcagatctggtgccgccagtctattggttgccaccgctgttgctgctagaggtttagatattccaaacgtcacccacgttatcaactacgacttgccaagcgatgtcgatgattacgtccatagaattggtagaaccggtcgtgccggtaacaccggtcttgccaccgccttcttcaacagcgaaaacgccaaccttgtcaaaggtttgcatgaaattttgactgaagctaaccaagaaattcctccatttttgaaagacgctatgatgagtgctcctggtagcagaagcaacagtcgtagaggcggtttcggtcgcagcagtggtaacagagattaccgtaagagtggcggcggcgctagcgctggtggctcctggggagctccaaagagtagagagggctccttcagaggtggcagcggcagtggcagcggctggggtagcgacaacaaatcatctggctggggtaacagcggtggttcttcaaacaactcttcttggtggtga

SEQ ID NO: 2442 - DNA, 1695 bp, Saccharomyces pastorianus
atgttgaaactaagacttgtttttcgaggggcacgtcagttttccggtagtgtgataacgaaggtaaattgtgcatcgtgttctataaaactacaagatcaggactctagtatagcaggatactatacgaagccaaagaagctgcctgattcaagatcaaagcccgatatacatgatctgaaatatttactgttcagtcaagatatacaactgtcgaagcaagcggctttacatgatcgagatcacatcaccaccacggatatcgaagaaaccaaagacgaattgtcatcaagaattatttgcaaaagatgcagcgatgccctccaccaaaatcgttatgagtttaaagagtttcctgagagtgcattagatgaagttctaaactatatccctaagaattcaaacgttatgcatatagttccttttgtggaatttcctttgcatttgaaccctaatattttaaaaagtcatgatttggatgccacattgttgttgaccaaaagcgaccaactgttcaaggacaagacttctgttagcaagaaggtccctatttttatgaaacagtttctgaagtataatttaaggatcgactcaaataaaacatttgctatatctgcattgaaaaactggaatatttccatgctttacaactccctcagaaactacacgtatttattggggaatcctaatgttggtaaatcaactttaattaactctcttctacaaagataccttgggtataaaatcaaagtgaatccgacgggccaaatcaactcgccttccaaagaagtgatgcaagaagctctcaataagccgagaaatttcttcaggacccaggctgctggcgtatcgcatattcctaatttgactagatctatacaggcttatcaagcgtctggtaaaattattttcgatctgccaggttattctatgcctacatctggattgcgcttagaagaattattcgataaacattggcttcaaagaatacgaaagacgaacttattcaaccgtaagcaggtgaagaagaaaaattatgagtcgatgtgcggtactccacaaggtgcatgttataccgtcggaggccttttttacttggtgcccccagaagggtccataaatcaaatcgtgaagtacattccaggcccatcgactaaattcaaaaatatcgaaaagggtattgaagtttttagctcgtgtgtttcgtcgtcgggaacgcatgcattatcgcagtgttgtggaattaaaagtccattatgcgacaaggagcaatatgcgcgatatgcaattccaccttttgttggtagtatagagattgtactaaaaaatctagggtatattttactgcgaaccacgggaaagtatgatttcaaagggcttcatgaaatatgggttccaagaggtattgatgtgtgcattagagaaccgctagaaaaattaattgaaaccggctacgaacgttatatggaaacggacggaaaagaatcgagttgccctagagacaggccgatcattagttccctgtacgaggtggccaaagatgaaacggatgttttgaacaaagtaaagcgattgtatttggatagaacgaaaaatgatttatctgccaggagatttgctgacgatgatccttatgatctagtaaaacaagaccctgaagaaaagtcaaacccgtattggtattaccagtggtaa

SEQ ID NO: 2443 - DNA, 213 bp, Saccharomyces pastorianus
atgattgtcccagttagatgtttctcctgtggtaaagttgttggtgataagtgggaaagttacttgaacttgttgcaagaagatgaattggatgaaggtaccgcattgtcaagattgggcttgaaaagatactgttgcagaagaatgattttgacccacgtcgatcttattgaaaagtttctgagatacaatccactagaaaagagagattag

SEQ ID NO: 2444 - DNA, 558 bp, Saccharomyces pastorianus
atgttcagacaatcaattagaccactagcttcaactagaataacctttgttcgctacaacagctctccagcctacacggctgcagttagcctgttgaaaggggatctgaagaaggccatgattgccaaggatgagatgaagaagacagcaatcagaagcatgctatcggctatcaagaacaaagagattgatttgaaggggaagagcagcgacgagtactctttatacgatatgtactccaagttgatttctcaaagaaaggactctataaatgaattcattgctaacaaaagagacgatttggtaggcaaggagcaagacgaaatgaacgtcattaaaaaatacatggaacaattaccagtttcatctgaacttgataccgatcaaaatgtgaagaacctgttagacgcccttaaagaaaaggcaggtgacaaaaaagtccaaattaaagaattgatgggacaaattgactggaaatctctgccaacggaatttaagacgtcgccaactaccataaaaaatagcatcgtgaaacaatttaaggaaatcttcaaatga

SEQ ID NO: 2445 - DNA, 1458 bp, Saccharomyces pastorianus
atgggtaaaaacaagaagaaaacagggaaaaaggccaaaaaccagcctcatgttgaagccgttggcgaaaccaccgatgaacatgaagtagcaatcacttctgcaaaagaagacacagccactgaaatccccaaagcgatcggtgttccagaagactcggaaaatgtagaggctaagaaggaagagcattcacaagagataaatcaacaagaagtcagtgctgatctcgtcacagataaaaccatcccattagaaaacaatatggccaacgaggaaataaaggctttaaaagaagagattgaacgtttaaattcagaattgaatgccaagaaggacgaggaaacgcaaaatgaagatgccaaagatcagctagaaaacgtcattaaagaacgagacgaattcaagacacaatacaatacccttttaagcaagatatcttccatgaaatcaatctttaataagatgaaggaatcacagaaagaattagaagaagtccaagaacaactaaccgaatacgaatctcaaaacctaaaattgaagaaaaaacttgaagcttccaagattgaaaactctgaattacaatcaacgattgtgacaataaataaagagttagagaatctggaaaacgaacaagaaagtgctgaagatatatttttggaatacgaatcaaagatagaggccttgcaggatgagcagcgcaacatgattgaaacgcatagcaaagaacttaaagcttctaggaaggataaagatcaattaagtgttcaggtccaagagctgatgataattttagagaacctcaaacaagatatatctgacctgagaaacgaaaaagatgatttgaagcaagctttggaattacacgaaagtgagaaaacagcattgcaaaactcggtgaacgatctggaactaaaaatcgaagaacttgtcagcaaaaaggaagaggaattaagagaaaaggatctggaagtaaaagatttgcgctcacaacttgacacagagctggaagcacacaacaatgatattacaattcttgaaagcttgaaaaaagaaatagaggacatgaaagaggacgtgtctatgaaggaaaaatacgaggaagaatcaaaacagcatgttttacagatcggcaagctgcgccatgaagctatcatactaaacgagcatctaacaaaagccttaagtatgctgaagaagtcaagcgactcagaatccgtggataaagaactgatatctaacttgttgatctcttttgtggccatacccagagcagacccaaggaagttcgaagttcttgaattgttgtccaatttcttgaactgggacgaagataagaaacagcaggccggtttaatttcgaataatgaccaatccagaagtgcaagcgccgtatcacgaacagaaagttttgtatcgctatggaccaactaccttgagaaagaaagtgagaaggattga

SEQ ID NO: 2446 - DNA, 882 bp, Saccharomyces pastorianus
atgtcggcagaaccattattgcccacacacaacgggccacaggcgggtgaagcggcttccacagaccagaagttcgtcgtagtgcggttttcggacgtagcagtaggagatctgcagttgaacgtatcgaatgtgccgtatgcgaatataaatacgcactggttgcgtcgaatgtgtagggagttacggccccaatatacgcagaggagaagactgaagtttatcaggaatggtagcattctaaacacgcattctaagatatctgatgaactggcgcattattttggtgctggaagcagcaactccgacactggcacaagtgccagcggtggggcggagcagaacaagtactatatccattgtataattggcacggaggatctcacgccagcagagctcgctaccgaggacctgaaggatgatgcgaccccgtctaatgagtccatgaccacacaggccatcgggtttgacagactacgatcagtggggtttaccgaacaagaaattgaactactgagacagcagttccgagccacttatggggacttggaagaggaggaggagagactcgtccaaagtagtaacagagatgacgatgtccatgacattagacaactagaggaacagtggatggaaagcgggaatggcaccaccccggagaacggcgctggcaatggaaacgaggacaggttcaactccgtgcccattgccaacataaagcataacaaggacctgttactgggcatatgtgtagggtttttctttggtgtctttggtatactgttgatgaaattcgatgggttgttcaatagacgacaaaaaatggcaattttcgccggtgtgattgttaatgttatgttctgtcttgttagaggtttttaa

SEQ ID NO: 2447 - DNA, 441 bp, Saccharomyces pastorianus
atgtccagcaccctatttgacgatatcttccaagtctcggaagtcgatcctggtcgttacaacaaagtgtgtcgtatcgaagccgcatccaccacccaagaccaatgcaaactaacattggatataaacgttgaactgttccccgtcgcgccacaagattcgttgactgtcactattgcatcctctttgaaccttgaagacaccccagcgaacgaggcttctgtaacaaaaagttggaggcctcctcaacctggtgacagatcattggccgacgactacgactatgtcatgcacggtaccgcttacaaattcgaggaagtcagcaaggacctaattgcggtttactactcgttcggcggtctgctgatgagattggaaggtaactacagaaatttgaataatttgaagcaggagaatgcttatcttttgattcgtcgttaa

SEQ ID NO: 2448 - DNA, 471 bp, Saccharomyces pastorianus
atgtttgccagactcgccaaccccgcctgctacaagcccctcatgggctccagcataacaaaagctgcaaagagactataccatcccaaggtaattgaccactacacaaatccaagaaacgtcggatccatggacaagtcccaggccaacgtcggcacggggatcgtgggcgccccagcttgtggggacgtgataaagcttcagatccaagtgaacgacaagtcgggcatcattgagaacgtcaagttcaagacctttggctgtgggtcggccatcgcgtcctcttcctacatgaccgaactgatacgtggtatgtcgctggacgaggccgtcaagatcaagaacacagagatcgccaaggaattgagcctgcccccggtgaagctgcattgctccatgctcgcagaagacgccatcaaggcggcaatcaaggattacaagacgaagaggaacccctccgtcttgcattga

SEQ ID NO: 2449 - DNA, 3747 bp, Saccharomyces pastorianus
atgagctccaagttaaactacgcagatatcgacgttccactggattggctgtataagggcaaacgaagaagtaagacgaggaatgtgaactccacgcgtgcctcagacccagcgcctccttccagcaggaaaagttcgactccaaaggcgaatcccactcctactgctactcccgctgctactcccacattcgcagccgcccctcaagggccctcgactgagcagagtgtaaagaatgagccatctaaatctaaaccggcggtgctcccaggcaaacctccgcaacaggaacaacgaggtgctagaaggacacgttcccactcggtgtcctatgacgttttgaaaaaaaacgctcaagaggccacctcagactctccaaagatatcccgagtcagaactgcacaagatcaacctgccagagaaacgaaaaatattgccgttccggagtccatagcttcaaaaaagggaagaactcgttcttcgtctatatctactcctttgaatgaacggtccaagaaatctctattcggttctttgtttggaagaagaccctccactacgccttccctcagcaccgagaaaccagcgtcttctcaaaatgacagcaaaaagagttcagagctcttccccatagacactaaacagccgaagaattccacccccagtaatacgcctgttaccgcctcttccaaaccggctagttctggcagtagcaggcatcgtagcagctccatcacttcaaagttgttaagcatcccacacaacatattggagggctcttcctcggattctaaccatcatcatcaccttaatggacatggaaatgaccaggattcgccgttaccagcagagtctccagatttgccgcccattctggaaagaagcaccacccagcagttaaagaaactatccgatgtcgatctgaggagggttacaatagccgttcaagagttcgacgcggatcctccacagcaactaccttcgagaaaacctaaaaggggcgacgtcttgatcccagaagatatggtaagcgcacccccattgatctccctaggtatcacaaacagtggcgatcaaacgactttccaatcaagcgcctccgctttgtatactaaggactctaaagaatataaagccgctctagaacactacaagaaagcagccaaagaagccgaaaaacatcaaaaggacgcatattatgtcgcggaacgcatggctcaagaagtggcaaactataaggccaagcaatcgaaactctcttcactgtcctccgttgcaacttcgccagcagattcgttagcggatcaggaaccctcttccatagacactaaggcttctaaactccatatcgataaacccatcaatgcaggcgcacatccttttgaaactcagcataatggtaacgccggactcccctctagtgcagaacaaactttggacgtatcctacactagatgttgtcatttaagggagattctaccgataccttccactttgagacaggttaaaggtaaaactgctcccctacagactttaaagtttttgaatccaaaaccaactctagtggatattttatcattttgcgactttattgccataactccgatacataacattgtctttgacaatgtgtccctaactcatgatatgtttaaaattgtcatttgttctttagcaacttctccagtcgtagagaaattggggttaagaaacgttgtgataaatgaacaaagttggaaactactttgtaagtttctactgcaaaataaaactttaattaaactggatatttctcaaactaaagcaagatcggatctaagtgattcaaactacagagaccaaatggattgggaattattttgtcaagtgctcagaaagaaagacggtagacctttggaagaactacttttgaatgggctaaggttcgacaagatgccgttcgactattacaaaaatgttttacagacattcgctcaaatgaaccctgagaatcctattcgtcttgggatggctaacgtagagttctccactcaatgtttcgattttctctttgattggatgtctcaatacaacgttcagggagtagatttggcctacaataatttagaaactttggtgaaaccaatgatcgaaaaactggctagattgccttacaaacgcctagaatatttcacacttaatagcactaatatcacctctgttgatgatatgtcctccattttgaaatatctttcaagattgcctagcatcaaattccttgacttgagcaatttaccaatgttgttcccaagtattttaaaatctgattacaagtacttgcctcaatttcctcaattaaaacgtgttcactttgatttcaacgatctttctgtaaaggaaacaacaatgctcgtgaacatattagccaagtgtgaaaccttgtcccatgtctcgttaattggtcaaagtcccatgcccgacgccgataaaatctctgtcgaaagtgatgattctgaaaaggcaaaagttgaaaagaaagaacaagttttattccttagaaatacattgtgggcttccctgtatgcttttgttagggattctcataatttagttagtttggatattgactatgatgaaataccggacgaaatccaatcaagagtcgctttatgtttaatgcataatatgaaaagaattatggactctagctttaaattggacgaattgactgtgcaagatgatttgatatttgatggttctttaataacagaaagtgcagaagaagttttaaagagactaaatgataactccttgcttcaaaatgacgttggaaggaaatatctcttaagaaaatatttcgaaaaaatggaaaaagtacatcacaatgttcagcatactatcgattctatgtttgagaaaagagaatccgatgaactaccactacaagaaaaggagaacttactgcggttattattacttgagaaaaatttatcaaatattcttgaaatatttgcctctatgcccaatatagcagatgtcgtgccattttcaaagactgacaacagtttcccagatatcagagatagcaccggcaattccggttacaacgatggtattcgcccgtctctaaaacacttggattctgacagattaattaatgatgcttctgttcccgaaaacgattcatcgatcagaccgcatttgatggccactgattcaggacgtattatcgatgtaaccaccggtaaagctcttctatttaaaagctcatcgaacacttcattggctggtaaaagacaagaagaagaggaaggtgaattacacaaatggggtgtctttgttcaacatcaaagttcaagacatagttctatgcctcctactcccaccagctcctcgcgaattagcggtacatcaacaccagatggtggagccgtagacaggaagaaagggaaaccagctgaagtatcgagttctaggccaaaaatattaccaaagatacctacgggtactgaactgagagacgcgattatcaaagccaagggtattaattccgttgatgacttgattaaaaatgtgacctctgaaaaagttggtttggaatcattatacggtgacgaattgaacaccagaagcccaagcaatgaaagtctgcaggaatcacagcaaaaagtgcatttgcaaaggccacccattgaagatgaaactgtgacgaagaaatatgacaaactattgaacgatttatccaatgttcgtcacagcaaaagctaa

SEQ ID NO: 2450 - DNA, 1392 bp, Saccharomyces pastorianus
atggcaaagagcaagtccaatcagggtgcgagtggagcacgccgcaagcctgcaccttctttataccaacacatctctagcttcaagccgcaattcagcgctcgggttgatgacgtgttacacttcagcaagacggtggcgtggagaagcgagatcattcctgataagtccaaaggcactttgacgaccagtcttttatactctcaagggagcgatatctacgaaatcgatgccactttaccattgaaaacattctacgacgatgacgacgacgacggtggcaacaaagaaagctctaaaactaaatccgcaaccttcccaaaccctgagtacggcgacgccttccatgacattgatggtacgctattgcgccccaaatggatctaccaaggcgagacagtggccaagatgcagtacttagaaagctcggatgacagtacggcaatcgcgatgtctaaaaatggctctttggcgtggtttagggatgatatcaaagtgcccgtccatatcgttcaggagatgatgggtcctgccaccagttacgctagcatgcactcgctcaccagacccggctccctggcggtggccgatttcgatgtgtctaccaacatggacacggtagtaaaatcacaaagcaatggctacgaggaagacagcattctgaaaatcattgataactcggatagaccgggagacatcttacgcaccgtacacgttccgggaaccacggtaacccattcggtgcggtttttcaacaaccatctatttgcatcatgctcagatgataacattttgaggttctgggatacaagaacggcagacaagccgctttggattctgagcgagccacagaatggccggctcacgtcgttcgactcatcgcaagtcactgagaacttgttcgtcacaggcttcagcacgggggtcatcaagctatgggatgcgcgcgccgtgcaacaagccacgactgacctcacgtacagacaaaatggcgaggatcccatccaaaacgagatagccaagctgttccattccggcggcgactccgtcgtggacatcttgttctctcaaacttctgccacagaatttgtcacggtggggggaacgggcaacgtgtatcactgggacatggagtattccttctcgagaaacgacgatgacaacggagatgacgtgcaagtggctgccccagaggaactacagggccaatgtctgaagtttttccacacaggtgggacaagaagatcaagtaaccaattcggcaagagaaacaccgtggcgttgcacccggtaattaacgatttcgtcggtaccgtggactcagatagtctcgttacagcttacaaaccattcctcgccagcgacttcattgggagaggttatgacgactaa

SEQ ID NO: 2451 - DNA, 1521 bp, Saccharomyces pastorianus
atggcttcactatttaggcccccagagtcgacgaaatgcaacccaaattctccgagactaaaactgccctccctaaggaataaccagttagatgatagtaatatatattcgatatctaacgggagctctaccacaggccatactccagagccgttgacttcttccacatccacgctattttctcaacatcgaacttattcaagcgattcctccatggctctaaacaccataaagaagaggcctgctccaccatctttaacttcattgagcacgagcacactacctacaagcaaaacgcgacccccccttgcgcctattaccgatgtatcagactccaggcaggatctagaattgaaacagaaagcaatagtcgcaagtgagccttcggatagtagtgatatgatctctccgtcgatagcaagccctttttcacatacgaacacatcttctccctatcttagaactgacctgaacaattcggtggagtctgatttttcaaatttgatatcggcatatgaacaaagctcaagtccgattaagccattacctcgtcagactgcaacacctactgaaccatatacgaacttgaacagcgcgcaagacgtcgatcaactggatgaaaacggttggaaatatactaacttgaaggataaaatagagactctaggtgtcctgggagaaggcgcaggtggatctgtgtccaagtgtaaactgaaaaatggatctaagatatttgctttgaaagtaatcaatacattaaatacagatcctgagttccaaaaacaaatattcagagaattacaattcaacaaaagttttgaatccgaatatatcgtacggtattatggaatgtttacagatgatcaaaattcctcaatatacattgctatggaatacatgggcggcagatcattggatgcaatttacaaaaatttatcaaaccgtggaggtagaatcggcgagaaggttcttgggaaaatcgccgaagcagtgctaagaggactatcgtatttgcatgaaaagaaagttattcatagagatatcaaaccacaaaacattcttttgaacgagaatggactggtgaagctttgtgatttcggagtcagcggagaagccgtaaactcactagctacaacttttactgggacttccttttatatggctccagaaaggattcaaggccaaccatatagtgttacatctgatgtgtggtcacttggattgacaattttagaagtggcgaatgggaagtttccttgctcttcagagaaaatggcagcgaatatagctccgtttgaactattaatgtggatcctaacattcactcccgaattgaaggacgattccgaatccggtattatatggagtccatcattcaaatcttttatcgattattgcttgaggaaggatagtcgtgaacgcccttcccccagacagatgataagtcacccctggataaagggacaaatgaagaagaaggtcaatatggaaaaatttatcaagaagtgctgggaagattaa

SEQ ID NO: 2452 - DNA, 687 bp, Saccharomyces pastorianus
atgagagcctttacagcagccacaatgagagccacctctaggaagtcgttcgtccaagggggaccaagaacttccttgatgacttctacgtttttagggagagcgactccacttacaacgatgagatactattccgaggaagccaagaaagaagaagccaaagaaaacaacgaaaatttgactgaagaacaatctgaaatcaagaaattggagagtcagctgggtgtcaagacaaaagaggcttctgaactaaaggacagattgttgagatccgtcgctgacttcagaaacttgcaacaagtaaccaagaaagatattcaaaaagctaaagattttgcattacagaaatttgcaaaggacttattagagtccgtagataactttggccatgctttaaatgctttcaaagaggaagacttgcagaaatccaaagaaattagtgacttgtacactggtgtcagaatgacaagagatgttttcgaaagtaccttaagaaaacacggtattcaaaaattagacccaatgggagaacattttgacccaaataagcatgaagcgacatttgagctgccacaacctgataaagaaccaggtactgtttttcacgtacaacagttaggtttcactttaaatgacagagtcatcagaccggctaaggttggcatcgtcaaaggcgaagaaaactaa

SEQ ID NO: 2453 - DNA, 2424 bp, Saccharomyces pastorianus
atggcttccgtacccaaacgccatacatatagtggcaatgtcgccaccgaaagaaaccaccatcctcttcaaaggaataacgagattttgtatcctatacgtaaaagcccacggaaacatgccacctttgggccatatatagtgggttctactctgggtgaaggggagtttggtaaagttaaattgggctggtctaaagcatcctcgcccaatgaggttcctaagcaagttgcgataaaactaattagaagagataccatcaagaaagatgccgataaagaagttaaaatataccgtgaaattaatgcactgaagcatttgacccatccaaacattatttatttagaagaggttttacagaattcaaagtacattgggatagtactggagtttgtatctggaggtgaattttataagtatatccaaagaaagagaaggttaaaggaatcttctgcatgcaggctgtttgcccaattaattagtggtgtcaactatatgcattccaagggacttgttcatagggacttgaaactggaaaacttattaatggataaacatgaaaatctagtcatcacagactttggctttgtgaatgaattcttcgaagataatgaactaatgagtacttcctgtggttccccttgttacgcagcaccagaattagtcgttagtactaaggcatacgaggcgagaaaggcggatgtttggtcctgtggtgtcattctctacgctatgcttgctgggtatctaccatgggatgacgatcatgaaaatccaacaggtgacgatatcgctagactataccagtacattacccaaacaccccttaagtttcctgagtatataacgcctattccaagagaccttttaagacgaattctggtaccgaacccaagaagaagagtaagcttacgggcaattcaaagacatgagtggttgaaaccacatcaggcctttttaagcattcagccgaactactgggatgaacaattgcaaaaaggacatccgcaactagctgctgggggcgatgttggtcgacatacaacttattcctcgccaacatcctcccactcgaaaagtagggataggaactcgctgataatagagtcaaccatagagcaatctcgaatgtctccgcaacccgtggctactagaccggattcatcaatttccatcagcgattccacgttgataccgaacaatacgaaaagaaatcaaactgaatctagggtagttagcgatcattcaagtgaatcgaacaatcataaacgaaacaccacgaacagctctttacaagcagaacaaactgctaggcactcttccaaaggcaagaaacatacatcagttactgggcttcttacaatccctggctctcctaccatcgcgaggacaaggaatatatcatcggaacctactggccaggtaaacgctcccaatcagacgacttttactcaggaggatttccatcgtgtcggtaattaccacgtgcctcgtaataaacctaggcctacttcttactatcctgggcttattcgaaacactgcggatgagagtttaatggatattccagtaaataaattaaccggaaagttgccggactgcaaaaacttggtttcttcaaagaagccagaaggcatttcttcggacacagcacatgatgctactaaagctgctgtttctaataattccattataatattaccggaaggcccagcagtgaaaaattcgccggtagattatcactatgctattggtgacctgaattatggtgatcaaccaacaacagaagctatcgcgaaaatgaatagagatcttgctcataaaataatagagaacgttgcgccgcttgaaaagatcgacttggaggatgaatcggtggtctcaactgctaaagagtccaatggctctgttagtgaagaagatactgaaattcggccaggtaatgttgtcaatccttctaacaaatcggttttttccttggaaaaagaaaataggaaaaactacgaaagaaaaaggttcagtttcatgtcattatattcatccttgaatgggtcgagatccactgtggaatctcgtcaatcaaaggtcaatatgcctcctgtgtcgtctagaaatccatcaggacagtcaaataagagcagtaccaaaataactcagcaacaaccgcgtactcttgtcgataacggtgtgccgactataccaacgcctgctaacaacattaatgacggtggaggaaggattgtcaattctggtaatactggaagtggcaatcctagtaggcctatgcgagcttctgttatgatttcaacgttacgagaagaagaaagaagtacagtgtctactgaagggcacaacgttgaggctcagacttcaacagcaagaaaggttttgaattttttcaagagaagaagcatgaggatttag

SEQ ID NO: 2454 - DNA, 636 bp, Saccharomyces pastorianus
atggctggaggaaagattcctattgtcggcatcgtggcatgcctacaacccgacatgggcatagggttccaaggaggcctgccttggaggctatccaaggaaatgaagtatttcagacaggtcacttcgtcgaccaaggattcaagtaagagaaatgctgtgataatgggcaggaaaacatgggaatccataccacctaaatttcgccccttgcctaaccgaatgaacgtagtcatttcaagaagcttcagtgatggcttcgcccacgatacggaggaagcaataattaggagcaattcactggaaaacgcgttgaaccatctagaggacaagtttcgagactcattagaaagaatatacgtgattggcggtggcgaagtctacaatcaaatgttcccacttacagaccactggctcatcacaaagataaacgcgctgagcgaaaccgcactaccttccatggatacgttcctggatgcgaaaagattgaaagaagcatttagcgagcaagatccggcccaattgaaagaatttctccccactgcggtcgaattgcccaaaaaagactccgaccaacgctactcccaagaggagaagggctatcgttttgagtttgcgctgtataatcgtaaatga

SEQ ID NO: 2455 - DNA, 1311 bp, Saccharomyces pastorianus
atgtcccaacacgcaaattcatcatcctggacctcttttttaaaatcgataagttcgttcaatggcgatctgtcgtccttgtctgctcctccatttattctttctcctacatcattgacggagttctctcagtactgggctgaacacccagatttgtttctggagccatcgttcattgacggtgaaaactacaaagaacactgtctctttgatccaaatgtggaatcacaggaagtggcgcgaatgttggcggtggttagatggttcatttctactttaaggtcacaatactcttctaggaacgaatcgatgggttctgaaaagaaacctttaaatccatttctaggtgaggtatttgttggtaaatggcaaagtgataaaaatccagagtttggagaaacagtacttttaagtgagcaggtttcacatcatccaccaatgaccgcattttcaatctttaacgataagaatgacgtttcccttcaaggttacaatcacattaaaaccggttttactaagactctgacactaaccgtcaagccatatggacatgtcattttgaaaatcaaagacgaaacttacctgatcacaactccacctttacacattgaaggtattttagttgcttccccctttgtcgaactaggtggtagatcgttcattcaatcatcgaatggtatgctgtgtgtcatagaatattcaggtagagggtattttaccggtaagaagaactcattcaaggcaagaatctataaaaatcctcaagaccataaacacagccataaagaggatgctctgtacttgatttcaggacaatggtcaggtgtttcaacaattataaaaaaagactcgcaggttccacaccagttctatgattcgtcaaagacacccgccgagcatttaatagttaagccaatcgagcagcagaatcctttggagagcagaagagcttggaaagacgtggcagaagcaattagatcgggcaataatagtatgataaagaaaactaaggaagagctagaaaatgcacaaagagctttgagagaacaggaagctgcgaaaggtgttcagtggcaaagaagatggtttaaacaagtaaactactccaaagaagacgaatccagtgatgcagaaaagccaagcgacaatgatattttcagaaagttggcatcgacacttcagctctctgagaaaaatgtgccaagtggaacgttaatcggcgctaaggatgataaaaaggacgtctcaaccgcattgcattggagatttgacaaagatttgtgggcgaaagagaaggagattattatataa

SEQ ID NO: 2456 - DNA, 1113 bp, Saccharomyces pastorianus
atgcatcggaactattattcgaatacagaaatttacacaaaaaacggaggctcagaatatgtaagaaaaaaggttttaagatcgagaaagccatcttttttttccttcttcaatgacacttcaagttcaaacgggaacgaacttgtaggttttagacggttcgcaaaagcttatttgtttggggatgagactgattcatgtgggactgattcttatacacctgttaaggcaattgcgaataaaagacgttcaaagaaagaacataaaaatgatcagcaactatggaaaagacagcataattcacaaggttgctcattttttatagaagatgacattaataaaaaggcagaaacagcagtcaaggatttatacgggaatggcaaatacaacggtcacgattccgtttttaaaggagctcagtatacggaagaaacagaatacaatgaaaaagcaacagaggctcagaattctacctttcccaaaacaagatcggtgtcaataaacgatattccacgtggcacaggaattggtagcgttttgtctcaagtgcgtggcggatctttggaaagaattgtggtttacaggtatgatactccggaacgctctttgcataaagttgacctatttttcctaaactatgatggggctcagtcatttatgaagtatgcgacgacgaatatttttaaagtcaacgggactcatttaagaccggagtggattttccttgaaagcacatttgaaaatattatgaaagaacagtcggtaaacagaatattagatgaggaaaaacttatatcaagatgcttgatcgtaaaaaaaagttcatcaaaaactatagttaccaaaccaagtcaagacaaatcacaaagtttggaaaacattgacattcaagaattagaaaaggatttccaaaattttggggaggttttagaaattacccccattgtatcaaggaaattatgtgtttccatattcttttatgatatatccagtgctatgagagccatggaagaatacgaacaaaagggatcgtatttatataataaatacttcaagacatggacaatatggtatggaaaagatattacagaccagccttgtatcgacctgtaa

SEQ ID NO: 2457 - DNA, 2034 bp, Saccharomyces pastorianus
atgtctgatttaactgatgttactgtaaaaagatcccttgatactactgttgagtctccggaaaatgtcgccaagaaatcaaagattgaacagcgcattcagatagatagtggtattcatgaagcagatgtcgggattacttattttctatccccagaattgtcaggatttaaaggacaaatcaagcaacggtacactgactttttagttaatgaaattgatcaagaaggcaatgtcattcatttaacagataaggggtttaagatgccaaagaaacctcaacgctctagggaagaggccaatgcagaaagggaagttgaagctgctagaagacaagaatttaaagttgattctcaattgagggaggaattggtggagatatttggggaagaagatgtgtccaacatcgaaaccgtctaccgcatggctaataagatggaatcaacaaaaagttttgaggataagaccgttagaactaagattcatcagttattacgtcaagctttcaataacgaacttgaatcggtaaccactgataacaacacttttaagattgcaagatctagtaaaaattcaagggctaacaaacaagaaaagatcaaccaaaccaaagatgctaatggcgtggaaaattggggatatggtccaagcaaagatttcgttcacttcaccttacacaaggaaaataaagacaccatggaagccgtcaatgttataacgaagttgctgagggttccaagtcgtgtcatcagatatgccggtaccaaagatcgtagagctgtaacatgccaaagactttctatttcaagaattggtatggatagactaaatgccttaaacaaaactctaaaagggatgattatcggtaattacaacttctcagatacaagtttgaatctgggtgacttgaagggcaatgaattcgttattgttattagagatgcaactacaggcgatagcgaagtctcactggaagatattgtttccaacggttgtacatcattatcagaaaatgggtttataaattattttggtatgcaaaggttcggtacattcagtatctctacgcatacaattggtagagaattacttttgtccaactgggaaaaagctgctgaattgattttatctgaccaagaaaatgtgcttccaaaatctaaggaggctagaaaaatttgggcagaaactagggatgctgccttagccttgaagcagatgcctagacagtgtcttgctgaaaatgcattattatattctttgtccaaccaaagaaaagaagatgatgggacatactctgcgaacgcttattatacggctataatgaaaattccaaggaacttgagaactatgtatgtgcatgcttaccaaagttatgtctggaactctatcgccagtaaacggatagagctatatggtttaaaactggttgtcggtgaccttgtcattgatgatactgaaaaacctgtgtctgagaccagcatagacgatgaagattttgatgaagatgttcgtgaagctcggtttgttcgtgcaaaagctgtgactcaagaggatattgactcaggtaaatacactatggaagatgttgtattaccatcaccagggtttgacgtgctttatccttctaatgaagaattgaagcaactctatgtggatatattaaaagcagacaacatggacccatttgatatgaggagaaaggttcgtgatttttcactagctggctcttatagaaacgttgttcaaaagccaaagagtttagaatataagataatccactatgatgatccttctcaacagatagcaaacacagacttggatattttgaataatacaagagcaaaagaaagcggtcaaaagtatatgaaagccaaattagacagatatatgccaggtaaaggtggtgagaagactgctgtggtattaaagttccaattagggacatcttcttatgctaccatggcactgcgtgagctaatgaagctcgagacttctcgccgcggtgatatgtgtgatgtcaaacagggaatctaa

SEQ ID NO: 2458 - DNA, 1335 bp, Saccharomyces pastorianus
atgtcacatgacggggaagaagaacctggtattgccaaaaaggtagactctgtagatgatattattattaaatgccaatgttgggtcgaaaaaaatgatgaggaacgtcttgctgagatattatcgataaatacaagaaaatcaccaccaaaattttatgtccactacgtcaattacaataagcgtttggacgaatggatcaccactgagagaataaacctggataaagatgtactgtatccaaaaccaaaagcagttgacgacgaagataacaagaggcaaaagaagaagaaaacacccgccgccacacctcaggcaactttgcaagacggagtagatggtatgtcaagagaaaatacagatgttatggatttagacaatctgaatgtacaaggaattaaagatgaaaatatatcacacgaggatgaaattaagaaattgagaacttccggttccatgactcaaaatccacacgaagtggcgcgtgtcagaaacttgaaccgaataatcatggggaaatacgaaatagaaccatggtatttctctccataccccattgaattaaccgatgaggactttatttatattgatgactttacactgcaatattttggatctaagaaacaatacgaacgctacaggaagaagtgcacacttagacacccaccagggaatgaaatttatcgtgatgattacgtatctttttttgaaatcgatgggagaaagcagaggacgtggtgtcgtaatctctgtttactatcaaaactgttcttggatcacaaaacgttgtattatgatgttgacccatttttattttattgcatgacaagacgagatgaacttggccatcacctggtggggtacttttctaaggaaaaggaatccgcagatgcttacaatgtggcatgtatcttaacactaccacaatatcaaagaatggggtatggtaagttgttgatcgaattttcttacgagttgtcgaagaaggaaaacaaggttggttcgccggaaaaacccttatctgatctaggtttattatcctacagagcctattggtcagacactttgataactctactagtggagcataaaaaggagattactatcgacgaagtaagttcgatgacctcaatgactacaacggacatactgcacactgcaaagactttgaatattttacgatactataagggacagcatatcattttcttaaatgaagatattttagatcgatacaatctactgaaagccaaaaagagaagaaacatagatgcggacaggctcatttggaaaccaccggtatttactgcatcccagttacgctttgcctggtaa

SEQ ID NO: 2459 - DNA, 1257 bp, Saccharomyces pastorianus
atgtcagatacaataaacactttaagaagaagaacgaatgaagagtggaaagctacgcccggtattgccgaacagcatgaggatcaaccctcgacaatcatcgataagagagaccaaactcccaagccacaactagagtcgtgttgtcccttagcaacgccctttgaaaggaggttgcaaacgctggctgtggcatggcacacatcctcttttgtagtattttctatatttgcattgtttgcaatatcgacgccgacactatggttttttgttatcccgtacatgatctattttttctttgatagatctcctgcaactggtgatgtggtaaacagatattcccttcagtttcgttcgttatcagtttggagatggtactgtgactacttccccataactttgatcaagaccgccgaactgaaaccaacttttacgctctcaaagaacaagaacaataacggcaaggtgtacaagatcagattgtggccaaccaaatattctatcaacttgaaaagctactctaccatcgattaccgtgaccaggaatgtacggggccaaaatatctattcggttatcatccacacgggattggtgccctgggcgcgttcggagcatttgcaactgagggttgtaactattctaaaatctttccaggtattcctatttccttaatgacattggttactcaatttcatatccctttttacagagattacttgttggcattaggtatatcttctgtgtcaagaaagaatgctttaaggaccttaagcaaaaaccaatcaatttgtattgttgttggtggagccagggaatctttgttaagttcaacgaatggtacacagctgatcttgaacaaaagaaagggatttatcaaactggcgattcagacagggaataccaacctagtccccgtgtttgcattcggagaggtcaactgttataacgtattaaacacagaagcggactcgacattgggtaagatgcaattatggttcaaggaaaacttcggctttaccattcccattttctatgcaaggggactattcaattatgacttcggtttattaccatttagagcaccaatcaatgttgtcgtagggagacccatttatgttgaacaacaaatagtaaatcctccagatgacgtcgttgatcatttccacgacttgtatataaaagaattggaaagattatactacgaaaatagaaacaaatatgggatatcagaagcagaattcaagatagttggttga

SEQ ID NO: 2460 - DNA, 975 bp, Saccharomyces pastorianus
atgctagacccacgaatattgccatactacaaccctgccgtggaccggaagattgccgtggtgacgggtgggaacaccgggatcggttggtataccgttctgcacctttatttgcacgggttcgtcatttacatatgtgggagaaactcccacaagatctcgaaggctatccaggagatactcgcggaggcgaagaagcggtgccatgaccggggcgacggcccaggcccgaatatacggcggctggggtctttgcattatatccatttggatctgacggacttgaaatgcgtggaaagggcgtcgttcaagattttgaagctggaagaccatatcgatgtgttgatcaacaacgcagggatcatggcggtgcccttggagatgacgaaggataggtttgaagtacaattgcagacgaactacatttcgcacttcttcttcacgatgaaactgcttcccctgcttcgtcactgtcacggtagagtcatctctctgtcctctgtgggccatcggctcgaagtgatgtactggactctatgcaagacatgggactacaagcctaacatgctttttacctggtttcggtacgcaatgagcaagacggcgctgatccaatgcacgaagatgttggccattaagtacccggacgtcctgtgcctgtccgtccacccgggcctggtgatgaacacaaacctgttcagctactggacaagactgcccattgtgggcattttcttctggctcctgtttcaagtcgtcgggttcttttttggcgtatccaacgaacaaggctcgctggccactctaaaatgcgcattggaccctgcgttgtcggtcgagacagacaacgggaagtacttcaccacgggggggaaagaatctaagtcgagctacgtttccaacaacgtcgatgacgcagcttcgacctggatctggaccgtccatcagctgagggaccgcggattcgagatataa

SEQ ID NO: 2461 - DNA, 2037 bp, Saccharomyces pastorianus
atgagtgattatggtcctttgggtattactaacttcattaccccgtacgacctatgtatattgatccttatacatgtacattgctcgcaagataacggcatagcggtgcccacagaagtctttcttcaattgatatcacccacgaggccatcaatagaatggaaccctctactcaaggacaatagtaatcttcggcctgcttctgctgttctacctcctatactgcctatactggaacacgtaataaggatattgctggatgaaaagaacaataacaaagtggccctgacactaatgggctatttagaagccattgatgggttggattcaatcaatagattgatgatggatttagagaaaaactgtttggtcaataatcataggtcgatgaaaatgcgtacaacaataacaagaagacaaattacaaaggcaagttttttagggacatttttatcaacatgtttacggaagtaccaatttggagattttgagatgagagagacaatttggatgaatttggagagtttcaaatctgtttttaaaaagacttcattgtggctgaaatttaaggatagcattcatgttcaaaaaataaaacagtgtcttttggccgacactgaaacttctacggaggatcaagatatgatggaattctttcagcatttcaatggaagtggtgatgtcaattcaaagaccatgaacgaggaggtgtatggaactttaatttctatccaacatttgcaatcaatcgttaactggcagatcatgaaatggttggataatatagatgatggtgaaacgccatataaacagcaataccaactggttttcggtttattaaatacgctttcgttaaatgatgctacaagatttccattggtattcattctgaaatatctgaaggctatcaaagagaatagttaccaaattgccttagattcattgcacaattatttcgattacaaatcaacaggtaattcacaaaactactttcatatttctcttctgtgtcttgcaaccttccattcaagtttcaatgagtgtgatgcagccatcaattcttttgaagaagctacgagaattgcgagagaaaataaagacatggaaacattgaacttgattatgatttggataataaactttatagaggttcatccggaatatgccaataggttctatatcactgtggaacagatcataaaatatctgaaaaatagttctgatgtagaagatgccaacattttcagtaatgcctataaatttgaaacattattatccatagtaaaggaatccaagacgattgacgtttccaactcacttttgaaatttatggctatatcgctgcagaatgtgccgtctcaaaacatcgatcttttccaaagtctgcttgggtatgaaataaaattctggaaagaactgggctatggctccatatcggatgtgtatgaaaaatttgttttgccaacttcttcttcatctttgaggaatcatgacgattatatcataaaccgagaaataaaaacagcattcaaatcacttgaggaggaggatttttcaaaagtcaagcaatgtcttttgaaatcagaatcacctaaacttgattacgaacagaaaacaaagctgaaatacttaaaagtaaagtacttgacacgaataggtgattacgaccaaagtatgcaatcgatcaaccagtacattaaagattgttgtgaggaggtcatggattcgaattggaggttcaaattcgaaatcgaaagtgtcgaagttttgcttttgaataatgtaggtttaagaggtttaccggaggtaatgctattaatcgataaatacaaagagataggaaatcctttacggtgcatgatattgttgatcaaattgtgtgagattctcatccaagtagggaaaagtagagaagccaaatctttggtcgactgtaacttgttcggcctattagaattcccacttgtgagagggcaggtaaacaaactactaaagttttttagcgtagaagaggatagggatattcaaatgaattga

SEQ ID NO: 2462 - DNA, 1338 bp, Saccharomyces pastorianus
atggcaaccctacctggcattgatgagcacaccgcgtctgaagaattgataactggagataatgaatggcacaaattggttattcccaaaggcagcgattggcaaatcgagcttaaaactgaaacaaaactgatgatcaaggtgaactcaggcatagctgaaatatttggcactgaattggcactagaagaggaatacaccttccagagctggaagtttcccgtatacgctgttgaggaaacagaactggcgtggaaatgcccggacttaacgacaaatgcgatttcaataaagcataatcatactatgaaatatatatataatctgcacttcatgttggagaaagtaagaatgtccagttttgagggccctcgagtggtgattgtcggtaattcgcaaagtgggaaaacctccttatcaaggacattatgttcatacgcgctgaaatttaactcttatcagcctttatacatcaatctcgatcctcaacagcctactttcaccataccgggatgcatatctgccactccgatatctgacatacttgacgcacagctgcccacctggggccagagtctcaccagtggtgccacactgctgcataataagcagccgatggtcaaaaattttggcctggaaagaatcaatgaaaacaaagacatatatctcgagtgcataaaccaattgggccaattagtgggccagaggttacatacggatccacaaagcaggaggtcagggtgcatcattgatactccatcaatagcacaattggatgaaggcttgggtgaactacatcatatgttcaagaaattcaacgccaacattttggtagcactatgcccggaaaccgatcctctatgggagaaaattaaaaaagagtttggtccagaattggggaacaataacatctttttcattcccagcttagatggtgtctcttccgttgatgatgtatataagagatccttgcagagattatccataagagagtacttttacggctcgctgaatacagctctaagcccttatgcaattggcgtagattatgaagacgtcacgatctggaaacctagtaacgttttcgataatgaggttgggaaggtgcagctgttccctgtaacaataaccccaagcaatctacagcacgcagtcgtagctataacattcgcggaaagaagagcagatcaagcagctgtgatcaagtcgcctgttttaggatttgccttgatcacagaagttaatgaaaagagacgtaagctaagaattttattacctgtgccaggacgactccccaacaaggcgatggttctaacctcgtatagatacttagaatag

SEQ ID NO: 2463 - DNA, 915 bp, Saccharomyces pastorianus
atgcttttgtttaagcttatttccccaaaggtgcttgtcgagttagtagccagtaaaaaggttaacagagtcattccggtggatgcgacatggtatctgcccatttggaagcttgatagtaagcaggatttcctgaccaagccacgtattaaaaactctatctttttcgatatcgatgcaatcagcgataccgagtcgccctatccacatatgttccccccaatacaggcttttaatgatgcgatgagtaatttgggggttcagaaagatgatattttggtggtttatgaccgagttggcaatttcagtgctccaagatgtgcttggacattgggagtgatgggacatcctcaagtgtacttgttaaacaattttaacgagtaccaagcgctcaattatcccctagactctactaaggttaccgcgttttctccttacccaaagagccgctatgaagctactaaggacttgagggacgaagaagttgtagactataacgaaatgctggagttggtaaaacgtggtgaattggccaagaaattcaactttttcgatgcgagatccttaggcagattcgaaggtacggcaccggaaccacgtccagacatctcatctggacatattccaggtgctcagccattaccttatactgaactgctagacccggagaccaaagtgtacccagaagatggagaaaccatgcgtgccatggtggaaaaggctttaaaaaaattgcagtgtactctggacccaaccaaaccaactatttgctcttgtgggaccggtgtgagtggagccattatcaagacaggtttggaattagctggtgttccaaatgttaggttgtacgatgggtcttggaccgaatgggtcttaaagtctgaccccaagctgatcgctaagaacagagattaa

SEQ ID NO: 2464 - DNA, 531 bp, Saccharomyces pastorianus
atggcccgtgatatatgtaccttggacaatgtttatgccaacaatctgggtatgctgattaaattggctaatgtaacagttccagatatatacgaggatgcatttttcactgagttattcgcagaagatacctcaatgacaaaaaataaaaaggcaaactcaaaaaaagacgtacgtttcacacagctggcttattacagtgaaatcccagttggtggtctggtggctaagctagttcctaagaaacaaaacgagctatctttaaagggtattcaaattgagtttttgggtgtgttgcctaattatagagataaatccattggctctaaattattgaagttcgcagaagacaagtgctcggaatgtcatcaacacaatgtgttcgtttatataccggcactaaataactctgccaaggaatggttcatagctcatggattcgaacaacatggcgacgtttttaacaatttcataaaacgtgtaaatggcggcgagcaagatgccattctattgaaaaagcatatttcttaa

SEQ ID NO: 2465 - DNA, 1977 bp, Saccharomyces pastorianus
atgcccacaaattacgagtacgatgaagccagtgagacgtggccgtcatttgtcttaacagggatcttaatggttgtcggacccatgacactgcttcaaatataccaaattctttttgggtccaacgctgaagcagtgggttcaggggacgcgaaagaattcaatgacgaagtcttgactaagctgaatgacgaatacaccagtaacgaaatcaaacaattcaggaaaaaatttgacaagaatagtagtaagaagtccaaaatatggaacaagaggaatatcttaatcatcgttggctgggtcttggttgcagtacttctgcaaaggattaacagtaacgatgcaatcaaagacgcagctataaagctattcgatccttacgaaatcttgggtatatcctctagtgcctctgacagagacattaagtcggcttacagaaaactatctgtcaaattccacccagataaactagctaaaggtttgacaactgatgaaaaggacgtgatggaggaaacttatgtacaaattacgaaggcttatgaatcccttactgatgaattggttaggcaaaactatctgaagtacggccatccagatggtccacaatcgacttctcacggtattgctttaccaaggttcttggtggatggaagtgcatctcccttgttagtcgtctgttatttcgcactactaggtttaatcttaccatatttcgttagtaggtggtgggcaagaactcaatcttataccaaaaagggaattcataacgtgactgcttctaatttcgttagtaacctagtcaattataaaccatctgaaatcgtcactctggatttaatcttgcattggttatcctttgctaatgaatttaaacaattttacccagatttacaaccagaagattttgaacaactactacacgaccacatcaaccgtaaagatagtggtaaactcaatgaagccaaattcagaatagtggccaaatgccactctttactacatggtttgatagatattgcttgtggatttagaaatttggatattgcgttgggtgccatcaatactttcaaatgtattgttcaagctgtaccattaactccaaacgctcaaatccttcaactgcccaatgttgataaaaaacatttcagtaacgaatcgaaggatgttcatacactgggtaaactgtttactttagaagattccaaaattggtgatcttcttggtataaaagatcaagcaaaattaaacgaaactctaagagttgcgtcgcatattccaaacttgaaaatcatcaaagcggatttccttgtccccggtgagaatcaggtaactccattatctaccccatatatttgcctaaaagtactagttcgttctgcaaagcaaccgttattaccaaccaatttgattcctgaagacaaattagtggaatcgcaggattttgaatcccaaagagatccgtttgctattatgagtaaacaaccattggttccattttcatttgcgcctcttttccccacaaagagacgttgtaattggtgctgtctggtaagttctcaaaaagatggtaaattgctccaaacaccaatcattgtcgaaaaattatcttataaaaacttaaatgatgataaagatttctttgacaaaagaacaaaattagacttgaccaaagatgacaaattcaatataaatgactgggaaattggaactattaagattccattaggtcaacccgcacccgaaactgtcggtgatttctttttcagagtcattgttaagtctacggattattttaccacggatttggacataaccatgaacatgaaggttcgtgatttaccagctgtggaagaacaagtagacatctattctgaggaagacgatgactactctagtgatgaggatgaaagtgctgctagtgattataccgatatcgacactgataccgagactgaagaggatgaatctaccgaatag

SEQ ID NO: 2466 - DNA, 486 bp, Saccharomyces pastorianus
atgagtaaaaatagatcgtcactacagtccgggccattgaacagtgagttactggaggagcaaaagcaagagatatatgaggcgttttcgttgttcgatatgaataatgatggctttcttgactatcatgagttgaaagtagcaatgaaagccctggggtttgaactacccaaaagagagatacttgacttgatagatgaatacgatagcgaaggacgccatctgatgaaatatgatgatttttatattgtaatgggggaaaagatattgaagagagatcccctggatgaaataaagagggcgttccaattattcgacgacgaccatactgggaagataagtatcaaaaatttgaggcgcgtggctaaagaactgggggaaacattgacagatgaggagttaagggcgatgatcgaagagttcgatctcgatggcgatggcgagatcaatgaaaacgagttcatagccatttgcaccgatagttaa

SEQ ID NO: 2467 - DNA, 654 bp, Saccharomyces pastorianus
atgtcgtggagatatgcgctgaaagcttacgttaccaatcctgaaacagtagatgatggtgcgatgatttactttgatgacaaagtgtccatcatcaaggactcatttgctaaatcggagtgccatttattagtattaccacgatctacacagttaagtagaggtcaccccaccaatataatcgactctaagttcaaaaacgagtttgagccatacatagattctgcaatcaactacattttcaaacactttcaagaaaagttccgaattaagaaaggtgatgacaatgagccaaattgggaagatgatatattacgtgaaaaagacaaatttataagcaaatttatacagatagggatacactccgtgccctcgatggccaatttacacatacatgtaatatccagggatttcaattcgttaaggttgaagaacaaaaagcattacaattcatttaatactggatttttcattagttgggatgatttaccactgaatgggaaaaaagtaggaaatgataaagacatcgaaaccaaatatttaaagaaccatgatctggtttgttgctactgtcaagaaaacttcagtaacaaattcagtttgttgaagaagcatttagagctggaattcaataagcattttgagctcagatga

SEQ ID NO: 2468 - DNA, 1314 bp, Saccharomyces pastorianus
atgagtgaagaacaggaccctctattagcaggattgggagaaacacccatagacagcggtgcccaacaacaacaggaacagcaaccagagcagccacaagaggcagagggacaacgtgaggaggaacctccaagactggaccctgaacaggaggcccataacaaagccttgaaccagtttaagagaaaactgctagagcacagaagatacgacgatcaattgaagcagcgccgtcagaacatacgagatctagaaaagttatttgacaagaccgaaaatgacatcaaggctctacaaagtattggccaattgatcggtgaagtcatgaaggagctttccgaagagaaatacatagtcaaggcctcctcgggtcctcgttatatcgttggggtgaggaattcggtggaccgctccaaattgaagaaaggtgtgagggtcaccttagatatcaccactttaaccataatgagaatcctgccaagagaaacagatcctttggtgtacaacatgaccagctttgagcaaggtgaaatcactttcgatggtatcggtggtttgaccgaccaaatcagagaattaagagaagttatagaactgccattaaagaacccggaaattttccagagaatcggtatcaaaccccccaaaggtgttctgctatacggacctcctggtactggtaagactttactggccaaggcagttgctgccaccattggcgctaacttcatcttttccccagcatctggtattgtagataaatatattggtgagtctgctcgtattattagagaaatgtttgcatatgcgaaggaacatgaaccttgtatcatcttcatggatgaggtagatgccattggtggtcgtagattcagcgaaggtacctccgccgatcgtgaaatccaacgtacactaatggagctattgactcagatggacgggtttgataacctgggccaaactaagatcatcatggctacgaacagaccggatactttggatcctgctcttttgagacccggtagattagatagaaaactggaaattccattaccaaacgaagctggtagattagagatttttaaaattcatactgcaaaagttaagaagacaggagagtttgatttcgaggctgctgtgaagatgagtgatggttttaatggtgctgatattcgtaactgtgccactgaagccgggttctttgccataagagatgaccgtgatcacatcaaccctgaagatttaatgaaagctgtaagaaaagtggccgaagttaagaagttggaaggtactatagaatatcaaaaattatga

SEQ ID NO: 2469 - DNA, 1044 bp, Saccharomyces pastorianus
atgccttttgctcagattgttattggcccaccgggttcagggaagtccacatattgtaacggatgttcacaatttttcaatgctattgggagacattcccaggtggtaaatatggatcctgccaatgatgctttaccttacccgtgtgctgtggatattagagactttataactctggaagagatcatgagagagcaacacctgggccctaatggtggtttgatgtatgccgttgaatctttagataagtccattgatttatttatactacagatcaagtcacttgtagaagaagagaaggcgtatgttgtgtttgactgcccgggacaagttgagctgtttacgcatcattcttcattattcagcattttcaagaaattagaaaaagaactagatatgaggttctgtgtggtgaatttaattgattgtttttacatgacatctccttcacaatatgtctctattttgctactagcattaaggtctatgctaatgatggacatgcctcatatcaacgtcttttcaaagatagatatgttgaaatcatatggtgaattgccatttagattagattattacacagaggttcaagatttggattatttggagccgtatattgaaaaagaaggttccggtgctctgggaaaaaggtatagtaaattgactgaaacaatcagtgagctggtttctgatttcaacctggtttcctttgaagttttggctgtggatgacaaagaaagtatgataaatctccagggtgttattgataaagctaatggatatatatttggtgcatctgaagtgggcggtgacacggtttgggccgaggcctcgagagaaggtgcattgctcgcaagctatgacattcaagataggtggatagataataaagaaaaatatgataaagaagaagaagagaaacgggctgcaatgttgaaagaacaagaactacaaaataaagaagttaatatagacgaagaagacgagtggcagagtgcactaaacgactgggaggaaaaacaaggcacagattttgttagatag

SEQ ID NO: 2470 - DNA, 321 bp, Saccharomyces pastorianus
atggcacccacacaattggaaatcaaagtcaaggctttaaagaggctagtcaaagaagagggttactaccaacaagaactaaaagatcaagaagctcatgtggcgaaactcaaagaggataaaagcgttgattcatacgatttgaaaaaacaggaagaagttcttgatgataccaaaagactactgcccactttgtatgagaagattagagaattcaaagaagatttggcacaattcctagaatcgtaccaaggtactgaagatgttagtgaagcaaagactgtcattacctctgcacaagaattagtcgcatctaaataa

SEQ ID NO: 2471 - DNA, 2079 bp, Saccharomyces pastorianus
atgcccaatctattgtcaagaaaccccttccacggtcatcacagcgatcaccatcatgatcgtgataattcgtcctctaacaacccgccgcagttgattagaagctctaaatcttttttaaacttcattggtagaaagcagagtaatgactcattaagaagcgagaaatctacagattcgatgaaatctaccacaactaccaccaactacaccacatcaaacatcaacaacaactcccatagccataccaacacaacaacaatttccacaaacaataataataacaataacaataacgaaacacaccaccatcataatgtctctcacgcactccatgactacacttctccagcatcaccgaaacaaactcactccatggccgaattgaaaagattttttagaccctctgtaaataaaaaactatctatgtcccaattgcgttcaaaaaaaaatagcactcattctccaccgccatcaaaatcgacttctacagtcaacttaaataaccactatcgcgctcagcacccccacggttttacggaccattacgcccatactcaatctgctataccgccgagctcagattccatcctgtctctgtcaaataatatcaacatctatcatgatgattgtatcttggcccagaagtacgggaaattgggtaagctactgggttccggtgcaggtgggtccgttaaagttcttgtgagacctactgacggtgccacttttgccgttaaggaatttagaccaagaaaaccgaatgaaagtgtcaaagattatgccaagaaatgtaccgcggaattttgcataggttccacgctacaccatccaaacgttatcgaaacagtcgacgttttctctgattccaaacaaaacaaatattatgaagttatggagtactgtcctattgatttctttgcagttgtcatgacgggtaaaatgtctcgtggtgagatcaattgttgtttaaagcaactgaccgaaggtgtgaagtatttacattctatggggctagcacacagagatttgaaactagacaattgtgtcatgacttctcaggggattttgaagttgatcgattttggtagtgctgttgtatttagatatccttttgaagatggcgtaactatggcccacgggatcgtgggtagtgatccttatttggcgcctgaagtaatcacttctacgaaatcatatgatcctcaatgcgtcgacatatggtctattgggatcatatattgttgtatgatgctgaaaaggttcccatggaaagctcccagagattccgatgacaatttcaaattgtactgtatgccggatgatatagaccatgattattcggaatcagccaaacatcatgaagagttattaaaggaaagaaaggagaagcgccaaaggtttttgaaccacaatgactgctccagtatcagtcaacagccaccaatccatgaatcggattcaaagccggctcaaaatcaaatcccaaccccaacacctacacaagataataagaacagtaataaacctgagattgtgattgaaccagaagccggacaaaaagaagccgaggacaatgataacgatgacagcaataatgataaggaaagtacgccagctaacgacaaagcaagcactaaaattaatgttattgcggacggaaatgataatgatggtacacaagctccagtagacgccgacgttaacgccaatgtgaacaagaatgttaatgcagataaagctcctcatggacaacaacagcaccacgacagacgccatagtaattctccggacaataaattgatgcaacaacataaaggtcctcatcataaaaagatcattcacggcccataccgtttgttacgtctattgccacatgcttcaagacctattatgtctcgtattctgcaagtggatccaaagaagagagctaccttagacgatatttttaatgatgattggtttgcctctattgccgcttgtacgacggattctaaaaatgcaactattagagcacttggtcaccatcatacgttggttagagaggaaaacgctcatctagaaacctataaggtttaa

SEQ ID NO: 2472 - DNA, 984 bp, Saccharomyces pastorianus
atggcatcatcagtccccgggcccatcgaattgcccgcatcccgctatgatctctccacgtactggggcagaatccgccattgtgcaggaatctccgatcctaccatgttgctcaccagtgagaaggacctggcgcacgccaaagaaatcatcagtgcgtaccgccatggggagttgaaggagaccacgccggagttctggcgggctaagaagcagctggactccaccgtgcatccggacacaggcgagacggttcttctgcccttccgcatgtcctccaacgtgctgtccaacctggtggtcaccgtcgggatgttgacccctggtttgggtaccgcaggtaccgtgttctggcaatgggcgaaccagtcgttgaacgttgccgttaattctgcgaacgccaacaagtcccatccaatgtcgacgtcccagttgctcaccaactatgccgctgcagtgacagcgtcgtgtggtgtggcactcgggttgaacaacctggtgcccaagttgaaaaacatctccccacattcgagattgatcatgggccgtctggtgccctttgccgccgtcgtgagtgccggtattgtcaacgtctttttgatgagaggcaatgagatcagaaagggtatctctgtgttcgacgcaaacggcgatgaggtcggaaaatcgaagaaggctgccttcatggctgtcggggagaccgccctgagtagggtcatcaacgccactccaacaatggtcattccacctttgttgttggttagactgcaacgcggtgttttgaaaggtaagtcccttggggtgcaaactttggctaacctggcgttgatctcagtcaccatgttttccgccctgccttttgctttgggtattttcccccaaagacaatcgatccatttgagcaaactggagcccgaattacatgacaagaaggacaaggacgggaagacaatcgaaaaagtctacttcaatagaggtatttag

SEQ ID NO: 2473 - DNA, 1383 bp, Saccharomyces pastorianus
atggcggaagataagtcgcaggtcaagatcaggtttttcactcgtgagaaggatgaagcattacatgtccaagaaacaccaatgtacgcacccatctctttgaagagatacgggctgtccgaagttgttaatcacctaatggactcggataagcctgttcctttcgatttcttgattgacggtgagctgttgcgtacttcattgcaggactacttgactaagaaaggtctatccagtgaaacttcgctgaatgtggaatataccagggctgtcctgccaccatcgtatttgaacagtttcagcaatgaagactggatcagttccctagacgtgggcgacaactcaaaacacatcatcagtggttcttatgatggtattgtccgtacttggaatctatcaggtaacgtgcaaaagcaatacagtggccattccggtcctatccgtgctgtcaaatacatctcgaacacaagactagtttcagccggtaacgaccgtactttaagactatggaaaaccaaaaacgatgacttgaaattgactccgcaacaacaagcagccgaagacgaagatgaagaagccaatattgaagatggtaagaccttggcaattttggaaggtcacaaggcaccagtcgtctccatcgacgtgtccgacaactccagaatattatctgcgtcttacgataactccattgggttctggtccactatttacaaagaaatgaacatcgtggatccattagaagacataaataacccaaataataaaatatccactgcagccaggaaaagaagaaagttgacgatgaaagatggtaccatcagaagacgtgctccactatctctattagaatcccacacagcccccgtggaacaggtgatttttgactccactgataacaccgtcggttattccgtatcacaagaccatactattaagacatgggatttggtcaccgctagatgcatagacacaagagccacatcgtactcgttactttccattgcacaattgccctccttgaacttgttggcgtgcgggtccagcgccagacacatcacattgcatgatcctcgtttaggggcatcttccaaggtcacgcagcaacaactaattggtcataaaaactttgtctcttcattggacacctgtcccgagaacgagtacatcctgtgctcaggttcccatgatgggactgtgaaagtatgggatgtcagatccacttctccaatgtacactatcacaagagaagacaaatcggttcaaaagggtgttaacgataaagtctttgctgtcaagtgggcagaaaaggtgggcattattagtgctggtcaagataaaaagattcaaataaacaagggagacaacatcttcaaaaattaa

SEQ ID NO: 2474 - DNA, 1287 bp, Saccharomyces pastorianus
atgctgcgagcgacacttaaagaatatttaactatgtctaagaaagttatagtcattgctggtaccacgggagtgggaaaatctcaactgtctatacaactagctaaaaaattcaacggtgaaattatcaattcagattctatgcaggtttataaagatatccctatcataacaaataagcatccgatttcagaaagagagggtattcctcaccacgtaatgagccatgtcgattggtccgaagaatactactcgcaccgttttgaaagcgaatgcatcaaggccattgaagatattcacaaaagaggcaagatacccatcgtggtaggaggcactcattactatttacagaccttgttcaacaagaaggtagaaacgcggttttcggaacgtgaactcactcaggaacaattagagattttgcaatctaatgaccccgatatcgtttatagcactcttgtggaatgcgatccggatatcgccaacaagtaccatcctaatgactatagaagagtacaaaggatgctggaaatttactataaaacgggcaagaagccaagtgaaacgtttagcgaacaaaagatctccttaaaatatgacaccttatttttatggttatatagtagaccagaaccacttttccaaagactagacgatcgtgtggacgtaatgcttgaaagaggcgccctacaagaaatcgagcaattgcacgaatattacaagcaaaataatttcactccggaacagtgcgaaaatggtgtttggcaagtcatcggcttcaaagaatttttaccatggttaacaagagaacctaatgataccactgtgaacttagcagattgtatagagcgaatgaaaacacgtactcgtcaatatgcaaaaagacaagtgaaatggatcaagaaaatgcttatacccgatatcaaaggtgatatttacctgctggatgccaccgacctctctcaatgggacgtcaccgcttcccaaagggcaatcgccatttccgatgactttgttaataacttgccggtgaagcaagaaagagcaccagaagccctaggggagctattatccgagggagaaactacaatgaagaagttggacgattggacccatttcacttgcaacatatgtcgcaatgcggacggtaaaaacttggtagctatcggtgagaaatactggaatatacatttgcgcagcagaagacataaatctaatttgaaaagaggcgcacgtaacgccgactttgaaaaatggaaagtacacaagaaggaacctgctgaataa

SEQ ID NO: 2475 - DNA, 1986 bp, Saccharomyces pastorianus
atgagtgagcttcttggtattccgctcaaacgtactttagaagttgattttgtcacagagctgtcaaaactaatcgatgctacatcctttcaaactgcatcctttttccaatcggatatatctaaagtcgctgccgcaaggaacaatgccataactcctgatatctcagatagtggactcgatgctttgaaaaagtactacgcgattctgcttcaattggagaagaagttcccaaacaatcagattgaatttaaatggtttcaaacattatcacagaagtcacatggttgtggccaatattcattgcaatgggaaaaattaaccatcatttataacattgggtgcatgtattcattgttggcgttggatagcaacagcgattcggcagaatccttaaaaaaatcatgcctttacttccagattggcgccgggtgctttaagtatgtactggaccatcaagcaactctcaagacagagacagtagttgatgattcgacagctaaagcattgacctcattaatgctggcacaagcgcaggagtgtttttggttcaaagctgtacaagataaacataaagactccttgatcgcaaagttatcacaacaaatcgtggacttttatgctgaatccataagggactcccagaaaggtaaactcatcagaaatgattggaccaatcacttgaaggctaagaaggcctattttgatgcagtgacttattacagaatggcattgtcttttaacgaaaagaagcagttcggtagcatggtgaaagctttgcagaccgcactaaaatttgttaatgaatcaacgttatcttcaaacgcgaagttcaaaactgtgattgaatctgctctgaaagaagctcaaagggacaatgatttcatttacttgcaacaagttcccactgagttaccaacgattcaaccggcttctatggttaaaccaactcccaccgtaggcttattaccatccatcggcgatagcgagctgttgttcaaagacctaattccgatagaggttatggattattgtacggcttataatgaaaggcaagataagtacattgaacaacgtgttacaaaccctctcacttcgttaaataaattactcaaggagtccatgactaccttccaaataccacaggaaattaaaacaattagcgaaaccgaactaaaacaataccaagcgtcgctcaataatcttcaagtgaataataaaaatatacaaagtgaattagataacataactaatattttgaatgaagaagccttgagtgataaccaactccgactaaagcacgggactctacattggactttacccgaatcatcaactatcaacgcaatatattacgataaattgaataaactcaaagaatacatcaatcaaggtagtgcgattgacaaacaaacgaatgtgctgtttcagaccattgacaaagctttgataacatcggagatcaaattaccggtatccaacgaccccttaacaaataaaatcaaaaatgtcatacaggagagaagcgagcatattgaaaagacgaagcgtaggtcttctgaatatagaatacttccaaaaattatttcatcgtataaaaaaaatggcacaacagactttgaacccattttcatagaacatttgaagtattttgatgaagatctgagatacgttgatagtacgaagcaagaaaatatgaagttgatccatgagatacagtttaaggaggagaatacaacaaataaaaacggtgtaaaaaccaaaaaaatggaaagaacagatcccagagagttatatattgaagatctgaaatattctctacggttgctcgaagaggtaaaagataatctaaatgccgggaccaccttttatgaaaatttaatcaactctacaaacacattttgcaatgaagtacgagagtttgatgagacaagaagaattgagaaaacaaagcttgatgaaagcctcatacttgaagggcaataa

SEQ ID NO: 2476 - DNA, 939 bp, Saccharomyces pastorianus
atgagtacaaataaagaaataataaggaataatgacttgcgaggtttgattgacgataagaggaagttagtcaatgaaataagagaatttgaaaaatctattaaacctttagagtttgaatcataccaggattattttcttattaaaacgtttagaagaggaatttctgcaagtggtcatgtagatattgatagtttgagaaacaaagaatatgggatttactataaaaagattaagagaagctccacacaagatgttggcgaacctatcccatccaacccttcctcttcatcctcttctaccagatcaagctcgtcaattgacatgagtgatacagaatattcaggtgaaaacacttctgctacggctgacaataatcccagtggtagaagaagacgcaccaggtcacaagttacacaaagggaaaacagtgtatcaataccattgccctcgatacgtgaagccaggatagatcatgacgatgaggaaatttcagcgacagatagtagcgaattgccatttcctgttccaatttcagaagttgagaacatcgacattggttcagatatcactgagagagacagcatcagaagaaggtcatctagaatatcagaaagggacaaaaggcgttctgagtctaggcccgattcagacgtagatgaagaaggcgacgaagaagacacgggcgaaggagagactaaaatccaagacctctacgaaagtctggtacctaaaattctggagccacgtaggagatcagattggattctgcccccaagggcaagatatacacctgagaagcaaatgaggaccaaaccgtcgtttaagagtataaagattaatgagctggttggaaataaaaggatacgaagtatattatctaggttcgaaggtggcgtcgcaggtatacggaaaagagattgggattcaacccagtaa

SEQ ID NO: 2477 - DNA, 858 bp, Saccharomyces pastorianus
atgcaaaacgagccaatgtttcaggtccaggtggacgaatctgaagatagcgaatggaatgatatcttaagagccaaaggtgtgatacctgagcgtgcaccctcacccacagcagaactcgaagaagcattagaagaagcacttgctaaacaacatgaaaacagattggaggacaaagacctatctgacttggaagaactagaagatgatgaagatgaggattttttagcagcatataagatgaaaagattaaatgaaattcgtaaactacaagaacgttccaaatttggtgaagttttccacattaataagcctgaatacaacaaagaggttacattggctagtcagggaaaaacacacgaaggcccaaaaagcgacgataatggcgaagaaaataatagcggtgtctacgtgttcgttcatctatcattgcaaagtcagctacagagtagaatcctttcccaccttttacaatcagcagcatccaaattcaaagacataaagtttgtagaaatacctgccaacagagcaatcgaaaactacccagaatccaattgtccgactttgattgtgtattaccgaggtgaagttgttaaaaacatgataactttattagagttgggaggaaataattccaaaatgaaggatgttgaagattttatggtaaaggtcggtgccgtatcagagagagacaacagactaattataaatcaagatgatgaagaatcaagagaagaaagacaattacatttcgctaacaagaaatcgatcagatcaggcataagagggaaatttgatgtcggcataggtaatgacggtggtaatatcaacgatgatgatgacgggttttttgactaa

SEQ ID NO: 2478 - DNA, 693 bp, Saccharomyces pastorianus
atgactaaggaaataccatattattccgataacgacgataataacatcattagactattcatcattagacatggacaaacagagcataacgtgaaaaaaatactacaaggtcacaaagatacctcgattaacccgactggggaagaacaagccactaaactaggacattatttacattcaagaggtattcactttgataaggttgtgagtagtgatttaaaaagatgtaggcaaacgacatctttagttttaaaacattccaaacaagatgatgtgcctacatcctacacttcaggtttaagagagcgttatatgggtgttatcgaaggtatgcagatcactgaggccgaaaagtatgctgataagcatggtgagggttcctttagaaatttcggcgaaaaaactgacgattttgttgccaggttaactggttgtattgaagagcaggttgccaaagcgtcggatgaaggtgcaaagaacctagcgttagtgagtcatggtggtgctattaggatgatattgcaatggttaaaatatgaaaacaagcatgcccataagattattgttttcaacacctccgtcactatagttgactatattaaagattctaaacgattcgtcatcagacgtgttggtaacacccaacatcttggtgatggcgaatttgtcgtaagcgatttgagattacgttaa

SEQ ID NO: 2479 - DNA, 732 bp, Saccharomyces pastorianus
atgcaatattcaaaatatgagggcgcacacgatggcaacgacacagtagtcaattgctcagaagatgaagctctcgagaatgatagaatcatcctgggttataaaaagagattgataaaaattgaagtccagatgcaacaccttttagatgatttgaatttggatccgcatcagattgaaccaagtcttattgctttgcagaaacaccatgacacatttcaacaacttctacaggaaaggaagaacactttgcaagggcaaaattatgctcatcagcccagacaagaaagtatcgataatcaaggaccagtagggccaaggatgaatctaggcgacaaattcatgaaatttcaacagagcaatgggcaattcttcgatgaagagcatattttaaggattctgcaaaaaaatacagactttaaaaattattttcaagtcgacaaaaatattgagcaaaaggtactgctactcgcaatgtaccattgcctcaacgggccaacgcgcttacaccaggtattgaatgttgatggaatcatacataatagcagtattagaaccatattgggaaaacaggtgtctagttccaaatggactgtgtttctgtatgacgtaaaattagctctgctggcacataagccggatgtgccgaacctggaaaccagtaaaatggtcgtcaggtatggtgatttatttccttgtgcctcgtactttaaagatcatccagcatactaa

SEQ ID NO: 2480 - DNA, 420 bp, Saccharomyces pastorianus
atgtggaaggctgtattgaatgcttggaacggaaccgataatcaaagtgatgtcgtttcgggcattacctcttataaatttgaagacatgaaaagaattgtggaaaaacatgaccccaatgtagtgttggtagacgttagagaaccatctgagtactctgtggttcgtattcctggctctattaacgtgccatatagatcgcaccctgatgcgtttgccttggactcgctcgaattcaaggaacaaaccggcattccaaaacctgacactgaaaaagaactgattttctattgtgcatctggtaaacgtggagatgaagctcaaaaagttgcccacaccaatggttattcgaacacttcactttaccctggttcaatgaacgattgggtcgctcatggaggtgacaaacttaatatttag

SEQ ID NO: 2481 - DNA, 450 bp, Saccharomyces pastorianus
atgtttagacacagtacaggtatactctcgagaacaatctcagcaaactcgccttcgctaatcttgaggacgtttacaacaaaggccccaaaaatttatagttttgaacaggttaagaatctggtggaacatcctaatgatacaaagctactcgttgacgtgagggaacccaaagaagtggaagattataagatgccaacaacaataaatattccagtaaacagtgcccctggtgctcttggattgcccgaaaaggactttcacaagatctttcaatttgataaacctcctcaaaacaaagagttgatttttctttgtgcaaagggtgtaagagcaaagactgcagaagaattggctaggtcttatgggtacgaaaacaccggtatttatcctggttccatcactgactggttagctaagggtggtgccgacgttaaacccaacaaataa

SEQ ID NO: 2482 - DNA, 966 bp, Saccharomyces pastorianus
atgctaatccatcatatttataagtttcttctaagtcttttcattattgatttagtgaaagctcagagcttttacgactctgatttgcacatacttgaactaacaccgaagaactttgataaagccgttcataatacaaactatactacactagtagagttctatgccccatggtgtggccattgtaagcagctgtcaagcacatttcgtaaagcagcaaagaaattggacggtttagttcaagtcgctgcggtaaactgtgacctaaacaaaaataaaggtttatgcgctaaatacggtgtcgagggattccccacattaaaggtattcagaccccctaaactggatctatccaagccaatgactgatgccaggaacagtttcaaaagtcattctgatgaagcatatacaggcgcaaggaccatcgcgcctatcgtcgacttttctctttcaagaataagatcatacgttaagaagcttgtccgtatagaaaaacttggatctctgctcgaaaaatctcccaaactttccgtagttttattttccaaacaagacaaactttcaccagtctataaaagtattgctcttgattggttgggcaaattcgatttttattctatcacaaacaagaagctgatggaagtagctggtgtgagtccaccttatgaaaaaattccaaagattttcaaatatttgcaggaaatggttcctgaacaacaacacagcgaaaagagtaagctggtcgttttcgatgctgccaaagatgagttttgggagtacaacgaaagtgcaatcaacaaacttggtgtttctaaatttttccacgacacttttgatatttcgccaaacgaaggcccgctcagtaaacgcttcgaatatatcaattatttaaagactggtaagaaaccaagcaagatgaagaattttcaaccaagaagcaaagacgtcaagcatgacgaattataa

SEQ ID NO: 2483 - DNA, 5109 bp, Saccharomyces pastorianus
atgaacataccacagcgccaattcagcaaggaggaagtcaaccgctgctatttgagatggcagcagttgagaaacgagcacgggatgaatgctccaagcgtaccagagttcatatatctgaccaaagttttgcaagttgctgctaagcaacaaccagaattgcagatgcagcgtcgacagcaaggtatgtcggtttcccagcagaacactgcctcagcttctccgaaccaagtagacttgccaaataatacggcctcgcacatctctgcttccgcttctccaaatctggctccaaatatgccattgaatggcagtgagccctttgctactactgctcgccaatcgccaatcatgtccgcgcctattccgctggacaataatagtaataataacaacattccagagcaacgacagtcctcgatgacctcattaaatggaaataacttttcacagccggcagcgaacaacgtggaaaatgttgctgacaagccagcgaacactacccataacggctataacccgaatatttccgaaggacagccccaaagtggctcgctgcgggaccatactatgcaagatttaaatgcgcttccaggttctcaaataaattccccgatgcctcagcaaacgcagatgcaacaggcccagtttcaagcacagcaagtgcaattccaagcacagcaagcacaacaaacgcaagtgccgccacaacagggaagaagattgcctatgacaatgttcactgcagagcaatccgaattattaaaagcccaaatcacatctttgaaatgtttagtaaataggaaacctattccacttgaatttcaagccgtcattcaaaaatcgattaatcatcctcccgatttcaaaaggatgctactgtctttgagtgagtttgctaaaagaagacagcccgtagatcaaaatggccaattaaataacaacaagagcaacggcatgcaacaacccactattgaggctgaacataataatatcaacctcgatcaaactgcgtccgaagttgcaaacaatacacctttgggagataaaaatgttgatgttacatccgttccatttattgggccttccaacaaacctgacgtaaatagtccgtccgttaaaaacttacaagctgtaagtaatactcaaacagcacgggccaattcgaagatagaggagaataaggctagcttaaatgaagacaaaaccgtatccattagcgataaaatactaaccgaacaaaacaagcctccaacaccgcagaagcctgttcctttgaatgttcttcaagaacaatataaagaaggtataaaagtggttgatatagacgaccctgatatgatggttgactcctttacgatgccaaatgtctgtcaaagtaatattgattatctgactttactagctaattctgatcatgcaagatttctgattgaacctggtgttttaccggttggtatcgacacgcatactgctactgacatttatcaaactttaattgcgttaaatcttgatgctacagtcaatgattgtctagacaaattattggatgatgattgtgagggatcagtcaaggaagacgccctttatgattattatgcgttgcaattgttacccctgcagaaagccgtaagaggtcatattttgcaatttgaatggcaccaaaattctttattgaccaacacacatccaaattttctatctaaaataagaaatgtcaacgcccaagatgcgttattgacaaaccagctatacaaaaaccatgaattactgaaattggaaaggaagaagcttgaagtggtagcaagattgaaatcgatgaataaatctgcaatcaaccaatataacaaaagacaagataaaaagaataaaaggttgaaatttggccataggcttattgccacacatgctaacttagaaagagacgaacaaaagagagccgaaagaaaggcaaaggaacgtctacaggcattgaaagcaaatgatgaagaagcatacataaaattattagatcaaacaaaagatacgagaattacacatttgctgagacaaacgaacgcgtttttggattccttgacgagggccgtgaaagatcaacaaaaatacaccaaagacatgattgattctcatataaaggaaacatcggaagaagttgaggatttatctatggtgccaaagatgaaggacgaagaatatgacgaagacgaggatagtgctaatatcgattattataatgttgcacacaaagtcaaagaagatattaaaaagcagccttcgatcttggttggtggcacattgaaggactatcaaatcaagggtttacagtggatggtttcgcttttcaataaccatttgaatggtatattagcagatgaaatgggtctcggtaagacaattcaaactatttcactacttgcgtatttatatgaaatgaagaatattcgtggtccatacctagtcattgttcctttatccacattgtcgaattggagcagcgagtttgccaaatgggctccgagcttaagagctatatcgtttaaaggttcgccgaatgaaagaaaatccaaacaggctttgattagggctggtgaatttgatgttgtcttgactaccttcgaatatatcatcaaggaaagagctcttctatctaaagtcaaatgggtccatatgattattgatgaagggcatagaatgaaaaatgcgcagtccaaactttccttaactttaaacacacattaccacgcagattatagattaattttgactggtacaccattacagaataacttaccggaactatgggccttactaaacttcgtgctgcccaagattttcaactccgtgaaatcatttgatgaatggtttaatactccctttgctaacactggtgggcaagacaagattggattgagcgaagaagaaactcttctagtcataagaagattgcataaagtactgagaccctttttgttacgtcgtttgaaaaaggatgtggaaaaggaattaccagacaaagtcgaaaaagtagtaaaatgtaaaatgagtgcactacaactaatcatgtaccaacagatgttgaaatatcgtcgcttgtttattggtgaccaaaataataagaaagtggtaggtttaagaggattcaataatcaaatcatgcaattgaagaaaatctgtaatcacccttttgtgtttgaagaagttgaggaccaaataaatcccaacagagaaacaaatgacgatatttggcgtgttgccggaaagttcgaactattggataggattttacccaaattaaaggcaacaggccacagggtactgattttttttcaaatgacccaaattatggatattatggaagattttttaaggtacattaatatcaagtatttaagacttgatggtcatacgaaatctgacgaacgtagtgaattgttacgtctatttaatgcgccaaactcggaatatctgtgctttatcttgtcaacaagagcaggtggtctggggttgaatttgcaaactgcagacaccgttattatttttgataccgattggaatccacatcaagatttgcaagcgcaagatagagcgcacagaatcggccagaagaatgaagttaggattttaagattgatcactactaattccgtcgaagaagtcattttggaaagggcttacaaaaagctagatattgacggtaaagttattcaagcaggtaagttcgataacaagtctacctcagaggaacaagaagctttattgagatccttgttggatgcagaagaagaacgtagaaagaaaagagagtctggcgttgaagaggaagaggagctgaaagattcagagattaatgaaattcttgcaagaagcgacggcgaaatggttacacttgccaagatggacgaagaaagatcaaagagggaagaggaactaggggcaagaagccgccttttggaaaaatgtgaattaccagatatctacagtagagatatcggcgcggaactcaagcgcgaagaatcagaatcagctgctgtttacaatggaaggggtgcgagagaacgcaagacagcgacttacagtgataatatgtctgaagagcagtggttgagacagttcgaagttagcgatgatgagagaaatgagatgagggcaaggaaactaagaaaagaatacgaggccaaaagtgagacagtcaatgaggatgctgagatcaagggtgaatacattgatattgaaaatggtgaagctgaaaataatcaagactccattgagcaccatgtagatacagatccggttatgaatgatgatgaatccatctctaaaaagagaaaagctgggagaccgcgaggaaggcctaaaaaagtcaagctcgagacacctgaagatggtgaaccattaacacttgaatcgagccccgtgactggcgataattcgccaagtgagggctttgtggacgttccaaaaccacaaactgcaggcaaaacatctgttaagtctgccagaacctcagcgaggggccgtggaagaggccggggtcgtggtcgtggtcgtggaagaggaagaggaagaccgccaaaggtaagaaatggccttgattatgttcgcacacctgctggtgccactactcctattgatataagagaaaaagttgccaaacaagcccaagcgttgtacgactttgctcttaactataaaaatgaagctggaagaaaactttccgatattttcttggctaaaccctctaaagtgttatatccggattactacttaattatcaagtaccctattgcctttgataatatcagtactcatatggatctattagcttacaactctctcaaagagacccttcaagattttcatttgattttctctaatgccagaatatacaatactgagggctcagtggtatatgacgactctttggaactggaaaaagtggttatggacaaataccatgagataatgggtgatgacacaccaatcagttttactgaatttgatgaacagtatgctactaaaccactagcgttgccccctattgtaccttcaaccctcgccgaatctcttgctgatgaggcggatgagaccatgacagaaacaagtatatag

SEQ ID NO: 2484 - DNA, 4419 bp, Saccharomyces pastorianus
atggatattccctcgccagatacaaatcctaatggtcacaggagcagtaggaaccgaagagctccaagggcctctttttcttccacaacgacagcttccactgcaacaacattaacatccgccacagtcttggaccaaaacaactcagaaccgtatgcaggcgcgacattcgaagccgtgccaagttccatcgtgtcattccatcatccacattctttccagtcaagtaacctcccaagtccgcgtttgtcgggaaatttcgaacaaagaggccgccggttgactgagtcagatcctctagtgttatcttctgctgaacagtcaagaagctcttccagaaatccctctcatttcagattctttacacaagaacaaatatttaatgccgaagggtcctcgacactagaaaatacagactatgacacggtatgggatgcagcccctgcttacgaacaagatagaatctacggcactagctcgtcctctagacgttcttccatgcgaagtttctccagaacttcgtccatgtcaaatgccaactcctacagagctttcaatagcaggggccgttccgattcgagagctccgcaacgattagcaggaaatctggatgccggatctgtttatcattccatcacgaattcatcttccagcttatcgagatataccacgagagagagaatccccattgaattagaaagccaaacggacgaaattttagaggacggatcttccacgcattccttcgaatcctcgaatagtagacgatcttcaagtgagaacaatagaggaagtatttctggccatgacgaagtccataaccagcatagcgaatatttaaaacctgatcaccatgaaaagttttaccctcagtatgtacctaaccttcattaccaaagattttacattgcggaagaggacttggtaattggtatcgccgcttatgaaacctccaagtttagaaattttatctacaacatgtgctgtctcttgtcctttgggttagtttaccttttggtgagatggcttcctcaccttagggtgcgatattatggtgtcaaggtgccattggccaaggcagaatgggtcgtgatagaaaatgaatttggtgaatttgccatacaaccgattgatagacagtggtataacagaccattaagtactgttctgcctttcgagaaatactctaacccgctagaggaaacaaacgaaacgtcattcagccatcatcatgctaatgaagttaacccaaacataccgattttgatcacatttgaatacagatatatcaaattcatttactcaccactagacgatctattcaaaacaaataataactggacagaccccgactgggtggatttaggtactttatcgaatgggttgagtaagggcgtccaagaagacagagagcttgcatttggtaaaaatcaaattaatctaaggatgaagactacttcagaaattctgttcaacgaggtgctgcacccattctatgtctttcaagtgttttctataattctgtgggggatagacgaatactattattacgcagcgtgtatttttttgatttcagtattatctatttttgattcattgaacgaacaaaaaaagatatcaaagaacctggccgaaatgtcgcacttccattgcgatgttcgtgttttgagagataaattttggacaaccatcagctcttcagaattagttccaggtgatatatatgaggtatcggatccaaatgtaaaaattttaccctgcgattctattttgctgtctagtgattgtatagtcaacgagtctatgctaacgggtgaatctgtacctgtttcaaagtttcccgccacgcaagaaacaatgtatcaattgtgcgatgattttcaaaatacccaaatatcgagtttcgtttccaaatcgtttctatataacggtacgaatatagttagagctaggattgccccaggccaaactgccgccttggctatggctgtaaggacaggcttctcaacaacaaagggatctctggttagatctatggtcttccccaaaccgactggtttcaaattttaccaagattcattcaagtatattggatttatgtcgctgattgccatttttggtttttgtgttagttgttttcagtttattaaacttggtttggacaagaagactatgatattaagggctttggatattataacaattgttgtgccaccagctctgccagcaaccttgactattgggacaaattttgctttaagcagattaaaggagaaaggtattttttgtatttctcctacgaaagttaatataggtggtaagatcgatgttatgtgtttcgacaaaactgggacactaacagaagatggcctagatgtattgggggttcaaatatcgcaaccagcaggggtaagaggtcacaaatttggagaattattagacgatgttcgccaagtatttcccaaattctctttgaacgactgtaattctccactagacttcaaatccagaaactttttcatgtcactactaacatgtcattcactgagatctgtcgatgggaacctgcttggtgatccgttggactttaaaatgttccaattcacaggctggtcgtatgaagagaattttcaaaaacaaacattccattcgttgtatgaaggaagacatgaaggtgatgttttcccagaaaactcagatattatccctgcggtagtccaccctgatggcagtaacccagaaaatacgtttactgataatgatccccacaatttccttggagtagtgagaagcttcgaatttttgtccgaattgagacgtatgagtgttattgttaaaccaaataacgaagacgtgtattggtcattcactaaaggtgcaccggaagtaatttctgaaatatgtaacaaatcaactctaccggccgactttgaggatgtattgcgtagctatactcacaacgggtatagagttattgcatgtgctggaaagactttatcgaaaaggacctggctgtactctcagaaagtttccagggaggaggtcgaatcaaatctggaatttttaggattcatcatcttccaaaataaattgaaaaaggaatcatcagaaactttaaaaagtctgcgagatgcagacattagaacgacaatgtgtaccggtgataacatactaaccgcaatttctgtcggtagagaagcgggtttgatacaatgtccgcacgtttacgttccatctataaatgatacacccttacctggtgaaactgtaataatatggagagacgttaatgaaccagataatattttggatacaatgactttgaaacccgttaaagtgggaaataaccacattgagactttatctagaaatgagtatactttagcggttactggcgatgtctttagattgctgttcagagatgaaaacgatatacctgaagaatatttaaacgaagttctgttgaagtcgtccatttatgcaagaatgtcaccggatgaaaaacatgaattgatgatacaactgcaaaacctagactataccgttggattttgtggtgatggtgcaaacgattgtggtgccttgaaagcagcagacgtaggtatttccctttcagaagccgaggcgtcagttgctgctccgtttacttcaaaagtattcaatatcagttgtgtacttgatgttatcagagaggggcgtgctgcgttagtcacttcctttgcttgcttccaatacatgagtttgtattcagccatccagtttgtcacgattacaatactttacagccgtggttccaatttgggtgatttccagtttttgtacattgatttactattaattattccgattgcaatttgcatgtcttggtccaaatcctatgataaaatagctaagaaaagaccctcagctaacttaatttctccgaagatcctcgttcctcttttgatcagtatattgatagtgtttttattccaattaattccatggttaatcgtacaaaaaatgagctggtacattaagcccgttgtcggaggtgacgatgctgtagagtcctcagataacactgttttgttctttgtctcaaattttcaatacattttgaccgctgtcatcttatccgttggtccaccatatagggaaccaatgtcaaagaattttgaatttattgtagatattgtagcctctatttgcgtgagtatgttattaatgagtttgaatccggaatcgtactttggtaagaaattacaactcaccccaatatcaaacaatttcaatatgtttattattgtctgggcgatgataaattattacgctcaactatatatacccccatcggtgaaaggttggttaaagaaaagaaaaagtagcaaaaagtacaaactattaatactagaacgggaaaaattaacagacgtttaa

SEQ ID NO: 2485 - DNA, 930 bp, Saccharomyces pastorianus
atgcctcttcaattatttggcagagatcaaattgtagtacattatgaaaacaataacatgactggcgacaattcacatagccaaggtgttccaaggttgtgggcgaggagatttgcgaccgcactcagaaccctgatgaataggcgaatacagcatgttacacttacacattggtctttgttagttgtatgggttacgggtctgtggaaatttactagtcattatagacagttgtattctagatcagccattttggtgactgtttgcacaaatattcttttatttggcatatccgatatattggctcaaagtatagcttgcttttactcgtaccgtgtagatcctataccgcaggtactcaatgacacctttctccatgttcaaggcagccctgatatagaaaatggtgtgggttacgagagcgatgaactttccatcttcaacgattttacctctgaacatagctcctactcagataacgatgactatcctgaagttgctacatcgcaaggtactttcaagacagacacctttgatttatttaggtggtgcagtttcatgttctggggttttttcatatcatttttccaagctccttggtataagttcttgaattttttttacactgaagatcccacagtggtacaggtctttgaaagagttctttccgaccagctgctttattcgccagtatctctttactatttttttatgttctcaaactacgtaatggaaggaggcgataaatttacctttagcaagaaaattcaaaggctgtacatttcgacacttggttgcaattacctggtatggccgttggtacaatttataaatttcctggtcatgcccagagactttcaagctccgtttagctcctctgttggtgtagtatggaattgctttctttcgatgagaaacgcctctaaatag

SEQ ID NO: 2486 - DNA, 612 bp, Saccharomyces pastorianus
atgtcagcagaagattataagaacttgccagttaccgttgaaaagcctatcccagttgtgtacgacttgggtaacttggcagctttcgacagcaacgttttggataaaaatgattttgattcttcaaatgttaagcgtgaggaaaaaataaagaacctcacccgtgacaatgttcagctactgatcaaccagctattatctctgcctatgaagacaacgaccgaatctgcaggcggtaccagcggccaaagttctgtgatgactttactacaacttcctgttgccaccactgagctaccaagagaaaaaccattaccaaaggctaaggctatgaccaaatgggagaagttcgcagctaaaaaaggtatcaaaccaaaggagagagcaggtaagatggtttatgatgaagcttctggtgaatgggctccaaagtggggttacaagggtgcaaataagaaactagatagtcaatggctagtcgaagtagacgataaagtaaaaggtactgaaaaggaattgatcgatccaagaactttgaatagggcagaaagaaaacgtttggtaaagaagaacgaaaaacagcaaaaaagaaatatgaagaatgctttataa

SEQ ID NO: 2487 - DNA, 579 bp, Saccharomyces pastorianus
atgctaatctgtcgtggttggaaaccactactcaacgcttcttctattataagagaccctatacgagctgttcttccaggagcaacaattccaactaaaaggacttttcataacatcaatcgcttatatgttgaaaataacacagacggtatcacaactaagacaaaagaagagtctcattcgacgcagatgttcaaacctccggagacctctcagtatgaaggctcttaccaaagagattatgaaagaatagcaaaatattcgttaataccattaacaattgtacctttttatgcatccttgaccggtggagttatgtacccgctattggatgcatccttatcatctgttttcttgatataccttcagtacggtttcacgagctgtattatcgattatataccgaaggagaagtatccaagatggcataaactagctctttatagtctttacggaggatccatgttgtctttgtacggtatctatgagttagagacaaaagataatggtttcgttgatttaataaagaagctttggaatccgaacgatgaccatttgtatatattcggaagaaattga

SEQ ID NO: 2488 - DNA, 1440 bp, Saccharomyces pastorianus
atgggttttgttgatttcttcgaaacctatatgattggctctagggtccaagttaaacaattggacatttcagactggctgagccttagcccacgacttcttattctttttgggtacttttatatccacacgcttttaaccgcattcaatgagtgtcttcgatttgttaacagaaatgcattttgccttagattacgcttattatatgacagattttggtcacatttccccgtaattggagagtacaagattcgactactttcaaggatactcagatacactgagcagagaatgatacctaacctagataaaatattggaaatgattgaaatttggtttcaattacacttagtagaaatgtcatttgagaaaaaaaaaaacgtccagatttttattagtggtggaagtgacgaattgaatttctttaaggacaataaatttcaaacaaccttaatgatatgcaatcatcggtcagttaatgactacaccttgctaaactatttgtttttcaaaagctgtcctactaagtattatagtatgtgggagtttatacaaaaattacggaagggagacgatttacctgaatggccccagttaaagtttctgggctggggtaaaatgttcaactttcctcaattagatttattgaagaacatattcttcaaggatgaaacccttaatttgccgccagataaattaagaaacatattagaaacacaaaacaatcaggcaatcgctatcttcccggaagttaatatcatgagtttagagctttcaattattcagagaaaactacatcaagatttccccttcgttacaaatttttacaatttactatacccaagatttaaaaattttaccagtttaatgagtgcattttcgtcaattaaaaacatcaaaagaaaaaaaaaccatagtaatattatcaaagaggcaaggcttttgtttcatagagaaattgataaattggtccataaaagtataacaatggaaccttcaaaaatgtctaataaaataatgccgcccatgatcgttgaccactcttatttattcgagaaaaaggaggaggcaagccaagggaaacctaagccggtactgatcaatccatacatttatgatttcaccatagtttattatagagtcaagtacactgacagtggacatgatcatattaatggagacttgaaaattcataaaggttaccaattagagcaaatctccccgacaattttcgagatgattcgaccagaaatggagtccgaagacaattcgaaggagaaagaccctattgtagtaatggtacatataaaaaagcaccaaattcaacaactactcgcatacaacgatgtgagcttggagagatggcttgaaaacagatgggtagagaaagataggttaattgactccttagaaaagaaaattaaaattgagaccgaataa

SEQ ID NO: 2489 - DNA, 2241 bp, Saccharomyces pastorianus
atgatcacgcagaattccataccggaggtgaaagaggattttattggctacgctctaaatgagagaaaggccaggttgccgcagtttcgagacttaggtccgccggacttgatcacgctagcaaagtacttgcccacctcgagcaacacgaatactatcaacagtacgagtaggaccaacggggctgcagttcagccacccgccgcagctgcacccgatggctctgccgcttccgtaataaccaatggagacagcaacgatgccactgttaccaccaactccacaactgcttctctgttcagtaacactagagccggtaatgacgcagcttctatggtcaccgagttccatccctacaataagctaaagggagagatcggaacatttttctattccatgggtattgatacatccggcccgacctcggttgcgatcttcttaaagagaatctcggacattatcaccgagatgcctcaaatttggtttggtaagaggaaaatcttccaggtttctcggatttcattttcctgctggaatgcgttcaggaagtgcgacgtcaatgtcatcgtccacatcccgggcacaatccaaaacttcatagtagactgcaacggtgaaaatgtggaaatacaatcgcatgcggacgaggatctcatatgggcggaaacgttcataagcggagtcgtgaggtcaatcatgctgatgaaagataatgcagaagaaggcgagctgcagaacttggtagaaactttgattttgaacccattgacaacgtggcaaatagatgaaacgtctgagtctttcattgaattgttcccagtggtgtaccacaaaggaccactattaggcgcgccttactatatagccaatgtaaccaacacaaacaattacttggtggaaacgctggtagaaatagtaaagctaacccgtaatgtcaccatggcggagacaatgctcaaggacctggcagccaaaaaccccgaggcaattataatactggtcaagatttacttggcgtgtgacagagaaatagacgcaatgaaactgatatacgacgagttgtcacctgacaacaagaccaaaagcgctaatattgacatggactacaaatccgagctattgtgtttacaagcggcatttttaatagacaaaaagcaagattacgctttagctcaaaacatagcacaagaagccgctagttgttctccgagtgagtttagaccatggtatattttatctaaggcatacgtcaggttgaatgatatcgaaaatgcattactgatactgaattcgtgccccatgtccccgctaaaggaaaaatatattctaaaaagagtagttccattgccctctagtaatagtctacatttaccactgcccatcgatgttgtgctagatgaagtgacatcgttgaatccgcaggacgtccaaaaggaacaccagtctgcagacccgatgttagtcaatttggccgcatcgaatttgaagtccactttccaactggcatacaggctattaacggagatcgtgcaaatcaccggctgggaaaatctgttgaaatacaggtcaaacatctttgttatggaggacgaataccaaaattcgtcatcttcgttgcccaggggcgttgagaaacaagaagaagtgccactaagggccaaaaggctttgtgaaagatggttagacaacctcttcatgctcttgtatgaagacttgaagatgtacaccttgtggcaaaccgaacaactgtatatggacgtacaaaacaacaaccataataagttgacgtttgaatgggagctattcgggctctgtgcacgtcggttggggcacttgcccgaagccgccaaagcattccagaatggcttatcgcagaggttttcatcaaggtgcgcccggaagctgttggagtattgcgtgaacgagcgtcaacgaatcaaaaattttatcaactcgccaaactcacacgacatggctccggaggtgattagctcgcgcataagagagctagataacagcatcattgacctttgcgtgaagatatgttgctggaaccaccgctggtacaccgagttctccataagtctactggactcgttaagcgtggtcattcaagacatggggttgactaaagtgtccaacgaaatctcgtcaagatactcggagaccgttttcaagctggctcaagagaacatgctcgatttcttttccacctgcaccaatgggtactacgacgcataa

SEQ ID NO: 2490 - DNA, 78 bp, Saccharomyces pastorianus
atgtttagcttatctaactctcaatacacctgccaagactacatatctgaccacatctggaaaaccagctcccattaa

SEQ ID NO: 2491 - DNA, 231 bp, Saccharomyces pastorianus
atgagtactgaaaaactggaaacttctgaagagccacaagctcctttggccaatacttctgagactaatttagtaaaggaagactccgagaatgttgtcactgtatttgacctcgcaagtgaaatagaaaaatcattgaaggacgtacaaaggcaaatgaaagaaaatgatgacgagttttcacgaagtatacaggcaattgaagaaagacttaacagattgagtcagtga

SEQ ID NO: 2492 - DNA, 1569 bp, Saccharomyces pastorianus
atgagctccggaaacttgtcacctaaagatactattgttccagaagaacaaacagctcaactgcggcaatctgacctggacgaagacagcattaactataatctggaagaggatgaaatagtacctcttgagacaatcacttcatatgcgtcgaccttggtatcagcaaaggagtattccaaaaagacagacgataaagttacagacattgaaagccaaccaaattggggagaaactacttcgagggctcacgacagtgacaatgaaaaagaggacactgaagatgaggctgatagtttccctgaagggggggctaaggcttgggtcgttacgttcggttgtttcatgggattaattgcatgcttcggcctattaaattcaacaggtgtcatggaaagccatctgcaagacaaccaattggctaaagaaagtgtttccaccattggttggttattctctatatttctttttgtctgctttgcttcgtgcatcataagtggtacttacttcgacagaaatggttttagaaccatcatgattgtagggactctcttccatgtggccggtttgtttgccactgctaactccaccaaatactggcactttatactatccttcgctgttgtctgtgggttcggtaacggtatcgtgctaagtcccttagtgagtgtccctgcccattattttttcaaaagacgtggtactgctttggcggtagccaccatcggtggtagtgtaggcggtgtcgtttttccaatcatgttgcgtagcttcttctccatgaagtcaggcactgacccaaattacgggtttgtttggggaattagaacattgggatttttggatttggctttgctaaccatttcaattatcttagccaaggaaaggttgccacacgctattgaagagtctaaagatggggaatcacgattgagatacaccattagagtttatatcgtacaatgctttgatgcgaaagccttccttgacatgaaatatttgttttgtgttctaggaacggtatttggtgaattgtctataaactcagctatcacatattatggttcatacgctaccagccatgggatttcagcaaatgatgcctacacgttgattatgattataaacgtgtgtggtatccctgggagatggttgcctggttatttgagtgacaagttcggtagatttaacgtcgccattgcaactttgcttacactgtttatcgtcatgtttgttggttggttaccatttggtaccaacctaaccaacatgtacgttatcagtgccttatatggattctgttctggaagtgtcttttccttacttcctgtctgctgtggacaaatctctaagacagaggaattcggtaaacgttactctacaatgtactttgttgtcgctttcggtacactggttggtattccaatcacaggcgctatcatctctaacaaaaccacagcagattatcaacactacatcattttttgtggtttagcaacctttgtcagcgctgtctgttatataatttcgagagcatactgcgttggtttcaaatgggtcagattttaa

SEQ ID NO: 2493 - DNA, 1362 bp, Saccharomyces pastorianus
atgattcaaaccccaagtacagcgaccaaacgacacaactccatccataaaaacctctttgatccatcactgtaccaaataccagaacctccacgtggtgtttaccaacaccagaaaaaagaatacgctagggaagcatctagcaatcacgttttgggtcaagattttaccagcataaaggaaaaatttatccagttgtttcctcatggcatacaaggatacttgcccgatgttgatatcaggataattgtgatatgctttatatggtacatcacatcttctgtttcaagcaacctatccaaaactattttaagaactttcaatcatccaatagcactcaccgaattacaattccttttcagtgccattatgtgtgtggcatttgcttctatcgtgaatttgtttcgaacacctcgattaaggcatactgagttttcaaaagcattgaacaatttccctgagggaattcttccagaatacctgaatggtgatttccagaattccatactacgcaggtttctcattccttcaaaactagtctttttgactacgtttcctatgggaatatttcaatttattggtcacattacgtcgcataaggcagtctcgttgataccagtatcactagtacattcagtaaaggcactatcgccgataatgaccgtgggatactataaagtttttgaacatcgctactacaatcccatgacatattatacgctattgcttttggttttcggcgtcatgataacttgctggtcgacacacggacgtaagagagtctcagacaaaaacggtagcttcatattgaatgggttatttttcgcatttatatccatggcgatatttgtgtcacagaatatctttgctaagaatatattgaccatcaggaggaagatgacgcttctaccatcttcttcgactgatgatctcacatcgaacgaaaaacaggtaggttcaaacagagtaagatattcaccactacaagtagataagataaccatattattttactgctcatgcacagggtttttgttgacgctagcacctttcttgacgaacgaactagttcatggtggttctgtcatcaacgacttgaccatgaaaacagtgtggcttgtagtgatccatggtatagcgcatttttttcaagccatgcttgcatttcaattgatcgggtcactttcttccgtcaattattctgtagcgaacatcatgaagaggatcgtcgtcatatccgtcgcaatattttgggagacaaaagtgaatttcattcaggtgtttggtgtgattttaacagttgttgggttgtacggttacgacaaatgggggctctccaaaaagaatggacgccaagcataa

SEQ ID NO: 2494 - DNA, 642 bp, Saccharomyces pastorianus
atgaactatagtacagattcaagtaatacagtatatgtggggaatatagatccaagaataacaagagaccaactttatgaactttttattcagattaatccaattttaaggatcaagtatccgaaagataaagttttgcaaacgtaccaaggctacgcttttattgaatttcatagcaaagaagatgctcagtacgtgatacaaataatgaataacaccgtcaaattgtatgaccggctgataaaagttcgtcaagtaaccagctctttaggtgctgctaattcttcctcgaataattccaagggcatatctttacctattgctaaactgttcgtaaagaacctcgcagattcgatagacattgaacaactaggaaaaattttcaacaaattcggtaaaacagttaataaacctgaagtttttcatctatcaactggaaatctgaaatgtgcatatgtatattttgaagactttgaaaaagcagatgttgcaataaaatctctaaataatcaattagtggccaatagcaggatcacggttgattatgcatttaaggaaaacggtaagggtaatacaaaatatggcgatgaagtagataggctgctgaataaggaagcactaaaacacggcatgttaaaataa

SEQ ID NO: 2495 - DNA, 1476 bp, Saccharomyces pastorianus
atgagattggtatcaaagagaagaattaggtttcttatttttattttggttggtgtcttctctgtgtgtataatatcaaggtgtgttgtccacttccaatacaatgaggagataaagtactataagaaatttttccagcagaaaaaggacggccttcaagagatatataatcctttagagattaagcaaatccctggagaaacaatagatgatttgtattctgccagcttggaaaaggagctcaagaacaaccaaatcattgagtggtcaaagtttgcgtatgtgaattatgtaacagacgtggattatttgtgtaatacgctgatcattttcaatgatctgaaagaacagtttaaaacaaaggccaaattggttcttttaatatctagagacctattggatcccgatacttctgcaaagatagaccaaattaagcttcttcttgataaaattcaagctatagatgaaagccaagttattattaaactgattgacaatatcgtcaaaccaaaagatcctacaccttggaatgagagtttaacaaaattattggtctttaaccaaactgagtttgagcgtgtgatttatcttgataacgacgccacgctaagatcaagtttagatgaattgttctttttgcctaaatatatcaaattcgcggctccattaacatattggtttttatctgaacatgatttggaaaaatcatatcacgaaattaaattcaaggagaagcaaccaatcaatctcggttcgtacaccaaggtattggccaatagaattaggaaaggccagatgatttacaaccacttaccgagtctaccgcactcactatacttgaactcaaataatatagctcaagacattataagctccacctcatcttcatcaccattgttctatttccatggtagtaaaaaagttagtaagctgaaatttgcttctaacttgatggtcattaaaccttcaaaaaaaacatttgatgaaattgtagaggacacgctgcctaagataataaacaaaaaggataaatacgatatggatttgatcaatgaggaattgtacaatttaaagaaaatcatttacaagcagtttattttcttcagaaaagttagaaaacttttcaaaccagaagtattagttttaccttttgcaagatatggcctattgacgggttcacttaaaaatccgaagcactattctatgatttccaatgatgtattaggctataagaatttggatgaaaatggcgatgaaatcactagaagtttagatgacgctgtcacatactccaagtatatacatttttcggactatccaataggtaagccctgggtttatcaatcagtaaaggactttgaatgtaatgtagaaaaagaaaaatcgagaggccttgaattagaaccccaggcttgtagtgtttggaattcggtgtacgaatcttacatgcaaactagaaaaatatgttctgtttga

SEQ ID NO: 2496 - DNA, 2427 bp, Saccharomyces pastorianus
atggcatttccacgacttacgtctagtcatcagccgaaccggaaaggagaagcccatccattggctctttccattcgcatagaatccccaccatgcgttctatatggctctgctacggaatcatctggtgctgtattgagcgggctatttactgtgaaggtcatagatccctacaagagtagcgaagataagtctttgaaaactaccgaatcaaatgtgtcggctaagaataagagtttaaaaagaaagagcacatttggttctgcactttcatctagattgtcgaacttatctgtctcgacctctaatatctccccatcaacatcttctacttctccgtctcactcacctacacccgcaaatttaagaataatggccggttatacgaagattgcagtcacttcggtaacgctaactctggtacaaaaaattcattttcataagccctttgtgcccaatgtttcatccatacaaacctgtatgaattgtagaacgaagaccacaaatatgaaaagctgggaaattcagaaaactacgcaggaaatatccgtcggaaatcattcttatccattttcctatcttattccgggatccgtaccatgctcttcatcgctgggggctgcggctgaaactcaagttaaatatgaactgatagctgtcgtaacatacatggatccttacagaaacgctgtttcttctactcattctactccgaggaaagagggaagctcttccaagaagcaactattgcaactagtaatgcccatcgctgtcactcgaagtataccacgtgggccggacaaaaactctctgagggtctttcctcctacagaattaactgccgcagctgttcttcctaatgtggtttatcccaaatctacttttcccctagaaatgaaactagatggggtttcatccggtgatagaagatggcgtatgcgtaaattaagctggagaattgaagaaactacgagagttaaagggcattcttgcccagtacataagcacgaactcaaacagctagaagagcaagtaaaaataaaagaactagaaaagggtaaaaaaccacctagtcatatcaagcgatatggagaactaggccctcaaattcgggttgctgtaaactctctagaaaatatgccatcacaaagactaccaggtgagcccagaaatgaccaagcacttggttccgcggctccagcatcgaccggtaacattggattgggagatgaaagtcctgttaatgaggatgcagaagaccagcctggtagtgagtttattcatcctagcgatgacgctttacgtcaagaattactttcacagcaacagcgtgcaagagaacaacaacttcaacaagagctaaaaaataatagcactttatttacagaagaggttcggataatttctaagggagaaatgaagagtggatggaagacggactttgacaataatgggaaaattgaactagtcacagaaatagactgtatgagacttaactctggggtctccaatcctgtaatgtatgcatcaacagccaaagtccctactacaaccaataaaaaacccaacatcaacgtggcttgtgatatacaggatccaaatttgggtctatatgttaatcatatcttagcagtggaaatagttgttgccgaagaaacattacaatacgcaaatggacagcccatacgtaaactaaactccaaaaacaagaaagatagcaatagcagcgcaatgagtgtccataatccagaccagcggttggcagaactatctccaatgtttgctaatagaaacacaccaaaggtacgatccgttgatcccgaaggtataactcctgtaagcagtaataagtccaaccatagtattcttaaagacaaggcaacaggcggttctaactctaatatagttagtgtccccactggggctgcacgtgttttaagaatgcaatttagattatcagtcacagaaaggtctggactaggaatctcctgggacgaagaagttccgcctatctaccaagacgttaagctgctctcaccaccatgctacgagcgttctgcgaacaacaaaaccaaaaataaactatattcaacaatgagcaccccgatcggatcagtagatgattttgtaggtagtagcgacgatgatgatggggatgatgacactcgagggacagagaccggttctaatataatagaaactccgattgttcagagcaaactaactatcccgccaactgcgcactatcattccgcttcaacctcacaaagatctcttactgcagtacagtcgccgcctttggaaagtgttgtaagtgtccagggtagtgtgccttttcgcgggcaagtgttaacaccccataacacgagggatgtccggctccaaaacttttctgatgttttagattccaatagaatcactcaatag

SEQ ID NO: 2497 - DNA, 4710 bp, Saccharomyces pastorianus
atgtcatttgaagttggtacacgatgctggtatcctcacaaagaactaggctggattggtgcggaagtgatcaagaacgaggtcaaagatggcaagtatcacttggagttgagtttggaagacgatgaagtcgtgtctgtggacacggatgacttgaatgatgacaaaaaccagtccttgccgcttctcagaaacccgcctattctggaagccaccgaagatctaacatctctatcgtacttgaatgaaccggcggtcttgcatgcgatcaagcagcgttactctcaattgaacatctacacttactcgggtatcgtgctgattgccacgaacccctttgaccgtgtagaccagctttacacacaagacatgattcaagcatatgcgggcaaacgtagaggcgagttagagcctcatttgtttgctattgccgaagaggcatatagactaatgaagaacgataagaaaaaccaaaccattgttgtgagtggggagtccggtgccggtaaaactgtctccgccaaatatatcatgcgttacttcgcttctgtggaagaggaaaactccactaccatccaacatcaggtggaaatgtctgaaacagaacagaggatcttggccacaaatcccattatggaggcgttcggtaacgccaagaccaccagaaatgacaactcctccagatttggtaagtacttggagatcttgtttgacaaggagacatctattattggggcaaggatccgcacatacttgctggagcgttccagattagtttatcagcctcaaatagaaaggaactatcatatcttttatcaactaatggccggattgccggctcagaccaaagaggaactgcatctgacagacgcctcggattatttttacatgaatcagggtggtgacacgaagatcaacggtatcgatgatgccgaggaataccaaaccacagtggacgcgttgactttagtcggcatcaccacagaaactcaacaccaaatattcaagatattagccgcattactgcatattggtaacatcgaaatcaagaaaactagaaacgatgcctcattatctgcagatgaaccaagcctcaaactcgcgtgcgaattgctgggtatagatgccttcaattttgccaaatggatcaccaagaagcagattgttacaagatctgaaaaaattgtgtcaaacttaaatttcaatcaagctatggtcgctaaagattctgtggccaaattcatttattctgccctgttcgattggcttgtagagaacatcaacaccgttttatgcaatccagctgtcgatgatcaaatcaactcatttatcggtgtcctggatatttacggctttgaacattttgagaaaaactcatttgaacagttctgcattaactacgccaatgaaaaattacaacaagaatttaatcaacacgtttttaagctggaacaggaagaatatgttgcagaggaaatcgaatggtcgtttatagagtttaacgataatcaaccttgtatcgacctaattgaaaacaaaataggtatcctatctctgcttgatgaagaaagtagattacctgctggttctgatgaatcttggacccagaaattatatcaaacattggacaaatctcctaccgacaaagtgttttccaaaccaagattcggacaaactaaatttattgtgagccattatgctcttgacgttgcttacgacgtggaaggtttcattgaaaagaatagggatactgtctccgacggtcatttggaggttttgaaggcgtccaccaacgaaacactgataaacatcctggaaggtttagaaaatgttgccaagaaactagaagagaccaagaaggccgaactagaacaaaataacccggggaacaaaaaaccgggaccagcaagaaccgttaatagaaagcctactttaggttccatgttcaagcaatctttgattgaattaatgagcaccatcaactcgacaaatgtccattatattcgttgtataaaacctaatgctgataaggaagcctggcaatttgataacttaatggtattatctcaattaagagcatgtggtgttttagaaaccatcagaatttcgtgtgctggtttcccctccagatggacttttgaagaatttgtattaagatactatattttaattccacatgaagagtgggacctaattttccaaaagaaggaaaccaccgaagacgacattatctcagtggtaaaaatgatcctagaagctactgtgaaggacaagactaagtaccaaattggtaatacaaagatttttttcaaagcaggtatgcttgcatatttagaaaagctaagaagcaacaaaatgcataattctattgtcactattcaaaagaaaattaaagccaaatattaccgtaatcaatatttgaaaatttcccaagccattaaaatctggcagagcaatactaaaggtttcattattcgtcagcgcgtttatcatgagagaaaggttcattccgcaacattgattcaagccacttatagaggtcacgcaatccgtaataatgtgtttagtgtgctgagaaccatcatcaacttacaaatgagaatcagagaggaattaaagcgaaagcaatttaagagagagcacgaatataaagctgcagtaacaattcaaagtaaggttaggacttttgaaccgagatctacatttttgaacacaaagagagatactgttgtcgttcaatccttaatcagaagaagggctgctcaaagtagattgaaacaattgaaattagatgctaaatcagttcatcatctgaaagaagtaagttataaattagaaaacaaagtgattgagttaacgcaaaatctagcctctaagattaaagaaaataaagagatgacagagagaatcaaaggattacaaattcaagtagaagaaagtgtcaaattgcaagaaaccttagaaaacatgaaaaaggaacacttagtaaatatcgataaccaaaagaataaagacatggaactacaaaagacaattgaagataatttacaatccactgagcaagatttaaagaacgctcaactagaattagaagaaatggttaagcaacacaatgaactgaaagaagaatccaagaaacaattggatgaattagatgaaacaaagaaagctttagttgaacaccagacattaaatggagatctacaaaatgaagttaaatcattgaaggaggaaatttccagactacaaactgcaatgtcacttggcacagttacgactagtgtattgcctcaaacaccattgaaggatgtaatgggaggtaatagttccaattataatagcttgatggttgacaatttagaactgtcgcctggaaagtccagatccactccaatgtccggtaacaaccacattgattcattgagtattgatcaagacaatggcgctaatgctacacagattaacgaagagctatacagaatattggaagataccgaaatcttgaaccaagaaatcaccgaaggcctgttgaagggattcgaagttccggatgcaggtgtggctatccaactaagtaaaagggacgttgtttatccagctagaatattgattatcgttttgagtgaaatgtggagatttggtttgaccaaacaaagtgaaagctttcttgctcaagtgctgaccacgatccaaaaagttgtgacccaattaaagggcaacgacttgattccaagtggtgtgttttggttagccaacgtgagggaactatattcatttgtcgtgtttgctttgaattctattctaactgaagaaacattcaagaacggcatgaccgatgaggagtacaaagagtacgtttcattggtaactgaattaaaggatgactttgaagcactaagttataatatatataacatctggctgaaaaaattgcagaagcaactacagaaaaaggcaattaatgctgttgttatctccgagtctttaccagggtttagtgcaggagaaactagtggatttttgaataagatttttgctaacactgaagaatacacaatggacgatatcctgacgttcttcaatagtatttactggtgtatgaaatcgttccacatcgaaactgaagtgttccacgctgtagtgacaactttgttgaactacgtggacgccatatgtttcaacgaattaattatgaagcgtaatttcctatcatggaaaagaggtttacagttgaactacaatgtgaccagacttgaagaatggtgcaagacacatggattaacgggtggtaccgagtgcttgcaacatctaatccaaaccgctaagctactgcaagtccgcaaatataccattgaagatattgatatattaagaggaatctgctactctttgacgcctgcgcagttacagaaattgatatcacaataccaagtggcagactacgagtctccaataccacaagaaatcctgaaatacgtggctgacattgtcaagaaggaagctgcattatcaaacgatccgaagggtcatgaacatagcagcggtatattcattacaccagaaacggggccttttactgatccgttcagtttgataaaaaccagaaagttcgatcaagtggaagcctatataccagcatggttatcactgcccgcaacgaagagaatagttgatcttgttgcccaacaagttgttcaagatggccattga

SEQ ID NO: 2498 - DNA, 348 bp, Saccharomyces pastorianus
atgtcgacatcagtgccatacgatccatatgtaccttcagaggagactaactcgagctcgcacccgaactctcagaataaaacggccgctctgagacaggagatcgacgacacggtgggcataatgagagacaacatcaacaaggtggccgaacgaggtgaacggttgacctccatcgaggataaagccgacaacttggctgtctctgcacaaggtttcaagagaggcgccaacagggtcagaaaacagatgtggtggaaggacttaaagatgagaatgtgtttatttttggtcgttgtcattttgttggtggtcattatcgttcctattgttgtccatttcagttaa

SEQ ID NO: 2499 - DNA, 2667 bp, Saccharomyces pastorianus
atgtcttttgattggctcaatgttccaggattggacttaggcaacggggatcaaacagaaaggaaacaatccaatggattgggtccacccagtgtatctttcgactttggtgtgaacacttctgctccacgcgattctaatttctgggatcaaggttcacgaagtcagagcgatacgtctttatcctacagaaataatcttccaaccgcaggagctaattccgcactccaattgggttctcctgaaaagggagatcttcatgcagaagtgcaaaatctttctggaggtgatggttatgcagagacacctgaggatatgcaagtcccgttgtctctgtcacaaaaccaacttacacgcgaagaaataaggacatatttaagatggtacaactatatatgtctgagaacacatgggaaattagtcaaattaaatgacgttttcagattcttatccaatttcaatttatctcagcaaattaaagaaagaataatggaaatcttccgtagttgcaaaaatgcattgaatatcggtcaattctttgctgttctgaggcttattgctagagctattatccatggcattttacccgtaagaagaatgattttagagaaggcacctatacctaaacctcgtcctattttgagcagtgacaatcacgaggaggtttacgaagaagtagaagacgatgataacaataacaaagcgggtgatcaaaaggtcgacttcgattcatttgcttccctgttactaactggtacaacaataagaaaaagactcagaaggagagttaaaaacacaaactttaagagtaagaaagttagattttcagagcatgtgacgtttcaagatcctccgaatccaagccaaaaatcatccaataatgtcaacgagccaaagaaaccgattggcgaaaatgaagatggagatcaaaatcgtagtaataatggcccattagacttgacattgcccatggaccaattattgaagagactatacaaagggagacaaaatagtgggctagtctcaagcttaccgagcgaacaacaagaaactgaagaggaaaagaaagtcctggaggatatgaaggactcattatcccatttcaaacaaattcagaccgtggattctgcgtcactaccaatgtcatccgcacttttgcaaaatggtaacaatcggccaaacaataatgctaacaacaacggtgttccactgcaagtgccattagaacctttgaaaccaactgcaacaggttctgctaatcatttattgcgagaagaatacaaccaaggattaactccaaacaatgaaaccattcaaactggcttacaacccttgaaaccaacagcaactggttcagcaaattacttgatgcggaaccatatagaacaacctcaatccattcaatccacgaatgcgcctgatacaatggcaaactctggagggcttcagcctttgaaacctaccgccaccggctcggcaaactacttgatgaaacaacatctgtcaccttcagtgaatagcacgacaccttcaatgtttcaagggcaattcgcggatcagtatccttctccgcaacctacaggtcattttgtgaattcccctaacattattgtttctcaaagtaaccagcagcagcaaccgcaacaacaacaacaacaacaacaacaacaacaacaatcttaccaaacaaccggtacacctcaaccaaaaatcgagctatcaaatatatctcctcagcacacatattctaacaatattcgaatcaacaacgggaatattatatcgatgccaaaagtggaaatatcaaacgcgctttctcctcaaaatacgttttcacaacaccaacaaccacacttggtttctcctcaaaactcgtttgttaaaaaccaatcaactatgatttctccacagaatacatattctaataaccaacaatcgatgatatctcctcagcacacatataacaataaccaacagcaaattcaccaccttccaccacccccacctccgcggatccagcagcagcatgaacaacggccagccattatttctccccaacattcataccttgacatgccgaagccaaataacatgttgtccactcaaaattcatacacaaactcaaatcaaccaaatgtacattctccaaacttcttgtcaccccagaatgctgccaataattacttccagtctttgctttccacctcaccatcacctaattccactccactaactgcctccaatcttaatggacattctaataacgttagtaataacttgagttctttccagcctaatatgacaagtggtaatccaccaatgaacattagtcaatcacaccagacatataatggcaattattcgatgattaatcaacagcagcaacatcctcactcacaacaaccaatatatgggggacagttaacccaaatgcaacaacagcatcaagggcaatcccagtttaacaactgcgatatacacaaccaagcaaacaaacctaattacggtatgctagggcagcaagtgcaacaacaacaacaacaacaacaacagtttccattgtatactgatacaaatagatccaattcaagcgatatattgggtaatttacaatctttgcagcagcaagttgatgctttacaaacccagtataatagaagaccgtga

SEQ ID NO: 2500 - DNA, 702 bp, Saccharomyces pastorianus
atgtcctccgctatcactgctttgacacccaaccaagtaaacgatgaattgaacaagatgcaggctttcatcagaaaggaggccgaagagaaggctaaggaaatccagttgaaggccgaccaagagtacgaaattgagaagactaacatcgtgagaaacgagaccaacaacatcgatggtaacttcaagagcaagatgaagaaggccacgctatcgcagcaaatcactaagtctacgatagccaacaagatgcgtttgaaggtcctttccgcccgtgaacaatcactggacgggatattcgaagagaccaagaaggagttggcgggtcttgccggcaacagggacaagtacaagcccatcttgcagtcattgatcgtggaggcgctcttgaagttgttggagcccaaggccattgtcaggtctcttgagagagacgctgatttgattgagtctatgaaggacgacatcatgcgcgagtatggtgaaaaagcccaacgtgccccattgcaggaaattgtcttgtccacggactatttgaacccagaaaccgtttctggtggtgtcattgtatccaacgcctctgacaagattgaagtcaacaacactttggaggagagattacaattgttaagcgaagaggcattgcctgccatcagattggagttgtacggtccttccaagacaagaaagttcttcaactga

SEQ ID NO: 2501 - DNA, 2877 bp, Saccharomyces pastorianus
atgacgatcggcgataagcaaaagtggaccgctgccaatgtccgtaatacctttttggactattacaaatccaaggagcacaagttcgttaaatcctccccagtggttccattcgatgatccaactttactttttgctaacgcgggtatgaaccaatacaaacctatctttttaggtaccgtcgatccagcttctgatttctacaccttgaagagagcttacaactctcaaaagtgtatcagagctggtggtaaacataacgatttggaggacgttggtaaggattcctaccatcataccttctttgaaatgttgggtaactggtccttcggtgactacttcaagaaagaagccatcacttactcctggactttgttgaccgaagtctacggcattccaaaggatagactatacgttacctattttgaaggtgatgaaaagttggggttggaacctgataccgaggcccgtgaattatggaaaaatgtaggtgtccctgacgaccatatattgcctggtaacgctaaggataacttctgggaaatgggtgaccaaggtccatgtggtccttgttctgaagtccattacgatagaattggtggtagaaacgcatcttctttggtgaacatggatgatcctgatgtgttggaagtctggaatttagttttcattcaattcaatagagaacaagacggctctttgaaatctttgcctgctaagcatatcgataccggtatggggttcgaaagattggtctctgtcttacaagacgttagatctaattacgataccgatgttttctcacctttatttgaccgtattcaagaaatcacttcagtcagaccatattccggtaaattcggcgaagatgacaaggatggtatcgataccgcttacagagttcttgccgatcatgtccgtactttaacttttgccttggctgatggtggtgttccaaacaatgagggtagaggttacgttttaagacgtattctaagaagaggtgcccgttacgcacgtaaatacatgaactacccaatcggtaactttttctccactttgtccccaactttgattgcacaagttcaagacattttccctgaattagccaaggaccctgcattcctatttgaaatcttggatgaagaagaagcttcttttgccaagactttggatcgtggtgaaagattattcgagaagtacgctttggctgcttcggaaaccgagtctaagactttggacggtaagcaagtttggagattgtacgatacttatggtttcccagttgatttaactgaattgatggctgaagaacaaggtttaaagattgatggtccaggttttgaaaaggcaaagcaagaatcctatgaagcatctaaaaggggtggtaagaaggatcaatctgatttgattaaactaaacgttcacgaattatctgaattgaacgacgccaaagtacctaaaaccaatgatgaattcaaatacggtagcgccaatatcgaaagtaccattttgaaattacacgacggcaccaaattcgtcgatgagatcactgaaccaggtaagaagtacggtgttatcttggacaaaacatgcttttacgccgaacaaggtggccaagaatatgatacaggtaaaatcgttatcgatgatgttgccgaatttaacgttgagaatgtccaattatataacgggtttgttttccataccggttctttggaagaaggtaaattatctgttggcgaaaagattattgcttctttcgatgaactacgccgtttccctattaagaacaaccatactggtacacatatcctaaaccttgctttgaaggaaactttaggtaatgatattgatcaaaagggttctttagttgccccagagaaattgagatttgatttctctcacaagaaggcagttaccagcgatgaactgaagaaggtagaggatgtctgcaatcaacaaatcaaagaaaacttgcaagtgttttacaaagaaattccattggagttggccaaatctatcgatggtgttcgtgctgtttttggtgaaacttacccagacccagtacgtgttgtttctgtaggtaagccaatcgatgaattactagccaacccagctaacgaagaatggactaaatactctattgaattctgcggtggtacccacgtcaacaagactggtgatatcaagtactttgttattctagaagagagtggtattgccaagggtatcagaagaattgttgctgttaccggtactgaagcctttgaagctcaaagattggctgaacagtttggtgctgatttggacgcagcagacaagctgccgttctctccagtcaaggaaaagaaattgaaggaacttggtgtcaaacttggtcaactgtcgatttccgttattacgaagaatgaactaaagcaaaaattcaacaaaattgagaaggctgtgaaggacgaagttaagtcaagagccaagaaagaaaataaggaaactttggacgaagtgaaggcttttttcgaaactaataaggatgctccatatttggttaaattcatcgacatctctccaaatgccaaagctattaccgaagccatcaactacatgaaatcggatgacggtgttaaggataaatctatttatttatttgccggtaatgatccagaaggtcgtgttgctcacggttgttatatctccaatgccgcattggccaagggtattgatggtccagaattagccaaaaaggtttctaatatcattggtggtaaagctggtggtaaaggtaacgttttccaaggtatgggtgataagccagctgctatcaagaatgccgtcgacgatttagaaagtttgttcaaagagaaactttctatataa

SEQ ID NO: 2502 - DNA, 4092 bp, Saccharomyces pastorianus
atgagactgctagcattggcatgtatatttttttatgcgccgtttcgtgcattggctcatagtttacggtatggaatacccgagtctgctcaagtttggtccattttagttcacttactaggtgatcttgatgaacaattgctcgctgaactgtaccccttggttactggtttggatgatgaaactaatactcaaggatgccttatagcgtcgacgagtgacgcattaaggaaacaacatggcaaagaagatgtggcagatcttttagaactatatggcagcctttacccaatgggcctgctacaggaggacgtcagctccattaccgatcaagacgaaataaacgggaactattttatcatgaatgggaaaaggtatgacaagcccgatgatgtgttctacttgaaatccaaagatttaacaagtcaacagaagattccagacattaatgtcatacagccttacgatgtcgttattggtgcaaatccaaacgcacctgtgctggttttctacggttgccccacggttgacaacctcgattttgaagagtttaataggaatctatacatggaagctatgaacgaagaggcgaaaattagatttatctggagatcaacatgttctcttgatggagaaagtgtggagtatactttgaattttcccctcgggataaccttacaaaatggttctaatttgaactctatacctcaattgaagaaaatattatccaccatctctaatgacgtgtcagttgaaacaaatcacgagctttatgatttggatcctgaagagttacatgagctcgatttaaaggtcacgtcgtcgatctcgaaattttatcaagagaaaaatgatacgctagctactttacacttcaccaagaatatcattaacaactttcctttagtctctaagcagctaacagagattgtacttgacaacgaagacattaaagctagcaatgaaaaactaaattccaagggcttcgactataacatgttgggtctctatgtcaatggtcaaaactggaaaattacttcgctggacccatataatttgcttaatgctttgaaaattgaataccagaacttactgaaaattacaaatcttctacaaacgcacgagtcctcgaaaggtatgttagattccaagtttctactgaacaggttctctcaattctctctggggaaattacaaaacttacaaccgattaaaatggatctccacactattccggggttctcagattcggtgatatacttcaacgatattgaggccgatccacaatataacgaattaatagatagcgttcaagcgttctttgaaaaatcaaaatttggcgagttgcctgaaataagacaaaactggtcagaaatcatatttgttatagactttgctcatttagaagataatgacgtcaaggaggcattgagtggattagttcgtgccattaatgttatctttcaaggctatccacaaagagtaggacttctcccatataattcaggtagtgatgattccgttgttaataaaatatatgaactcaagaattcaactaacggcttggcagaattgaaaacatttttggaaacaatgctgcttgctgacggtttaactgccaacacagatgcgtcaaagtattctccagtcccagatgttcatggtttactcgatgaacttcaaattggtgaaacatcgattataattaatggtgaggcttatccattcaaaaagaatacctggaactatttaattgccaaagttatcaagaaagatactgaatttatacgtaaagaattgagtgtttcctccccaaaaaacaaacaagtaaaggtcagagacttgttacattataagtctgcaaatttgagacacaataaatatacgccaaattattttgctgattcgttgtactctacagtcaataatactgcattagaaaatattggtaaagatagagtaacgacatataccaaagataaaaggtacaatatactacacactatcacattggttgacgacttcaattctattcatgccttggaaagactgcagaatttgctgggtagttcttttgttggtgtgagggttagggtcattcatttaggtgatttatcaaacgcttggactcagctgcaacatagcttttccgacagcgattcaacaagctccataaataaattgatcaataacttgaaagtcaagaatggaaaaagcaaaacgtcgagaaaaaatgccttaaatcaactaggactccataaatggttcccagatatcccattatttgaactggaaaagggcacgttcattgttttgaacggaagatttattcatcttgatcctaaggaggtcccagaaacaaagcattttgaagcaattataaaaagagaagcggtcagaaccatcgattcagtgttctctttagacctacttttcccaggcttctcacaagaaagaatggatcctgactttattgaaatgacttcctctatcctaaccaaattattctaccagagtacaaatatctatggcaacggtattgattatactactgagagtagcttgccgagaatggatttgaatcagttcttcgaaccaaataacttgactatatttgatgatggaaaatcatctcctatcgatttattgctaattttagaccccctagaagaaagatctcagttgattctctctcttgttgatcaagttaagcatttgaaatttattaatgtacaagtgattttaatgccgacagtagatttgaacattgttcctatcaggagactttatgttgatgacagagaggttatcaaactggtaacttccgagaccagcctggttgattcagaagtggatatggaaatggacgccccaaagtcctttgtgatagacagcgagtttcagctgaaggaattgctcatagagctgcatgctttttccaacaaaacggctctttcagccggcaatattgatggtatagggggcgtatgtctggaacttgtcgatcatttgggaaatattatcgacaaaaccataacgatggacacctttgggtacggacagtttcggaccgacaggtttttaaagggctgctctatcagaagctgtgatccaaggtatactgttcactctttttctactgacgggcatcccgggtttataccatccaattctctagatatactatcgtacaatccttatagaatcgctgtgaaaataactgaagaaccctcatacggggaagagcacaaggaagatggcagcgatgacgcaaccatcaacatcttctccgttctggaaccagggctagatgaggaagaaaagtacaaacaaatggttttgtccatactgtccaagtgttctaaattgcagcaggtaaatttttttattttagagcaacaatctatttccgattcgctaaaaaaattctgcgaatacgtaaacgcctccggtgaaatgagaggtactatcactttcttaaagtacgaatggccacaatggttgaggccgcaaagattctcttcaagaagaagggatgtttctaaatttttatttttagatgtcattttccctcagaacatttcccaagtattgtacatgacaccaaatgaaaccccgtttgatccatttgatctgttccaatttcaagggctcaagcgggcaccattaggattattcagaatgagcggtaatgggtattggaaagaaggttattgggaaaaaatgctaagggaaaataacttagaattttactctactgagccaggctttcttgtaaacttggaaagatttcgtcaactagatgttggtaataaatacagaattcactaccaacgtgtatcgtctgatgccagatcactggttaacattggtcaagacttagttaataatctacaacttgaggttccaattaggtttctcaaggcgtcctataaaagtaaattgattactgatgatgaacatgtctcagaatggaaagaaagaattgatgccttcgtatcttcttctagtgatggaaaggcttctgaagaaggtaaaagtcgcaacaaccaaggttgcgaggattctatacctttgcatgatgaattatga

SEQ ID NO: 2503 - DNA, 2280 bp, Saccharomyces pastorianus
atgacagcgccattgtggcaaaataagaatgagaaaaaccacactgttgaacgagtcttatcaacagatatgaccgataacattttgagtagcaccagtacaagcccaaaggaagaagactctagaagctcttccgccgttgacatacgatccggaacagtgatcaacactcctgacaatgttagcagtactaggaagaggcttgcatgcacaaattgtagaaacagaagaaaaaaatgtgacttgggatttccctgtgggaactgctctaggttagaattagtctgtaacgttaatgatgaagacttaagaaagaagcggtataccaacaagtacgtcaagtctttagaaagccatatagctcaattggagaccaatttgaaaaaccttgttcaaaaaatctatcctgatgacgaccaaatgctgaatcgaatgatggtaggagatgttatgtcagttttctcagaaaggtcccaagtaccagatgaatattctgatcaaacctcgccgcttccaatccccgcaactagaggtacgtttattattgacaatgacaaagccaatcaaacgccatcgtcttttagaaaaccaacacctacatctaccataaactctggtatctttgattcccaaaaacaggatttcgctaattcgcttgatggccgattacttttaccaaggtcaataactccacaaggtgaaaaaaggaagaagccactagtaaagggaagtctttatcctgaaggccccgtaagttataaacggaaaccattgagtacgccagacggtttgttgtcggcatcttcattagtgacgcccgtagatccagttacttttcctgatggtataacagggaacaaccccacgcttgaaaatggcagactcaaaaagcgtatatctgatttgaagaccactgtgattgtaaggggattgaatgacgataatcctaactctctcaataacgatccaaggattctgaaatccctctctaatttttataaatggttatatcctggttacttcattttcgttcacagagagagttttctctatgggtttttcaatcactctaaaaataactacgaagattctaattactgttctgtcgaattgatttatgccgtgtgtgcagtgggttcaaggttaacaccagatttacatgagtattcagaagtgtattatgaacgaagtaagaaaacactattacaacttgtctttgatgagcaaagtacggcgcgcatcactacagtgcaagcgttgttttgcttagctttctacgaattaggaaaaggtaataatcaattaggatggtatttttctggtctggctattagggtcggctacgatatggggttccaattggaccctaaagtctggtacattgatgatagtaatctacagttgacccaaagtgaactggaaataagatcaagaatctactggggctgttacatagcagatcattttatctgcctaatgttgggtagaacttccacgttaagtgtcagtaactcgaccatgccagattcagatgaactgccagaagtaaacggtacggaagagtttaggtttattggaagacatgttttacagatttcactgccattgaaaaacttgataattttatcaagacttgtacaaattttcacttccaaaatttttattgagtcagaagacatagcgcaaaaagtaaagtacttgaatactttcaactctcaagtttacaactggagacaatccctaccagagtttttgcaatggtctaagacgctcattgaggacgatgacgtatccactgaccctactatatcgtacttctggtattactactatatagtacggcttactttcaataagccgtttatagaagactcccatgaatcagagacagtggttatagagattattgatgatttgaagactctgttagacaatttcgggaagaaattcggaaattataccaaaggtaacctctaccaaatatacgcctgcctactggccatcaactgtctgaagaagctgaaggaaacgcgctccagtgagcaagattcgtggaatgcacaactagactttttcaaccacatcttttatacacaactgtccccgtcatacgaactgccgaagcgactacaagaagacacggagctggaaacagaacaagaaaaccagacgttgaaccaagtcggcaacataaactacacgcacgacttctcgctctcccatgagatcgatgatcttatcaaagagcttttcggagtaggcacgccccagaaactctaa

SEQ ID NO: 2504 - DNA, 981 bp, Saccharomyces pastorianus
atgtcacaagcaaaaagatctaacgagaaccgcgaagctacaaggttcatcaaaaagcataaaaaacagattacaaaccccattgatgaaaaagatgggacttctaactgtatagtgcgtgttcccatcgctctttatgtctctttggcaccaatgtatctagagaatcctttgcaagggatcatgaaacaacacctaaacccattagtaatgaaatataataacaaagttggaggtgttgtgttaggttacgaaggtttgaagattcttgacgccgatcctttaaacgaagaaaatcagtctgaaaaattgataaaaattacgcctgacacccccttcggtttcacttggtgccacgtgaatctatacgtttggcaaccacaagttggagacgttttggaaggttacattttcattcaatccgcttcacatatcggtcttttgattcacgacgcattcaacgctagtatcaagaagaataacattccaacagattggacttttgttcataacgaggttgaagaagatgccgacgtggtgaacatggacgaagatgatagatctcataataacgaagaaagcaaagataacaacggcggaaacaatagtctgggcaagttttcttttgctaacaggtctttaggccactgggtggattctaatggtgaacctgttgatggtaaattgaggttcacagtgagaaacgtttacactacaggtagagttgtttctgtggacggtaccttaataagtgatattgacgaagaaggcaacggctacaacagttctcgttcccaagctgaaagtctacctatagtgtcaaacaaaaagattgtattcgacgacgaagtttctatcgagaataaggaaagtcataaagaactagaactaccagaagtgaaagaagacaatggttctgaaatcgtatatgaagaaaacaccagcgaaagcgatgatgatgaatcaagcgatagtgattaa

SEQ ID NO: 2505 - DNA, 4995 bp, Saccharomyces pastorianus
  modified_base (3648)..(3679): a, c, g, t, unknown, or other
atggatatttctaaaccagttggttctgaaatcacatctgttgattttgggatcctaacagctaaagaaattagaaatttgtcagcaaagcaaatcaccaaccctacagttttggataatttgggtcatccagtttctggcggtttatacgatttagccttgggtgccttcttaagaaatttgtgttccacttgtggtttggacgaaaaattctgtcctggtcatcaaggccacattgaactacctgtcccttgttataatccgttattcttcaatcagctgtatatctatttgagggcatcatgtttgttctgtcaccatttccgtctgaagtcagttgaagttcatcgttacgcatgtaagttgagattgttacaatacggtttgattgacgaatcttacaaattagatgaaataaacttgggctctcttaacagcggtatgtacaccggtgacgaagctattgaagacaatgaagatgaattcatggatggcgaggataagcaatcaaaggatgtttcctccactttattgaacgagttgaaaactaagcgtgcagagtatgtcgatattgctattgctaaagcactatcggacggtaggactactgaaaggggttcttttaccgctaccgtcaacgacgaaagaaagaaattggttcacgattttctcaaaaagctattaaccagagggaaatgtgataactgtggtatgttttcgccaaaattcagaaaagatggtttcaccaagatttttgaaactgcattgaatgacaaacaaatcacaaataacagagtgaagggtttcattcgtcaagatatgatcaagaaacaaaagcaggcgcaaaaactggatggttctaatgaagaatctgcaaacgatgaagaaagtttcgacgtgggtagaaatccttctgctaggccaaagacaggttccacatatattttatctactgaagtgaagaatattttggaaactgttttcaagaaagaacagtatgttttacaacatgtttttcactctagacccaatctatcaagaaaattggttaaggctgattctttcttcatggacgtcatcgttgttccaccaaccaggttccgtttaccatctaagctaggtgatgaagttcatgaaaactctcaaaatcaactgttgtcaaaggttttgacaacagcattgttgattagagatctaaacgatgatttgtctaaattacagaaggataaagtctctctggaagatagaagagtgatttttagtagattaatgaacgcgtttgtcaccattcaaaacgatgtcaacgcttttattgattcaaccaaggcacagggcagaactagtggtaaggttccaatccccggtgtcaagcaagctttggaaaagaaggagggtttgttcagaaagcatatgatgggtaagcgtgttaactacgctgctcgttctgttatttctccagatccgaatatcgaaacgaacgaaattggtgttccacctgttttcgcagtcaagttgacttacccagaaccagtgaccgcttataacattgcagagttacgtcaagctgtcatcaatggtcctgataaatggccaggtgcaacccaaattcaaaatgaagatggttctttggtctctttgatcgggatgtccttggaacaacgtaaggcactagctaatcaattgttaactccttcttcaaatgtttccgcacatactttaaacaagaaggtttaccgtcatatcaagaacagagatgttgtcttaatgaatcgtcaacctactttacataaagcttccatgatgggtcataaggttagagtgttaccaaatgaaaaaactttgagattgcattatgctaataccggtgcttacaatgcggatttcgatggtgatgaaatgaacatgcatttccctcaaaacgaaaatgcaagagctgaagccctaaatctagctaatactgattcacaatacttgactccgacttcaggttctccagttagaggtttgattcaagatcatatttctgctggtgtttggttaacaagtaaagacagtttctttactagagagcaatatcaacaatacatctatggttgtattcgtcctgaagatggacataccactagaaacaaaatcatcactttgcctccagctatcttcaaaccatatccactttggacaggtaaacaaatcattacaacagtgctgttgaatgttactccaccagatatgccaggtatcaatttgatatccaaaaataagattaagaatgaatattggggtaaaggctctttggaaaacgaggttctcttcaaggacggtgcattgctatgtggtattttagacaaatcacaatacggtgcttcgaagtatggtattgtgcactcattgcatgaagtttacggtccagaagttgctgctaaagttttatcagttttgggtaggttatttactaactatatcacagctacggcatttacttgtggtatggacgacttgcgtttaactgatgaaggtaacaaatggagaactgacattctgaagacatctgttgatactggtcgtcaagccgctgctgaagttaccaatttgaataaagatacaccagcagatgacgcagaattattaaagagattacaagaaattttacgtgacaataataagtcaggtattctcgatgctgttacatcttctaaggttaacgttatcacttcccaagttgtctccaagtgtgtaccagacggtaccatgaaaaagtttccatgtaattccatgcaagcaatggctctgtccggtgctaaaggttctaacgttaacgtttcccaaatcatgtgtttgctgggtcaacaagctttagaaggtagaagagtgccagtgatggtcagtggtaaaactttaccatcattcaaaccttatgaaacggatgccatggccggtggttatgttaagggtcgtttctattctggtattaaacctcaagaatattatttccattgtatggctggtcgtgaaggtttgattgatactgccgtcaagacatccagatctggttacttgcagcgttgtttgacaaaacaattagagggtgttcatgtatcttatgacaacagtataagagacgccgatggtactttagtgcaattcatgtatggtggtgatgctgttgacattactaaagaatctcatatgactcaatttgagttctgtctggagaactactacgcattgttgaaaaaatacaatccatctgccttaatcgaacatttagatgttgaatctgcattgaagtactctaagaagaccttgaaatacagaaagaaacatagcaaagaaccacattacaagcaatcaattaaatatgaccctgtcttggccaaatacaatcctgctaaatatttgggttccgtttctgaaaacttccaagataaattagaatccttcttggacaagaattccaaattatttaaatcagcagatggtgttaatgaaaagaaattcagagctctaatgcaattgaagtatatgcgttctctaattaatccaggtgaagctgttggtattattgcctctcaatccgttggtgaaccttcaacccaaatgacattgaatactttccattttgcaggtcacggtgccgctaatgtgacnnnnnnnnnnnnnnnnnnnnnnnnnnnnnnnntgaccgcttcttctgctatcaaaactcctcaaatgacattacctatttggaatgacgtttccgacgagcaagctgatactttctgtaaatctatttcaaaagttctactatctgaagtgatagataaggtgacagttactgaaacgactggaacctcaaataccgctgggggaaatgccgctcgttcctatgttattcatatgaggttttttgacaacagcgagtatagtgaagaatatgacgtttctaaggaggaattacaaaacgtggtatctacacaattcatacatctgttggaagctgccattgtaaaggaaataaaaaaacaaaaaaagactaccggaccagacatcggtgttgcagtgccaagattgcaaactgatgttgcaagcagttcaaactctaaaagattgaaagaagataacgatgaagaacaaagtcacaagaaaaccaagcaagccgtttcatatgacgaaccagatgaagatgaaattgaaactatgagagaagctgaaaagtcttccgacgaagaaggtgtcgattctgataaggaaagtgattctgactctgatgaagatgaagatgttgacatgaatgaacaaatcaacaagagcatagaagaagctaacaacaatatgagcaaattgcaacgtgatcgtcaatcagccatcatttctcatcataagttcattaccaaatacaatttcgatgatgaatcaggtaaatggtgtgaattcaagttagaattagctgcggaaaccgaaaagttgctgatggttaacattgtcgaagaaatttgtaggaattctattattagacaaattcctcgcattgatcgttgcgttcatccagaaccagaaaacggaaagcgtgttcttgttactgaaggtgttaatttccaagctatgtgggaccaagaagcgtttatcgatgttgatggtattacatccaatgatgttgctgctgttctaagaacatacggtgtagaagcagccagaaataccgttgtgaatgaaatcaataacgttttttcacgttatgctatctctgtttctttccgtcatttggatctaattgctgatatgatgaccaggcaaggtacttatttagccttcaacagacaaggtatggaaacatctacctcatcgttaatgaaaatgtcctacgaaaccacatgtcaattcctgaccaaggccgtcttagacaatgaacgtgaacaactagacagtccttctgctagaatcgtcgtaggcagattgaataatgtcggtacaggttcattcgatgttttggcaaaggttccaaatgctgcttaa

SEQ ID NO: 2506 - DNA, 966 bp, Saccharomyces pastorianus
atgactattctagagcagctcaatgatgcagacatccctcaaaggctagataaccacatatttttcggttccatacattctttgacgcgtacgaatttcctactagaaaacggcatcaggtatatcattaatgtcgatatacctactgaaacactatcacatatctatcatgagcttcgcccaagcttgttcgatgaaacagtcatcgtgaacatcgacaattttgactctcaaatatcaatggagaacgatttagtgcgttcctaccattggtataatagttcccttctacagcagttaattcattacctcgatttcttggacgatattaataataatggtgaacctctaactccaccaccagaatctcactatcgaaatgcatacgttcaattcgatcatggctctaatgattccgtatcggcactggataatttgctgtacggtaacaagtctgaatattctcgtacaaatattttccgagtagccaacgaagctaaattccaagtctttaacgatttgatcacaattttcaaatgctcaatcgctcaaaacgggaacatgaacagtaacatactcattgtttcaggaaacggtaataacgacgaaaatttaataagtttattgatgtctaccgtcttgaaggcaaacccaacttttaacgtctaccaagctttacaattcgttaaatccaccactgtaatccctgacactgtaagagacgaaaagattctatgggccccggggttcatcaactatcaagaattaatcaagaaaaacgaaatgtattgggggttaggttctcagaagggtctcaaacctacgtcctttgcctctcccatctccaacatggaaaggaaacaaagaagacgcgacgactcaagtattgtcagaccaaagctaccacaacaacaacaaagttcgttctgctcaatagagagacccaagagggcccgctgcgattaa

SEQ ID NO: 2507 - DNA, 882 bp, Saccharomyces pastorianus
atgaattctattttagacagaaatgttagatctagcgaaaccacattaattaaacctgaagctgaatttgataactggttgtccgacgaaaatgacgggaccggtaatctcatctccaacaaagactcttcatcggttctttctgcatcttcctccacatggttcgaacccttggaaaacattatctcctctgcatctagttcctcgataggctcccccatcgaagaccaattcatatgttcaaataatgaacaatccgctcttttcccaacagacgagtttttcagtaatacttcctcttactcgaattctcccgacgctaacaacagcaactcagtaaaaagagaagaggaagatgaagacgctcttttattagcggactttgaaccggcctctttacaatatatgcctaacatgatggacggtgacaacggcgatgataactcacttaaaaacgaaattgaattaaacgatccattcatgaaaacaggattggatgctaaggaaacgaaaaagagggccccaagaaaaagattaacccctttccaaaagcaagctcataacaagatcgaaaagcgttacagaataaacatcaacactaaaattgcaagattacaacaaatcattccatgggtagcaagtgaacaaaccgctttcgaagtaggtgattccgtaaagaagcaggatgaagacggtaacgaaactgccgccgctactccacttccagcaaccgccgctaccagtacgaaactaaataaaagtatgattttggaaaaagctgtcgattacattttatatcttcagaacaacgagcgactatacgaaatggaagttcaaaggttgaaaagtgaaattgatactttgaaacaaaacagaaaataa

SEQ ID NO: 2508 - DNA, 1878 bp, Saccharomyces pastorianus
atgctgaatctatcgctacccttccataataataaccgacacagcgcgggcgtctcgcccgcgcagaccgtagtcaccttcacggacgccgccgtcggcggcgccgacaagaaggacgccaacgtcgtccaggtgacggagtcgtcctcctccggctcgcgcacacagcactacgaggcggaaaaggacgacgccatccgcatggagaagatctccaagaacctgtctgcgtcgtccaacggcaccgttcgcgaggaactcgacctggaaaagtcgccctctgcggacggagacgccggtccgccgcgcctgaagcaaggtctgcagtcgcgtcacgtgcaactgatcgcactgggtggcgctatcgggaccgggctactggtcgggacctcgtccacgctgcatacatgcggccccgcggggctgttcatttcgtacatcattatctccgcggtgatctacccgatcatgtgcgcactgggcgagatggtgtgcttcctgcccggagacggctccgacagtgccgggtcttctgccaatctggtcactcggtacgtagacgcgtcgctgggattcgctactggctggaattactactactgttacgtgatcttggtggccgccgagtgtacggcggcctccggggttgtcgagtactggactacctctgtccccaagggggtctggatcaccatcttcctgcttgttgtcgtgctgttgaacttctcccccgtcaaagtatacggtgagtccgagttttggtttgcgtccatcaagatcctgtgtatcgtggggctgattattctttcgttcatcctgttctggggtggtgggccgaagcatgatcgtctcgggttccgctactggcaacacccggggtccttcgcgcatcatctcacgggcggctcgctggggaacttcacggacatctacaccgggatcatcaagggcgccttcgcgttcattctgggcccggagctggtgtgcatgacttcggccgagtgtgcggaccaacgccgcaatattgccaaggcgtcgcgccgttttgtgtggaggctgatcttcttctacgtgctgggcacgttggccatctccgtgattgtgccctacaacgatccatctttggtcaatgcgctggcgcagggcaagcccggcgccgggtcttcgccttacgtgatcgggatccagaacgccggtattaaggttctcccccacatcatcaacgggtgcattctgaccagtgcgtggtccgctgcaaacgcctttatgtttgcaagcactagatcgctgctgaccatggcgcagacgggccaggcgcccaagtgcctcggtaaaatcaaccggttcggtgttccgtacgtggccgtgggcgtgtcattcttgtgctcgtgcctggcgtatttgaacgtgtcttcgtccactgcggacgtgttcaactggttctccaacatcagcaccatctctgggtttctgggctggatctgcgggtgcatcgcgtacctaagattccgcaaggccatcttctacaacaacatgtacgaaagactgcccttcaagacctggggccagccgtacaccgtttggttctcgctcacgatcgtgtccatcatcaccatcaccaacgggtacgccatcttcatccccaagtactggaaagtggccgactttatcgccgcctacatcaccctgcccatctttctcgtgctgtggttgggccacaagctctacaccaggacctggaaccactggtggcactcggtgtccgagatcgacgttaccacgggcctggtcgaaatcgaagagaaatcaagagacctcgaagaaatgagactgcctccctccactttcagggagaagttcatggacgcgctgttgtaa

SEQ ID NO: 2509 - DNA, 3054 bp, Saccharomyces pastorianus
atgtctactacccagagtttgctaagctcggtactgtctggagtgcgcaatgtgtctcctgacacgcaccagcagacgattgtcgcgattaacagatttcaagacgatccggccctgctggactccatagtggccaactgtgtgccccctttggtagattcgttcttccacgtgtccctgcaagatcagcggctcgccgcagaactgttctacaatcttgacaaaatctcccactcaatggtccttaaatcactagatacaaatatttttagattagacgacatcgtacactatttacacaaccaagccccgccctcttccttcgccgacgtcttgtgcatctatctaaacctgtcttggctcagcgtgattctgctctccccttacactttcaaagacaggttcgacgaaactcttcgagcatcagctcggttcgacacctacccgatctgcgtccctccgatctgtaagatcaaggccattctatacttcaagaactacacgcatggcttcgaccagatcccagaaccggatcgctcaaacgtccgtctgctcaaccagtttctgaaactgttcgttcgctcgcagaacgcaagaacttacttctcggaggagaacctgctgcatctactgcaccttgccttgtccgcccaggcaatcaagctcttaccgaaactgttccgggtttcgtacgaccacgcatcccacaatgtcctcgatgccatagtggaattttttcaagaacatctggattcgagttccacggatacgcgcttccagttgtcgcactcctttgccaagatcatcaagttcctccaccaggtggacccatccacgtccctcgaactcagcgggtacaccatcgaaaacaccgtttccatgctacaggagcctttggactccatcgacagcaacgagctacacacctctctcttggttattgccgaattggccctggccaaaaccctccccacagaactgatcaatcaggtcctgacccagatcatccccacgacctgccatttccagcaatctcaattccagatcatcaagggtcaccacattagagactcaacaaatttcatcatctggtgtataatacgatcaaataataacaacttggcacctcagatactgaaatccctactatctcacctactgataaatgcctttttcgatccagaactcatcatcagatactcgagtttcgctgctctccaagaactattgggcaggtccaacaaatctctggcgctggaccaaactgatatagcctctatactgcaggcaaactggaaagacttgccaagctcgtttgaagacaactcagacttgatccgtaaactgttccatcctgggagcaccgccaacacgtctgtctgcgtgtgggacgttttcgttcattggtccttcaattggaatttactcgataatctacatttgaccacgatgaaacttaacatagatcacaatttactgcccttgatcaaatcgcaatttgacccgcctcatttactgcactccatcttaaacagaccgggaaactcgctcatacaaaactgtcaaatattatacttacatttgaaactatttgaaaatggagtaaaccacaccacgacaaggcagctttgtataaacattttccgaaataagatcagttcacatttcactttccaggggaaactgaagaaaaagcactacaatgataactcgcctgaaccttttgaaatgtttgtcattctcaagtactggcaattgatggggcaacgtgatttcgaccaggatttgttttggagattcgtcaccataatagcgccacagaaaaaactaaccttatacaatgaattcatccctactacgcaacaaattatatcccagtgcgtcggtctgaattataatacagcagttcaatgcattaagtcaggtaacgaattggcttgccactcaatatgccatttgcctgatcaagaaaaattttgctctcttttcttttctctgtttcctacgttgacatcacagtccaaatcgatcctgatagatgaacttgaaaaccattgggagaataaagtaagtgctataccgccaaattcttaccaaaagttttttgacatcattataaactgtctggatgactatacaataactcagcaaggtgatgtaggacgtctggtaagaatacaagcgctaaaacttatacaagcacattttgatttgttctctggtaacggcgacatcttaaaggcaaaattaacaagattagcggcagagcctgccctagagatcaaaaaattaagtttccagttactcgctccaactacctcgcaaaataccgaaatatctgactctttgatactcaattttcaacatggacaaggtcaaactaaagaattctggaaaggctacatgataagcgcgggtgcaataaattttgccgactctcagttgacttcatctatcgattcatttattgtgtattttaggtctttaaccgcttctcaacaacttgagctttgtaatgatctgatcagaataatcccaactgctaaacaagtgggcgagtccaaaaaacatgatttcaaacaagatcctttaacgggcggcatgcgatttgataccgtaaagttcgccatcaattgtttaaaattctggacaaggatcatggagtctgggttagttattttacaccaggatttcaattttcaaggcgtcttcgctaaattatataatctacacctactagattatgtgacattaagagttaacgtggttagattcttcccctttttggcgatctcttatcaccacacaatgaaagaaacgactgaaaaaatcacacttaatcttgtcaattccatttcaaaaaggctcttggttattgtgaagcgtgaatatatggcaacaaaatcaagattcatggcagatcaaaatattgctttacaaggtatattccaaatactactggaattggatgccatgaggcaacttgaaactttacagatggcttgtagaaatgcaaactttacgaatattttagagtctgatattactttatag

SEQ ID NO: 2510 - DNA, 2400 bp, Saccharomyces pastorianus
atggtggcatcatcgtcgaagaggacgctggatccaaaggaggactttttgcccacagacaaaacgccgttgaattcgaacaacaccataatatccgaattagcatcacgagataaatcaagctctagtaacacgactttaaaactaattgcgttgaacctcaaatcgataccagacgatgaagtgagttatatccagaacgttgagagactatctttaagaaaaaatcaattgacgtctttacctcatagcttcaaaacactatccaagcttcagtatttggatttgcatagtaacaaattcaaagatatcccatccgttttgtcacactgtcctcaactagaaatcctagatatgtcgtccaatgaaattgaatcgttgccggacgatatatcgccgttctggaaggacaatatgcgagtattgtcgttgaaagacaacaacgtatcaagcatctatagcttgaaatcgatcaccaaattgaacaagctgagcgttttagatttagaagataacaaattacccaaagaagagcttgaccaagtacaaaattacactccatttcatgcaggcatcaccaaagaagagtattgggcaattgccatatcgcgatatttgaaagaccatcctatccaacctaccccagaaccgaaaatatctagagcagccaaaagaatggggttcataaacacaaacttgtccaatggaacaatgagtgataacagcataatctcgcctgcgccgaacgtaaactcgagtctggttgcaccaataacagcgtcttcctcaaacgcaacttccgttgtatcttttaatggaggtacaacaaccaatactgaaccggatgctggtggtgcagttaatggaacagagctatacaatcattctaagtataatgattacttcaaaagactatcaatcttaccagaagagtcattgagtaatgagcaccaaaagatatcgcatgcagaactggttttatcttgtagaaaactgttattcagtttcacagagtgccagcaagccattagaaaaatcgcatcattctgtaaagaaaaggcagtggcagtgaacgttgtgtcattattatattctgttcgatcacacactgataatcttgtagaggttttgcagcaaacagagaacgaagataagtcacatgaccaagcattaatcaagctatgtcttacgatcattacaagctttaaacagattataacattactgaggaagaattttgaaatctttttcaaagaagatgatctctgttttatccgaatgttttatatgacgttaatgtgttcatatacggaaatgtacaacgcatggacatttatcaaagaagatgatcaaataaccagcgctacaagtaagccttccaagaaacactccttttcaagacatgatacatcgtctaatatcacaaacggtggaggcaccgtaataaatacagccagtacaacgagcaatggaaatggtaaactgctaccgaaaacaagaagtacgagagccccatcaacatctgcattgatttcgaacgctaacaatgtggcgggagatacgcccattctaaacgcctcagcagttccattgttatcgccaggtataaacggtggacatggtcatggtccgattgtaggccatcagaatgcaataagcagtagcaattctcaaacgagtatgaacgaaggaaaaccttctattcctaacgacagcatatcaagacaacaatttcttcaacacaaaaaatccactagcgaccctaagaaagatctgattacacacgaacctaaaccgcatccagtaatgaactcctccatcatcaacgcatcaaataacaccaactcgatggtctccaattccaatctaacacctccgccaatgaacgctgccggcaacagtagcactagtgtagtggaaacaaatattgacatccaactataccagacactttcaacagtggttaaaatggttagtgttgtatataaccaattaacatccgagatttctaagatagccattgctagtaccatgggaaagcaaattgtgacggactcgttggcacctaaaattcgtgatcttacagaaacatgtcgtcaagcaatggatttatctaagcagttaaatgaaagattaaacatactgataccaaatgattcgaattcagaaaagcatttgacccctctagagaaactaaagacgtgggaggtaatgaactcattcttaaaagtaataatatcgattttggctaacaccaaagtcgtgatgagcgacgtccctaatttgaatgaacttagacctaacttggccaatttggcaaagattactaaagatgttacagtaatattagatttaagttcatataaagccgtatctgtaagtgctaattctccagagtaa

SEQ ID NO: 2511 - DNA, 1584 bp, Saccharomyces pastorianus
atggccttggcaaattccagacctttgcaaataacaaccttggagaacgaaattcttcataactcgaattctccggttttccaattgagttcgatgggatttaccactcgagccgacactatatcgaatccaggtacggatcttgttggtaaccagccgagtatgaatttcgaagataatagtttatctggttcttcattttcgtcctcctcttctcaagagactaagacttccaagtctaaaaaggattctgctgttcttaaaaaagacaatccgttgttggaaatttctaaattaatacctgttactggcgagaggccaaaacccgaaaacagggactctcctctcgatgacgacgttcttcacgcggtatttgtaatattatgggaaatggaccctaaccaacaaggtatgactgttaaacagctgtgcgatttgcttttgcagaaacatccggatatgtcaaatttatcaaccaagttatcaaacttgatatcagcaaaactgaatgcttatgtcaagaaaattgaaaaaggggaaaagacgttaatttatgctttatcaagagaatggtcaaattcttcccctagaagaatgctatatatatacagagggatattatcgcctgattataaggagcacgcacaggctgtcacaatgcagctcaaacaacaactagaaaaatcgggcgactcaagcgactcgagctcaaatggcaagaaaaaaaaggatcttaacagtaatcaattagctagcaacgataattattcaggaccgatgacagatatgaaaaacctgtcttccaatagctccttctcaaaaaatttaaatgtcggaaatttggccttttcactaagtccagaatttaacattccttactctacgtcaccagtgtctttaaatctatctccagcaataagcaatagccagcagcaattgcaaacaccattagcgactacaccagcacctaagagtaaaaaaagaaacaatctagacgagggcgctaatgactcaatgacggaaccgaaaccaaagaagagcaaaccttcaaaggcaaacaaacaaacaaaatctcagtcatcgtcagctttatctacaccaaaaaaggtatcatcctctacatcactgtctgcttttgcagctgccaagaacatttcgccagaatctgccgtgacccacaatgcatcatcaagtacttatgtcactgctgctgctgctgcaccaagactatctaaactattaccaaaaaatggattcaagaaaaactcgcgcagttccttagaactggctgcaattcataaagtaatctccacacaaactccaattgaaagttcttcagagagttctgtgtatgacagtagtagcaactcaccgcttagtattaccaccgcaggttcttccactgaatcgttgtcagacttcagctccagccatgataatgaaacggaatcgaacccgagttctcaagaaccacgaaacgaagttacgaattggatgaagattgtaagaaatggattcttaactcatgatatcgaatctccagaatcaatcacattagatgacctagaaaatatattcaattga

SEQ ID NO: 2512 - DNA, 1896 bp, Saccharomyces pastorianus
atgattaggttgagcaacaaaaatttgattagaggcatgcaaatggcaactttgccaaaacctagtcatttgaccttacagacaactttgacaagaagatttagtctgacatgcaaggttctaaacgagacagatattactgaagaagaaaaggagcaactcaatgagccaagagcccgggactacgtggatgtttgtgttgttggaggagggcctgcagggctagctacagcaataaaaatgaaacaattggacaacgcttcaggaacaggtcaactgcgtgttgttgttcttgaaaaatccagtgtactgggcgggcaaactgtatctggtgccatattggaaccaggagtatggaaggaacttttccctgatgaaaagtctgatataggcattccgttgccgaaggagttggctactttggtgaccaaagaacatctgaaatttttgaaagggaactgggccataagtgttcccgaaccatcacaaatggtcaatctgggccgtaactatattgtttctttgaaccaagtggtgggatatttaggcgagaaggctgaagagttgggagttgaagtctatcccggaatagctgtttcagatctgatatatgataaaaacaacgcagtgaaaggtgtcattactaaggatgctgggatttcaaaatctggcaagcccaaggagacctttgaacgcgggatggagttttgggcaagacaaactgtactagcggaaggctgtcatggttccctgacgaagcatgcgctcaaaaaattcgaattaaggaaaggtagacaacaccaaacgtatggattaggtatcaaagaagtttgggaggttaaaccagaaaatttcacgaaaggattcgccgcccacactatggggtacccattatctaatgacatttatggcggtggtttccagtaccattttggtgacggactcgtcactgtgggtcttgttgttgggttggattacaagaacccctacgtttcaccgtacaaagaatttcagaaaatgaagcatcatccgtattattccaaagtcctagagggcggtaagtgtatatcctatgcagcaagagctttgaatgaaggtgggttgcaatctgtacccaaactgaatttccctggtggggttttggtgggagctagcgccggctttatgaatgtaccaaagatcaagggaacccataatgcaatgaagagtgggttgcttgccgctgaaaaaatctttgaatctatcaaagagctgcctgtattagaagaaattgaagatgaagatgtcaaggcagaaatgttcaccaaagagccaattatcaatttggagacatacgaagacgcattcaaacaatcatctatttataaggaactatacgaagtgcgtaatatcaggccatccttcagtggtcgatttggtggatatggaggtatggtttactctggtattgattctttacttctaaaaggtaaagttccttggacattcaaatttgatgacaaaaatgacggagagattctggaacctgccgccaattacaagcccatcgaatatcctaaaccagatggcaaaatatcttttgatattctgacatctgtctccagaacaggaacttaccatgatgacaacgaaccatgtcacttgagggttcctgaacaagatatggtgaaatatgccgagagaagctttcccgtttggaaaggtgtcgaatcaagattttgccccgcaggagtttacgagtttgtgaaggatgaaaagtctcccgtgggtacgaggctccaaattaactcccaaaattgtatccattgtaagacttgcgatatcaaagcaccaagacaagatattacatggaaagtccccgaaggtggagacggaccaaagtacacactgacttaa

SEQ ID NO: 2513 - DNA, 708 bp, Saccharomyces pastorianus
atgactgatagaaatttttctccacaggagggccaggcgcctcgaggttcaattccggaaggattcaacgccaatacgatgattgcaagaggggatataaatataccaagacaacaacaacaacaaaaggaagaggaaaatacggggctgcccgtttctgaggaggaattccagatggtacaggaactgcaggccatccaagcaggtcatgaccaaataaatctaccgccaagcggtcgagggcctcttgagagcaatgacaactgcgatagcgatggtgcagagggcgatgtagacgacgaagacgaggagtacgacgtgtttcgaaacgttggccaagggctggtgggccactacagagagataatgatacgctactggcaagaattgattaacgaaatcgagtccaccaacgagcctggctccgagcaccaagacgacttcaaatcgcactcgctgccctttgcaaggattcggaaagtcatgaagacggatgaggacgttaagatgattagtgcggaggcccctatcatctttgccaaagcgtgcgagatattcatcacagaattgaccatgagagcttggtgcgtggcagaaagaaataaaaggcgtactttgcaaaaggcagacatcgcagaggcgctgcaaaagagtgatatgtttgactttctcatcgatgtggttcctagaagaccactacctcagtga

SEQ ID NO: 2514 - DNA, 1587 bp, Saccharomyces pastorianus
atgaaacacccgtatgaggaattccctacaggatccaagtcgccatacaacatgcccagaggagcccatcctggcgctgttttgctctcgccacaatcatctgccataaacaacaataacaacagtgcgggcagcaacaattgcaacaataatcagggcaattcatccgtggccacgaacgttttgtcccctcaatctcacagtatgtcgctcaatgatatgctggatcagcaatccttcatgctggatgccacaggttctatgccccagccactccagcaacaacaacagcagcaacaacagcaggcatctttgccttcccttaatattcaaacaatatcgtccacggcagctggttctgctatcgtttcccccatgatgcaatcaccaaaggcattacagtccactttatcttcaacgtcgatgtacttggattccttccagagatcttcaaataatattttgggtcttccatcgcaaaatagctcaatgcccttacagcaatcacgtcaaccgcaacagcaaccccaaccccaacctccaaaaaatgattcgaagacagccataaagttcagccaagatatcaaccaattgtgctcttggatatcaatgctgaatagtaaccaacaaaacactgtaatggacaatatcctctctgttttgcatgacgatgttttgaaatacactaaattgaaattagacaccttaacaaacacttcattcatgtcatcgcagcttcccgccatcgcatccccaatacctaacagggacgatacacagattttgaatatcgattctgttttttcttcaagtccaatcaccaatgactctgagaatactgataatttgctgtatcagaattggtcacctcaaccacattcaataccaattgcccaacctgtttacgataacatcactgactccggccaacggtccaaatcagcagaacctcattccaatacgaatccaaatctcattccacttcaaaagcaattcgatggtaacagtgccaaatacaaaaagtcaccatcggataactccgcttacgttgcacactccctttcaacttcccattcttactttcaaccaaagaaaaggtcaagcatggcgaatgagtacaactcccaccaccaccattcattgcatcatcctttacataattcaacttcatacttttctagcagtccaagatcatcaggaactgaagcattgagtaagtccaaccaaaatgtgtttaacactaccaacgaccacctcaatgttggtactggtgctacaagcactacacctgcatctacaccatctaacggaaacacaccactatcgagtaattcttcaatgaatccaaagagtttaaccgacccaaaattattaaagaatatacccatgtggttgaaatcgttgaggctacacaagtactcagatgccttaagtgggaccccatggagtgaactgatttatttagatgacaaaactttagaaaagaagggtgttctcgcattgggagcaaggagaaaacttttgaaggcttttggaatagttatggattacaaagaacgtgatttaattgatagatctgcttattaa

SEQ ID NO: 2515 - DNA, 873 bp, Saccharomyces pastorianus
atgacttcaatcggtaccggttacgatctttcgaatagtgttttctcccccgacggtaggaatttccaagtggagtatgctgtcaaagccgtcgagaatggtaccacctcaattggtatcaagtgtgaagatggtgtagtatttgccgtagaaaagctaattacttccaaactgttggtcccacagaaaaacgccaagatccaagtcatagatcgccatattggttgcgtgtactcgggcttgatcccagatggtagacatctggtcaatcggggccgtgaagaagcggccagcttcaagaagctgtacaaaacgcccattccaatccctgcctttgctgatcgtttgggtcaatacgtgcaagcgcacactttatacaatagtgtcagaccatttggggtaagtaccatatttggtggtgtagataaagatggcgcccacctttacatgttggagccaagcggctcatattgggggtataagggtgccgccacaggtaaaggcaggcaatctgcaaaggctgaactggagaagttagtcgatcaacacaccgaggcccttacagcaagggacgctgttaagcaagcggcaagaatcatttatttggcacacgaagataacaaggaaaaggactttgaattagaagtaagttggtgttcgctatcggaaacaaacggtctccacaagtttgtcaagggtgatttgctgcaagaagcgattgatttcgctcaaaaggagcttaacggtgacgacgacgacgacaatgatgatagcgataatgtcatgtctagtgacgatgaaaacgcgccagcagctacgagcgcaaacgcaaacgctacaactgaccaagagggtgacattcacctagaatag

SEQ ID NO: 2516 - DNA, 3012 bp, Saccharomyces pastorianus
atgtatttcaatggccccccatcaccgacaatgagcagcattagtaaaaagagaaataggctctccttcgtttgtcaagcctgcagaaaagccaagaccaagtgtgaccaggagaaacctcgatgtggcagatgcatcaaacaaaacttgttttgtatatacgatgttgccagacaaaaggcccctagaaacccaaataaagatgctaccatagcgagattgaagaaggagattcgctactggagaaacaaaaccgtggacctgacacaagagaagaaagatttctacacggcattaaacagatcaaccgaggaaccgagcaaaagtgttaaaaggatgggcaaaagctctctaaataacacctttccaataagtctatataagacccatcccagattgattatgaccaaggtaatgaaaagggagatcaaccctttgtcagagaaatacttgatatttcaagatacatttctcaaaaccctaattgcttctgtacttttgaattcgtccagaaattccatgatccctgctttaaatgccgatatcagtagctcggggacacaaccatgcgtgagaaataatgtagtgaaaatgagggatgttcttttgaaaaattcgaagtacgaatcacaaagaaagtccatcaatcagtttactgataggcttttacagaaaaaggatccagaagaacaagcggcgataaataatgtgatttctttgctctacagtaacaatgaatcatcatatctggaggatacatgctcttccgaaaacgattattctgatttattgaaaaactacattaccgaaatcgaaaagacaatccccccaaaagccattacagaactatacgtttctcatttttttgagcatatttatcatttaataccttttgcaaacaaagaaatgtttgaagagtctattcatataactgtacagtatgacgaattcgagaaggtacggttgtccatggggacaactctcttgcgaaataaaatggaaaatttatgcattttactgttaatactgagaatatcttatatctctttgaagtttatagaagaaaagattgaagactacagcccttatatcactaaaaaaatgttagagcaatatcccatacaaagcaaaataattttcttatcgcagcagatacttgcatctgaaaactggtgtgcgtgcgctaatgagaacactatttcatgcttactttatatttggtcggcatttgttttctccccaactgagggtgactttttattagagcaaccatccgatattattatcaaccttgtaattataatagggacgtccattggattacaccgtgatccgtccgactttccagccttgaatcatcccgaagtctcagacaaaaggctgctaaatttaagaagaatacaatggctatcaattatttctatggcatctctggagtcgagtttaaaaggtaggctattggtatctcccctttctatgattgatcttttcataaatgttcgagatccaaattgcgtagaaatctataaaggaagagtcaagaaggatttaacaggttccgaatcagatgaacaactgctagaaattcatgaagtatttttctaccgagctcagttggcactattcttatctgatttgaacaatataactatatcatacagtggttcagtcccaatggatacgttagaaaccttgcgtattaaagccaatgagctgttaaggaacaaatttcaattaaggaatgtggatataaatatctccgatgaagagaggacgtttcagaaattgagctttaattcagttttgaactcaataagtctgtcaggtcaaattttaggtaaactgatgatgctaagagcttcaatagccttgatgttatatttcgaaacacttgcaatggaaagaagcgaatgtttgcctttcttttacaaatatttttttcaatgttgtgcagataccatttctttgatgagattttttttgttatatttcaatggcagttatgagaaagttctttcatctctagtgtgctgtatcaccacaaaagttatacaagttgcagttcccaccacaatgttcaccctattagtgattataatgagagcggaattggccaagaatatgttactgataaaatgtaacgaatgcaatgcccgaggagacattaataacctccccgaaattaaggaaaaaatcaagttcttagatattatcaaagacaacttcgagaaacttttattagaggtatatcttcttgcctcccaacacctgaggttcaaatatttttacattttcaaaatgcttaccttatttgatgtattcatccaacggttaagaaaaggtcagctattttcaggattgtttgtaaaagtgaacaaagatcaaactacgaaaaaaattgccacaatgctggagttaactcttggtataaatctggacaagtctgaccatttaatcgatagattaaaaggcaaaaatcctactgttaactttagccttaaccaactaaaccaaattctcaaggagtttgataaaataagaaacattggcactactgatccacacaattctcttaatctatcaaagccgaacataaaggataatacacccacaatagagcttttactcaactccacaatggagaaacacagtaatgcaccatcttcaagttactcaaaagaagccgctaccctgggtggtacctcgactcgtgtgccggcgcataatagcggtaaccacagtgacggtgaaaaattaccctctttaacttattcgagtgaaaatagctgtgatgcacctaacctaaattttgtcgcaggaaacaatgactataattccaacgatgccaatgctaataatgataccgccgttagtgacaacaccaagtcttctagcaatttcaagaggcgcaacgacgctcctatgccttctttggatggattaatggatgtcccagacatctttggcagtcttgatttctttgattatgaccttctttttcagaatgactag

SEQ ID NO: 2517 - DNA, 2112 bp, Saccharomyces pastorianus
atgctacctattgatatgcttcttcgttgtattttcgttttaactatatggttccatcaggcacatgctatttcgattaatagctcaaattttcaggtttcgaactcattcacactactcaataatgcgtcgcaactgttttcggaacccttcgatatatccactaaatacttgaagacgtcagctttattgacttgtgtgagaaattcacaattttctgcatcgtattttgaagctgctttctttcccctaaataatacaatattctttgatattgaagcccaaacaattatgaatgagaacataaccataaaagcagagcttgtaacatacggtctcaatgtttataccaaaacttttgatttatgtgggatacaagataatttattatgcccactaaagcccggaaatatagaacttattggaagttatcaattggaaagcgcgatgacaagccaaattccggctatagcatatagcattcctgatttggatgcgtatattgtagtgtccgcatattcttcttctgataaaaaattagttaaaccgctagcatgtgtccaagtgatactaactaatggcaaaaccgtccaaacacaatacttgtcctggattctggtggcattaaccgcttttggagtggtgttttcaatcatttattctttgcaaggctatacagccacttcgacacgcttggcatcttattcgatatcgttggttttatatttccaaaacttggcaatcctttctatgatcagtgtgtcatttttaccgcccattgtcgccgcgtggacccaaaatttccaatggtctatgggtataatcaaagtagattttatgcagcgcttatttgactggtatattatggctacatctggttcccctacagttgtgtatcacaataaggacattctatcaattagtgttcaaaaacgagagttggatgtaagcagcaagactgtatccgcttcaagcaatttaaatggtattgaaagttctcaaagggacacattgctatatacttcaaacctgagaaatccaaagaattacctgtcaaaaattttaattttaagaggtattaaaagagtatcatataaggccggaattgaattgtcaaattttttcttgacaggattctctttttttattatctttattattatgatagtaataggatttgctacgttcaagttatctttgaaactactgcgaaagtttgaaatcaaagctacgaggtatttacacttccacatcaactgcagctcactcctccaagggacactatatcgagtaattctcataatctacccacaaatatcgcttttatcgctttgggaatttactcaaaaagactcagcagcagccttaatagaagcgattgccgtttttcttataacgacagctttgctgtcgtctgcaggtgtaaggatatggagacagatgcacaaatccaaaaagttttttggccactcaagctatctactcttcggcaactctgaatttctaaacaagtttggcttcctttattctcaatatggttctccaaaagcatggtggcttattgttacgttagcatacatgctcataagatctgttttagttggaactctacaaactcacggaaagtcccagtctgcgggtatcttcttaactgaagttgtttatctcgtatttttgtgttgggcgcgaccttatatggacaagataaccaatgtctttaatatcagtatccattcgttgaacttagtaaacgcattcttttttctatttttcagtaatttgttccagcagcttatggctgtttcctcctttatgggaataattttcttctttttgaatgctttgtttgccatctatctttccgttttcattctggtgggatattcttcggcaatatactacaagcaccctgacacgaggtacaagcctattgatgaccaaagacgatccttcctaaaaaatgaaatggatgatgatgctacttacgcattagtgccagaactacacgaaatgaaaaaggccgttcttgaatgcaacggcactcaaaaaccgcaaattaacaagatcgacctttgtaaacacagctcgaacaacgagtatctgtacatgtga

SEQ ID NO: 2518 - DNA, 1209 bp, Saccharomyces pastorianus
atgcgcatcaacaacgagctagcaactaagttttcggcttcgactgtccatttggaacatatcacaacagctttgaattgcctgacaccttttggcgcgaaagacgatgtacttatatttattgatgcagatggcctgtcgtttgtaagggagaacaaccatgttataaaaatacaattactactatcccgagagttgtttatgtcttattcgtataggaatgaaactgaagatcatatgaaactgtgtgtaaaaataaatcatattttagacagtgttagtgtgatgaatagaaactcagatgatattgtagagtgcactttatcgtacgatggacatggatccccatttgtgctcatatttgaggattcgttcatatccgagagagtggagtactcaacttatttaataaaggactttgatacaaatggattagaacttgatagagagagcataagctttgaggcgatcattaaaggtgaagctctttattcagcattgaaggacttgaaagaaatcggttgcaaagaatgctatgtttatgcgaagactgacgcaaacaatgataacgtatttgcactaatatccaaatcacagctaggcttttcaaagatcaaattaccaagcaacaggtcaatactggaaaaattacaagtttttgatggcgattccacaaccgtattagacgggtccgctgtaattgggttctttgattttacttcatttgataagattagaaagagtactaagattgcaagtaaagtactctttagaatggatgttcatggcgtattaagtgtaaatattttaagccaaacagacgatgtgattatcacagataccgcaagaccgtcaaacagtcgattggttactggtgtcggccaactgcaattgccaaaggattatcctggtatagttattgaggtttgtatgttggagaaagaatctattgacgaagtagcgcagacggaaatagagcttctgatggagactaatgaacttggtaattataacaattctaaaaaattcaccccaaataagaggtatgctgctgcatttgggaataacgaaggctccgatgagaacttactgcaactaaatggcaaaaaagtaaaattaccaccggaagatataagtgataaaaagaacgatagcgatcaagaaaacaactacacatatccaaccaacgacattcctttgttcttttaa

SEQ ID NO: 2519 - DNA, 432 bp, Saccharomyces pastorianus
atgtctgacgttgaagaagtcgttgaaattcaagaagaaaccgttgttgaacaaaccgctgaagttaccattgaagatgctttgaaggttgttttgaggaccgccttggttcacgatggtttggccagaggtttgagagaatctaccaaggctttgaccagaggtgaagctttattggttgttttggtcagctctgttaccgaagctaacatcatcaagttggttgaaggtttggccaacgacccagaaaacaaggttccattgatcaaggttgctgacgccaagcaattaggtgaatgggccggtttaggtaagattgaccgtgaaggtaatgctagaaaggttgtcggtgcttccgttgttgtcgtcaagaactggggtgctgaaactgatgaattatccatgatcatggaacacttctcccaacaataa

SEQ ID NO: 2520 - DNA, 1815 bp, Saccharomyces pastorianus
atgttaagtcccgaacgtagaccatccatggccgaacgtcgtccatcattctttaattataaccagaacgcgagtcctttggtggtcccacatttagctgggattgaagatcccttaccggctactaccccggataaagtagatgttttaattgtgggaacaggtatggtagaaagtgtgttagcggcagcattagcctggcaaggttctactgtacttcacattgacaaaaatgactattatggagacgcttctgccactttaaccgtagaccaaatcaaacgatgggtaaatgaagtcaacgaaggttcggtaagctgttacaaaaatgcaaaactgtacgtatccacgctcattggtagtggcaagtattcgtcgagagatttcggtattgacctctctccaaagattctattcgcaaaatcagatttattgtcaattttgattaagtccagagttcaccaatatttagagttccagtctttgtccaatttccatactttcgaaaacgactgcttcgaaaaattgaccaacacaaagcaagaaatattcacagatcaaaatttgccattaatgactaaaaggaacctaatgaaatttatcaaatttgtgctcaacagggaagagcaaacggatatatgccaaccttatgcagaaaggaccatgtccgattttttagtagaaaagttcaaattagaaaaaccccaagtcttcgagctaatattttcgattgggttgtgttatgatcttaatgtaaaagtaccagaagccttacaaagaatccgtcgatatttgactagttttgacgtttatgggccatttcccgcattgtgttccaaatatggtggtccaggagaattgtcacaagggttttgtagatcagctgctgttggaggtgcgacctataagctgaatgaaaaattagtgtcttttaacccaacgaccaaagtagcctcatttcaagatggctccaaagtagaagtttccgagaaagtcataatatcacctacccaagcccccaaagacagcaagcaccttccacagcaacaataccaagttcatcgcctgacctgtatagtcgaaaacccttgtaccgaatggtttaatgaaggcgaatctgctgccatggtagttttccccccaggatcgttgaaatctggtaataaggaagtggttcaagctttcattcttggtgccggtagtgagatttgtccagaaggaaccattgtatggtacttatcaacaacagaacaaggtccacgtgcagaaatggacattgattccgccttggaagcaatggaaatggctcttttgagagagtcttcatcagaattagaaaataatgacgaaattgttcaactgacgggcaatggtcatacaataataaattccgtaaaactgggccaatctttcaaagaatatgtccctagggagagattacagtttttgttcaagctttattatactcagtacacatccacaccaccattcggtgtagttaactcctccttttttgaatccaatcaagatttagaaaagaaatacatccccggtgcaagtgataatggtgtcatatacactaccatgccttctgctgaaatatcatatgatgaagttgtaactgcagccaaagtcctatacgaaaagatagttggtagtgatgacgatttctttgatcttgattttgaagatgaagacgaaatacaggcaggcggtgttgtgaacacaaaacagtttgaaagcgccattgacgacgacgacgacgatgttattatggagggttccggggaatttgtaggtgaaatggagatatga

SEQ ID NO: 2521 - DNA, 2697 bp, Saccharomyces pastorianus
atgcctctatcaaacacgtttggaacgcacagtttggaaacccactctttacatattcaaccagcaccgcacatgaaattgagtaaagaggaaaggtctcattatagggagcggtaccactcactagactatatatctaattatgtgtctgtatttgaccaagcaatgagctataatatcgattccaggattagaaaagagaatgagctcttattgaaaaagtactatgaatcaaggaaaccttttagcttcaccaacttcaggcaaggaagtgtaattagctcttcggattcttctacaggctttaccgaaagaacaaagatttatagtttcctaaacgattttattagtaactgcgttaatgaagtagatccatacacactaaaaatgacagtaagaaatagacatagcgctttaaacatggtcaacatggatgatgaacgtaaggacaaggatagcgaggacaatcttgaagagaatcctaataacgatcattttggtaggtctggtgatggttctttatattcgtcggaaagattggagatactccgctcctgctcaacaagatcatatttcaaatattataaaaagcttttgacagtagacctaaaggattgtgatattttgaaaagacataatttatggatgccaatgattgccagaaaatttaggtttatattaatatccaatgcagaaccaaaggatgcaagtttagcgagccccgttccaatacctattatatcgccagacttagatatttttcaaaaaaagacatgccctcttttcatcaatggtacagactgtgttcccaagagttatgatacgttttcaggttcttcagtagtcatgtcaattttttcagagttcaaattcccaccattaacataccattgttccgttgaattgaatgaccaactgtttattgtcgggggtttgatggcgtgccatcggtatgatgaagaagcagcggatttaaaagatttttatgttgatggcataaagaatctaccaccgccactattaccggacttaatcaataatccatccatgatttctaaccctcatttatactgtttatccttaacttcttccagactaacaagaccagacattgcaggttacattccccctccactggtgtgtagtcagggttgcaaattgacggaaaggcatatattcttttacggtgggtttgagatcaagtcggaaactcaagtagatgataagggaagatatttcataaggaagagagcttttttgaataacaccggctacattttagacacagtgacatttaaattttccaagatcgaattggtagctcctccataccaatttgccatttacaataatttctcaccgaggtttgggcatatgcagtcatcagtaagtaattctagtaataacttggctaatgacagctcctcgacaagcaccaagggtagaagatcgatcagcccatatcgtcggggtagtggagactacaagattgatgatttagtgggcccgccagctagtaaagattatttaccaagcgattccatgtcaaacgtgacaatcccaagatctacagatagtttttcttccaaaacttttagtacaggaacacattcttgtagctctgttaataccattattatctttggaggctatagtcagaccggtgatgataaatacgaagctatgaatgatatgtggaaaatagacatcccggtcatatctcgtggtaaacgtaattattacaaatttgctgacacggtgacagttactaaaattcctgttattgatgatccagaactatggccgagcagaagagcattttcagcatgctgtgttcctgattatttcacacaagaagcagaacctattgaaaaaaggcttttgagaaacttgaaaaacgacttttccatagatatggaaacccagccaggcaataagccatctcaaccgcttttcccaaacataccacattcaagaaaggagaagaaaaatgggcgcgatagtatgcatgcttccagttcaagcaacagtactagtgacgacgcctcgttgaaatctgctaaaaatacgaattcaagtccttctataagtcccaaacacacgccaccactgaacatgccgaagagaggcactccattcggaagagtggtcgcatttcacggggggtctgatcgctatagcgtttgctgcgatatgtggtggtttgatttcgattcggaaatttgggcgaagatagacctctttgctaaaacacaagatgagtctgatggtttggtacccataagcctctgtatggttgggcactctatgacgacagtgggtcgtaaggtggtgcttatcggcggtctacgacaagaagatgttgaccgattgtatatggatgaagccgttcccgaagaaaaagtatcaggtattccgctcggtagtggtgtaataaatgttgtggatttggatacacaatgtcttcagggctgtaaactaatacgatatgaaggggacactaaggattcagtcattatggactttcacctcggcgaaccccatcaagtattggccgtagcaggctcagtagcacaatgcaagggaggtgtgaccatggtgggcggggtggtagccggtcgtcaaaacatctcgaaactttatctgaggggagctgtcttacagttgattcttccaagtatgaatttggccaactaa

SEQ ID NO: 2522 - DNA, 1638 bp, Saccharomyces pastorianus
atggataaaaacacaggctaccaccaaaaatttacaactaccggggcggcggctgcttcttcaaggcagcttcccacggataataacgcagatacaaattttttaaaagtgatgtcggagttcaagtacaattttaacagtccgttgcccacaactactcaattcccgactccttactcctctaatcagtaccagcagacgcaggaccattttgccaacacggacgcacacaacagctccagtaacgaatcgtcactggtagagaacagtatcttaccacatcatcaccagcaggtacagcaacagcaacaacatctcggctcgattgtgccacccgcagtgacaagaacagacaccagtgagaccctggacgatatcaacgtccaaccttcatcagtcttacagtttgggaattccttgcccggcgagtttctggttgcctcccccgaacaattcaaggagtttttattagattctccctctaatagcttcaatttttttcacaagacaccggcaaaaacaccgcttcgatttgtcacagattctaatgctgctcagccgaccatagtagacgactctaatcaacaacaaaatatctttagcaacgcggaattgaacaatcttttaaaaagtaatgggaaaatgtcttcctcgttatctgccggtgcattctcgcgtactccgttaagcaaaatcgatatgaatctcatgtttaaccaaccattagccacatctccatcaaagaggttttcttctttatcactgacgccatatggtagaaaaattttaggcgatgttggtacgccgtatgcgaaggcgttgatatcttccaacagtgcgctggtagatttccagaaggcgagaaaggatatccatactgatacaaccaatattggctcgataaataccactaatatcttacaaagaacaccgtcaagatccaatggtaagaaaatattcatcaaaaccccccaggacgctatcaacggtactagcacactcaccaaggaccacgaaaacaaaccagatttgtatggctcttcgcctacaactattcaactaaattcatcgataacaaaatctatttccaaattggataaccccagaattcccctattagcctccagatcggataccatattagattccaatgtggacgatcagttatttgatttggggttgactagactacccttatctccaacaccaaattgtaattctttacataattcaaccgcaagggccaccgcattacaaattcctgaactacccaagatggggtcctttaggagcgatactgtcaccaatcctagcccaagttcaaatacgatctctttcaaaagcaaatctggtaataataattcaaaaggcaggatcaaaaaaaatgggaaaaaaccctctaaatttcaaattattgtagcaaatattgaccaattcaatcaagacgcatcatcatcatcatcatctttaaataataatacaaacactaatgcaggaatttcaaattcaagtatgccaaagaaaaaggctaataaacttaaaagatcacaatctttactttcggactccaaatctaaatcgcaagcaaagaaaaattgtaatccgaaacccaatgaaaacttattcaattcacaatga

SEQ ID NO: 2523 - DNA, 1560 bp, Saccharomyces pastorianus
atgtttagtagatctacgctctgcttgaagaagtctgccgcctccgtcggcagactgcaattgagatatttctcgcacctccccatgacggtccctatcaagcttcccaatgggttggagtacgaacagccaacggggctgttcattaacaacaagttcgtgccctccaagcagaacaagacttttgaagtcatcaacccctccacggaggaggaaatatgccacatttacgaaggtagggaggacgatgtggaggaggccgtgcaggccgccgaccgcgcgttctcgaacgggtcctggtctggcatcgaccccatcaacagaggtaaagccttgtacaggctggccgagttgatcgagcaggacaaggacgtcattgcgtccattgaaaccttggacaacggtaaggccatttcatcttccaagggcgatgtcgaattggtcattaactacctgaaatcgtctgcaggttttgccgacaaaatcgacggtagactggtcgataccggtaggactcatttctcgtacaccaagagacagcccttgggtgtctgtggccagatcattccttggaacttcccattgttgatgtgggcctggaaaattgcacctgcattggtcactggtaatacggttgtgttgaagactgccgaatccactcctttgtccgcactgtacgtctctaaatacatccctcaagccggtatcccacctggtgtgatcaacattgtatctgggtttggtaagattgtgggtgaagccattaccaaccacccaaagattaagaaggttgccttcacagggtccacggctacgggtagacacatttatcaacaagccgccgccggcctaaaaaaagtgacattggaactgggcggtaagtcaccaaacattgttttcgccgacgccgacttgaaaaaagccgtgcaaaacatcattcttggtatctactacaactccggtgaagtttgctgcgcaggttcaagagtgtacgtggaagaatccatttatgacaagtttatcgatgagttgaagaccgcctccgaatctattaaggtgggtgacccattcgatgaagccacattccaaggtgctcaaacctctcaaatgcagctaaacaaaatcttgaaatacgttgagattggtaagaatgagggtgcaaccctgattaccggtggtgaaagactgggcagtaagggttacttcgtcaagccaactgtcttcggtgatgttaaggagagcatgagaatcgtcaaggaagaaatctttggccctgttgtcaccgtcaccaaattcaagtccactgacgaagtcattaacatggcaaacgactcagaatatgggttggccgcaggtattcacacctctaacattaataccgctttgaaagtggccgatagagttaatgcaggtaccgtatggataaacacctataacgatttccaccacgcagttcctttcggtgggttcaacgcatctggtttgggtagagaaatgtctgttgatgctttacagaactacttacaagttaaggccgttcgtgcaaagttggaagactaa

SEQ ID NO: 2524 - DNA, 1365 bp, Saccharomyces pastorianus
atgtccgagccagaatttcaacaagcttatgatgaagttgtctcttcgctagaagactctactcttttcgagcaacatccaaagtacaaaaaggtcttgccaattgtctctgttccagaaagaattatacaattcagagtcacttgggaaaatgacaagggcgaacaagaagttgctcaaggttacagagtgcaatacaactccgctaagggtccatacaagggtggtttgcgtttccatccatctgttaacttgtctattttgaagttcttgggtttcgaacaaattttcaagaactctttgaccggcctagacatgggtggtggtaaaggtggtttgtgtgttgacttgaaaggaagatccaacaacgaaatcagaagaatctgttacgcctttatgagagaactaagcagacacattggtcaagacaccgatgtgccagccggtgatattggtgttggtggccgtgaaatcggttacttgttcggtgcctacagatcatacaagaactcctgggaaggtgtcttgaccggtaaaggtttgaactggggtggttctttgatcagaccagaagccactggttacggtttggtctactacacccaagccatgattgactacgccaccaacggtaaggaatccttcgaaggtaagcgtgtcaccatctctggtagcggtaacgttgctcaattcgccgctttgaaggttatcgaactaggcggtaccgttgtttctctatccgactccaagggttgtatcatctctgagaccggtatcacttccgagcaaattgctgatatctctagtgccaaggtcaatttcaagtccttggagcaaattgttggtgagtattccaccttcactgaaaacaaagtccaatacatttccggtgcccgtccatggacccacgttcaaaaggtcgacattgccttgccatgtgccactcaaaacgaagtcagcggtgacgaagccaaggccttggtcgcccaaggcgtcaagtttgttgccgaaggttccaacatgggttccaccccagaagccattgccgtttttgaaactgctcgtgccacagcctccacactaaaggaatctgtctggtacggtccaccaaaggctgctaacctgggtggtgttgctgtttctggtttggaaatggcccaaaactcccaaagaatcacatggagcagcgaaagagtcgaccaagaattgaagaaaatcatggtcaactgtttcaacgaatgtattgattccgccaaaaagtacactaaggaaggtaacgctttgccatccttagtcaagggtgctaacattgcaagtttcattaaggtctctgatgctatgttcgaccaaggtgatgtattttaa

SEQ ID NO: 2525 - DNA, 1548 bp, Saccharomyces pastorianus
atgtcaaaagggccctctctaacgcaaaaaaacctggaaacaagtgcggaaacaacgaaaacagacgatggagtattgttagatcagttcgagatccaagatgaaacccccaaatctctggtatgggaggctgccttcgtcggtgtcctgtgctcggctcaattgatgacacaggcaggacttggccaatcaatagcgcctctccatattatcggtgatagttttggaacgaagaatcctgggcaattgagttggtttgcctcctcatactccctcactgttgggacgtttattttgattgccggtagactcggggacatttttggtcacaggaagttttttattcttgggttcttgtggtatgcgctgtggtccctgcttgccggttttagcgtgtactctaacaagatctttttcgattgttgccgagcctttcagggcatgggtcctgcctttttactacctaatgccattgccatccttggtcggacatataagccaggaaagagaaagaatatggtctttagcctgtttggggcctcagctcctggtggattcgtccttggagcggtgttctcgtccatgttaggacaactcgcgtggtggccatgggcttattggataatgggcatcgcttgttttctcttagcagtagcaggttatttcgtgattcctggtactcaaatgccgagccgcaattcaccatctttcaacatattggaacgggttgattttgcgggatctgttactggtgtcattgggctaattctcttcaattttgcctggaatcaaggtcccgtggtgggttgggaaaccccatatacgtatgcgcttttaatagttggaaccgtgttcttgggcgtttttggattcatcgagtcgcgagcagcttttccattacttccatttgctgcgctttctagtgatgctgccttcgtgcttggatgtatagctgcaggatggtctagtttcggcatttggatattctacacatggcaattcatggaggactcaagggagcaatctcctctcctgtctagtgcacaattcgcacccgtgtcgatcagcggattttgcgcagccatcacgacaggatttcttttaagccacacgcctgctagcacggtcatgctttttgcgatgacagcttttactgtaggaatcatattgatctccacagctcctgtcaaccagacttattgggcccagacctttgtctcaatcatcgttatgccctggggaatggatatgtctttccccgctgctacaataatgctgagcaactcaatgccacacgagcatcaaggccttgcagcatctttggtcaatacggtagtgaactattcgatatccattggactgggtgttgcaggtacaattgagtctcaagttaatgacggaggatccaatgctctgaaaggataccgttgttcttggtacttgggtatcgggttgagcgggcttgggatttatgtcgctgcagtgtatgcatcgagcacatttgtgaagtctaagaaaaaggctaccgaaaagcaatttatagaataa

SEQ ID NO: 2526 - DNA, 1638 bp, Saccharomyces pastorianus
atggcttcttcagggcccaatgcacaaccatataaacgtcaaagagtccggaaagcatgtgtgccctgtagagagcggaaaaggaagtgtaatggtaaatcaccatgtgaaatgtgtgttgcgtatgggtatgtatgccattacaccgaagatgatgggttgttagcaccgtctcgtatgaatcaggtggaagaaatgcctcgtgatacagggaatacaccgtacgttcccttaaacattattaggaatgggacacatagtactgatacccagaaccttacaaatcgaaatattatcgatcgaactaagtctagatacacgatccagcattcagcagtcgctttccctcgtagtcttggcctcgagctccgatcaaccaaccccccacgtcttcattgttttgcttggcattgtgggatcagaccagaggaaaagccgaacttccatgtacctttgtctgatctagtcacaaaggaagagtattaccgcatctcaaaagtgtacttttcggttgttcatccaatctttgatatcgttgatcccgagcagctaggaaagaacgttgaggcatattggaacggcgacgcagaaacatcagagtatggtgctgtcattgcgggagttattgccttaggatcattctttatgggaagtcttggtcatcctcgagagacggatataatacgatacgcaaagggcatcctggatgacccgactttcagtcgcattccctcaatggagcaaatatccgcatgggttttgcgcaccatctacttgcgtgccactgcccgaccccatgtagcatggctggctagctgcttgactattcacctttcagaggcaattggcctgcatcatgagattgacagagaggatttagcgttgacaaataacgtctcactgaaaagaaccactgaggtcagcgaacatactcgaagattattttggtctgcatggtcgattaacatcattctttcatacgactatgggcgttcaagtgttgtgctgaataggattacttgcaagccagtcaaggagacagatggtaattatacgctctatttggtggcgttggcgcaattaattccacaagaaagtgtgaatgcaaatgtggcacaattacttcaagccttggcagcagttcacgaatcaccggatgcgcacccatttctatctttgaccaaggctgatatatgtctttctttttatcgaagacttcgcttgctaaatcatattcttgataaaagcgtcgtttcacaaatcatcgatattggcaacactgcattagcggcagcatttgcccttgtaaaaatagatcaagcgtggtggaacgtgttgagcacctccttccagtacgtctgcgtgcttctcgcgatagacactccagaaagtctttcccacgttgctgctgcgatgaggacgcttgataatattacacaagttttgggtacgcatatagcttttgaagcacagaagaccgcaaaacttcttcttgaggattcagtgaaaaaaaagaggcaagaaattcaacaacttgaacaagcgactcatcagagatcagctcccgaaactacccatttgcttgatattgactgggatgcactgctcgacccatctgacacactaagttttatgtaa

SEQ ID NO: 2527 - DNA, 459 bp, Saccharomyces pastorianus
atgaaattttcaactattttcggagctgctacaattgcgactgccgtcttggcggctgatgtgtcaagtgtaatgaccaccaagactattactgtcactaacggtaacaacgtgtacacaaaggttgtcaccgacaccgctgaccctgtcattacttacagtaccactagaaccgtcgttgtcagcaatagtgctggtgtttacaccaaggttgttaccgaaggtccagacaccacttctgaaaagagtactacaaaaacacttaccttaacaaatggttcaggatcatcaaccaatctttatactaagactgttacccaaggaattgaatcatctacatcctcttcatcggcttcctccgcctcttcgtctgcctcttcgtctggtgctgctccagctgctttccagggtgcaagcgttggtgcactagctcttggtttattttctttctggttatag

SEQ ID NO: 2528 - DNA, 603 bp, Saccharomyces pastorianus
atgaaattttcttccgctctagtcctatctgctgttgccgctactgctcttgctgagagtattactactgtcatcactgctaccaagaacggtcacgtctataccaagaccgtcacccaagatgctactttcgtctggggaggtgaaggttctgctgccacttctgctgctgaatcctccgctgctgcatcctctgctgctgtaacttctgctgctgcaacttccgctgctgcatcctctgttgctgtcacttctgctgttgcaacttctgctgctgcaacttctgctgacgaaggctctggttccagtatcactactgtcatcactgctaccaagaacggtcacgtttataccaagactgtcactcaagacgctacttttgtctggaccggtgaaggcagcaacacttgggcaccaagcacttccaccagcgcagaagctacatcttctgcctcaaagacttcagctaccactgttgcaacttcagcttccgctaaatcatccactactgctcaaatctcaagcttcactggtgctgccgatgctatcactgctggtactggtttgatgggtgctgctcttgccgccgtcattttgttataa

SEQ ID NO: 2529 - DNA, 2082 bp, Saccharomyces pastorianus
atgcttttagctaagttaatactgtttctggtgtatttggtaccaggttgtgtagcaaagccgaaaataagtaaaaaaagaacacagtgggatctgatagcaattaatgcttgtgctaaagaattggaattgtacaagtatgatacggacgctaagggtcaccacgcttctatttgcacttatgagcccgcattaggctcttggctacattgcgcgaaggaagtcctcgccagtaaaaacaaaagcaaaaaaacatttgaaaaaacatttaacaatataaaccagatttgtcgggattatcagaaagatgaaactattagtaatgatgaattttatcgaatcctttctaatgcgtctatcttcatccggcctattggcgaggcaaaggaaataataagataccccattattcctaacaagatctctctagataagtgggtatgggcttatttcggtccgttggataacttagacaaggggaatatatacggaggagcgatttgtttgtactggctaggggttctgtttattgcaactgtgtacaatttcttgaatttttcacgacttaaacaaacgatttttaagaacaaggtgtcagcatatctgcgaggtcacttagttcttccagcacttattcacaaccatgctatgtttgtggggaaatggtttttcgtcgggctagtccctactaggttggagacatctatcttactcggttatgttttgttacatggactttttctgagcacttacaattttgactccaatcagctgcttagcgatcacagaagccaaatgctcatcttcatttcagacagagcaggaatcttggcatttgcgcactttcctttgatagtactctttggcggcaggaacagtataatgacttggttgacaaatatacggtatacgtcattcataacttaccacaaatggttagggagatttatgttggtagattgtatggttcacgcaatggggtacacgtatcatgcgtacatagagaactattggaaatacgtcaaatacagtgatctatggacgtccggaagacatgccatgattattgtggcagtacttgtgttcttctcattcttcttcttcaggcgccattactacgagttgtttgttatagtacacatcattctggcaataaaattcttccaggagtccttgaaacattgccacaaactcgggtggagtgaatgggtgatagcgtgcgcagtattttggattggtgaccgcattttgcgattgataaagattgcgatattcggaatgccattagctaagttgaagatgtacggtgagtcgatgatagaggtgagaattgcaaagagttccaaaagttggaaagctgaggctggtcaatatgtctacctgcagtttttaaaaccaaaactattctggcaggcacatccgttcacagtcatggactctttggttgaggatggcgaattagttgttgtaataacaattaagaacggactgacaaaaaaattgcaggactatatattgcagaatgaggagtatgctgaaatgcgagttctagtagaggggccatacggacagagcactcgaacgcacttatttgaaagcctattattttttgctggtggggcaggggttccaggacctctgtctatggcgataaaggcgggtcgggaacgaaagaacgatgataatcagacgattaaatttgtatggagtgtaagaaatgctgagcttttggaagtgtacaaaaaagagataatggtgttgaaacagatggaggtggatgtggagatttactatacaggggaggagaaagatggtttgcgtgtggaagatgataccgccgccaataaaaatatcgaaggtagactgttgacgggttcggagtcagtggaagtagttacaaattttggacgaccaaaaatcgatgaagtaatcgaagaaggaatgaatggagtaaaatctttgttagttgtttgctgcggctcagaagggtttgtagacaaaactcgggaaataactgcaaaaaaggttgttgataatggcgaaaaatggatagaatatgtggaagagtttcaaaactggtaa

SEQ ID NO: 2530 - DNA, 1698 bp, Saccharomyces pastorianus
atgaaaagagctataccatttagccccaaagcgaacgtttccaaggtgcctaagttagatatagcacatgacttcggacagtatcattctgtgaataagaaatattatccaaatccaattactgcgaagagcgccaatcaattcaacaataagtcgagggctaagccaatagacatcctggaaaaactgcagaaaaaacacaaagcgttactcaaagacacttctactgttatacattggtttcggaacgatttacgcatacacgataatttggcgttgtacacatgtgttgaactatatcagcagttaaaggaaaacaatgcggatgccaagttgtatgccatctatgtcatcaacgaagatgattggagagctcatatggatagtgggtggcagttgtcatttattttagaggcattgaagaacttgcagaaatccttggctgagctacatatccctcttcttgtatggaaattcgacgattttaaaagctctttgtctaattcaaaggaatttgttacgttttttaaagaaaagtgtctggatttaacctcaggaaaaccggtggccattacagctaacattaaataccaaacagatgaactctaccgcgacattcggttattagaacaggacgaccaacggattcaactgaagttttaccatgactcttgtatcgttgctccaggtctactcactaccggtaaaggtactatttattccgtatttactccatggtataaaaaatgggtgttatatctgaacaaacataaagagaacggttctggaatatgtcatttgtacgaaattaaacaagcaaagtacaatgaaaaatttgagttggaaccgttcgattataaattaccagacgagtttgttgagtacattcccaaatcacagtggtctttgccagaggcttctgaggctgcagcgttgtctctattggatgatttcctacaaactaagagctcccagtataatcatgcaaaagacatgctttctttggatggaacttctggactaagtgcgtatataaccactggtatgatcagcacaagattcatagtcaatcaagcttcccaagtgtccaatggccaaattatggccaaagcacttaaggacaactcttctatccagaattttatcaaagaggtggcctggagagatttttacaaacattgtatgtgcaattggccatacacatctatggaaatcccatatcgacttgatactttggatataaagtgggagaatgacgcagcagtatttgagaagtggtgtatcggcaatacgggcatccctgtagtagatgctataatgagaaaattactatacacggggtatatcaataatagatctagaatgattacagcttcttttctttccaagaatctgttagtagattggagatggggtgaacgttggttcaggaagcacttgatagactgtgatttatcatcaaatatcggcggctggggtttttgttccagtacgggaattgatgctcagccatactttcgagtatttaatatggatttacaagcgaaaaaatacgatccagagatgaaattcatcaagaaatggattccagaattgtccaattctgaaggtcatcattcaaaagattacccagatccgttagtggatttgagggatagcagggaacgtgccctagaggtatataaaagcgctatgtga

SEQ ID NO: 2531 - DNA, 858 bp, Saccharomyces pastorianus
atgtcctctgatttagctgctgaattaggatttgaccctactttaaagaagaagaagaagaccaagaaggtaattccagatgattttgatgctgcagtaaacggtaaagaaaatggttcaggtgatgatctatttgctggattaaagaagaaaaagaagaagtccaagagtgcttccgctgacgccgagcctgaaacggagcctaccgacgacatagccgaagccttgggtgagttgtccttgaagaagaaaaagaagaagactaaggacagtagcgtagacgcgttcgaaaaggaattagccaaggctggtctagacaacgtcgatactgaaagcaaagaagccactccagctgctagcgccagcatccaacaagaggtcggtctaccttatccagaattattatctagatttttcaacattttaagagccaataacccagaacttgctggtgacagaagtggtccaaagttcagaattcctcctcctgtttgtttgcgtgatggtaaaaagactattttctcgaatatccaagacatcgccgaaaaattgcatagatctccagaacatttgattcaatatctatttgcagaattaggtacatccggttctgttgacggtcaaaaaagattagtcatcaagggtaagtttcaatctaaacaaatggaaaacgttttaagaagatacattttggagtacgtcacttgtaaaacttgtaagagtatcaacactgaattaaagagggaacaatccaacagattgttctttatggtctgtaaaagttgtggttctaccagatctgtcacttcaatcaaaaccggtttccaagctaccgtcggtaagagaaggagaatgtga

SEQ ID NO: 2532 - DNA, 1095 bp, Saccharomyces pastorianus
atgagttctgtcgtgctggaactgttccagtatttatgctgctgccgtggcttttccgatacaactatcagagtgaatgataaacgatatagaatacaaagattactaggagaaggtggactgtcgtttgtatatctggtacagctattgaagggttctctcattatggaaaatggtgttgttgcaccagaactatatgcactaaaaaagattatttgccctagcgtagagagtatttctaatggtatgcgagaaatagagaactacaagcgatttcaaagcccttatgtcattcaaagcattgactctcaagtaatgcaggagaaagatggctcaaagtcaatttatataatattacccttttatgcattagggagcttacaagactcgattaaccggagactattggaaggtacttttatatcagaagcggaatgcgtcaggataatgcttggagtgataagaggtttgctttgtttacacgatccggcatcgagacaggataataccaatcccagaacaactattgatacggtatctatgacttatagtgatgaaacagcgtttcttttagaagatactcctttagaaatggatatgctttcttctagtttaggtgcttcaattgcatacgcacatcgcgatatcacaccttccaatattctattttcgtcagacggattgccggtcataggtgacctcggctcttgttctcaagctgatattataattggaaacaggaaccagctcagagagctacaagaatgggtaaacgacaactgcacattaccatacacggcaccggaacttttggatttgaaattgaatcaggaattggattgtaaggtggatatatggtctctgggttgtacgttttatactttaatgtttggcatttctccttttgagcgagaagaacaaatacatggcgcttctataacctatgctatcagtactggcaagtacagtttcccaagaaattctcgattttctgagggacttctgaatgtgatcaagaaatgcattcaagtggaccccgtacaaagacctaccatcagtcaattgttaaatgctttacaagatttggagagttga

SEQ ID NO: 2533 - DNA, 1419 bp, Saccharomyces pastorianus
atgtcaatccaaactagtgatccaaatgaagcatcggattctttgaagtcgttgtcattgattgctgcccactctcatattacagggttgggcctggatgagaacttacaaccgcgtccaacttctgaaggtatggttgggcaattgcaagcccgtcgtgccgctggtgtgatactgaagatggttcaaaatggaactatagcgggcagggccgtcttagtggcaggtcctccttccactggtaagaccgctcttgccatgggtgtttcccaatctttaggtaaagatgtacctttcactgctattgcaggttctgaaatcttttccctggaactgagtaagactgaagctttgacgcaggcctttagaaagtccatcggtatcaaaatcaaagaagaaaccgaattgattgaaggtgaagttgtggaaatccaaattgacagatccatcactggtggccacaagcaaggtaagctgactatcaagacaacagatatggaaaccatatatgaattgggtaataagatgattgatggtttaactaaagaaaaagtgctagctggtgacgttatctccattgataaggctagtgggaagattaccaagctgggtagatcctttgctagatccagagactatgatgccatgggcgctgacacgaggtttgttcaatgcccagaaggtgaattacaaaagaggaaaacagtggttcatacagtgtcattgcatgaaatcgatgttattaactccaggactcaaggctttttggcgttatttactggtgacacgggtgaaattagatccgaagtgagagaccagatcaacacaaaagtggcagaatggaaagaagaaggtaaagcagaaattgtcccaggtgtattattcatcgatgaagttcacatgttggacattgagtgtttttcgttcataaatagggctttagaagatgagtttgccccaattgtcatgatggctacgaatagaggtgtttccaagactagagggaccaattacaaatctccacatgggttaccgcttgatcttttggacagatcgattatcatcacaactagtagttataatgagcaagaaatcaaaacgatcttatccataagggctcaagaggaagaagttgaattatcgacggatgccttggatctgttgaccaagactggtgttgaaactagtttgcgttacagcagtaatttaatctcagttgctcaacaaattgccatgaaaaggaaaaacaatactgttgaagtggaagatgtaaagagggcttatttgttatttttggacagtgctagatccgtcaagtatgttcaagaaaatgagtcgcaatacatcgacgatcaaggcaaggttcaaatctcgagtgttaagtcagcagaccctgatgctatggatactaccgaataa

SEQ ID NO: 2534 - DNA, 495 bp, Saccharomyces pastorianus
atgtcaacgcaactcgcaactaacatatacgctccattctacgctccctttttcgggtttgcaggttgtgctgctgccatggtgctttcctgtttaggtgctgccatcggcacagccaagtcaggtattggtattgctggtatcggtactttcaagcccgaattgatcatgaagtctctgatccccgtggtcatgagtggtattttagccatttatgggcttgttgtggccgtcttaattgcaggtaatttgtctcctacggaagactataccctcttcaacgggttcatgcacttaagctgtgggctttgtgtagggtttgcctgcttgagtagtggctacgccattggtatggtcggtgatgtgggtgtcagaaagtatatgcaccaaccaaggcttttcgtcggtattgttttgattcttattttctctgaagttctagggttatacggtatgattgtagctttgattttgaacactagaggctctgaatga

SEQ ID NO: 2535 - DNA, 657 bp, Saccharomyces pastorianus
atgtcacaaagtcactccaaaaaactggacgtaactgttgagcagctccgaagcatataccaccagttccatgatatcctcgaggagaaaactgacctgcatttgccaaagaaggatcacgacgatgatgctgtcagaagagaggtgcagatacaattgcaagagtttttgttgagtgccatgacgatggcctccaaatctttagaagtggtaaacgccgacactcagggcaagacggtgaagcagctaatcatggagtctcaagagaagtacatggagcccttcgatctggagctgaatgagcaagttaggaagatgtaccaagagtgggaagacgaaacagtcaaggtggcccagttaaggcaaacagggcccgccaagatcaacgaggtatacaacaacgccaaggatgaatacctgatgcatctagatggaagaatcggcgttctggaagccagaatgacagaccagcaagccgcggagcaagatgaaggcggcgaaggcgatgatcaagctgccgagactaactggaatgacattaaacacgattatgaggtctcgctcaatgagctgagtcaaacacaacaaaacctgcctcaggtgcgatacaacgtggagaaggtcaagcatctaatagactacctacagaaggattga

SEQ ID NO: 2536 - DNA, 873 bp, Saccharomyces pastorianus
atgagttataacaatccatatcagatggagacccctttcgaggaatcatatgaattgaacgaaggctccagtgctgccggtgccgatggccacgattttgtggggtttatgaataagatcagcgagattaatcgcgatcttgataagtacgatcacaccatcgaccaaattgattcactgcacaagaggcttctgaccgaagtcaatgaagagcaggcgggccatttgaggcattctttggacaatttcgtggcacaagcgaaagatttgcaatttaaactgaaaagtgagatcaaaagtgttcaaatggacgggatacacgacataaataaacaagcccaggcagaaaactccaggcaaagattcttgaagctgatccaggactatagaatcgtggactccaactacaaggaagagaacaaatcccaagccaagaggcagtacatgatcattcagccagaggccaccgaagacgaagtcgaagccgctataagtgatgtgggaggccagcagatattttcacaagcgttgttgaatgcaaacagacgtggagaagccaagactgctcttgcagaggtccaggcaagacaccaggagttgctgaaattggaaaaatccatggctgaactaacacagttgttcaatgacatggaagagctcgtaatagaacaacaggagaacgtggacgtcattgataagaacgttgaagacgcccaactggacgtagagcaaggtgtcggccacacagacaaggccgtcaagagtgccagaagagcaagaaagaacaagatcagatgctggttgattgttttcgccatcatcattgttgtcgtcatcgtcgttgtcgtgccagccgttgttaaatcgcgttga

SEQ ID NO: 2537 - DNA, 5649 bp, Saccharomyces pastorianus
atgaaaccggaagtcgagcaagaattagctcatattttactgactgaattgttggcttatcaattcgcatctcctgtgagatggattgaaactcaagatgtctttttaaaagacttcaacactgaaagagttgttgaaatcggtccttctccaactttggctgggatggctcaaagaactttgaagaataaatacgaatcttacgatgcggctttatctttacaaagacaaattctatgctactccaaggactctagagagatatactatacccctgatccatctgaattagccgcaaatgaagaagctgctaaggaagaagccccaactccagttgctgctgctgctgctccagttgctgctgccccagttgctgctgctgccccagctccagttgctgctgctgctgaaatcgccgatgaacctgctaaggcttctctggttttgcgtgttttggttgctcataaattgaaaaaatcactagactcaattccaatgtccaagaccatcaaggacttggtcggtggtaaatccactgttcagaatgaaattttgggtgatttgggtaaggaattcggttccaccccagaaaagccagaagaaaccccattggaggaattggctgaagctttccaagacaccttctctggtgcattgggtaaacaatcttcctctttgttgtcaagattaatctcttctaagatgcctggtgggtttactattaccgtggccagaaagtacttacagacccgttggggtttgccatctggtagacaagatggtgcccttttagtggccctatccaacgaacctgctgcccgtttaggttctgaagtcgaagccaaggctttcttggattccatggctcaaaaatacgcttccattactggtatcgatttgtcttcttctgccagtgcttctgctgctccagacgctgccgctggtggtgctaccattgatgctggtgctttggaagaaataaccaaggaccacaaggtcttggctcgtcaccaactacaagtcttggctcgttacttgaagatggatttggatggcggtgaaagaaagtacttaaaagaaaaagatactgtctctgaactacaagctcaattagattacttgaatgccgaactaggtgaattcttcatcagcggtgttgccacctctttctctagaaagaaggccagaactttcgattcttcttggaattgggccaagcaatctttactgtccttatatttcgagattattcacggtgtcttgaagaatgtggacagagaagttgttagcgaagctatcaacatcatgaacagatctaacgatgccttgatcaagttcatggaataccatatctctaaaactgatgaaactaagggtgaaaactaccaattggttaagacacttggtgaacagttgattcaaaactgtaaacaagtcttggatgttgatccagtctacaaggatgttgctaaaccaactggtccaaagactgctattgacaagaatggtaacattacttactcagaagagccaagagaaaaagtcagaaaattatctcaatacgtgcaagaaatggcccttggtggtccaatcactaaggactctcaaccaactattgaagaagatttgacccgtgtttacaaggctatcaatgctcaagctgataagcacgatatttccagctctaccaagcttgaattcgaaaagttgtacagtgatttgatgaaattcttagaaagctccaaagaaattgatccttctcaaaccactcaattagctggtatgattgttgaagatgccttggacaaggactctaccaaagaagttgcttctttgccaaacaaatctaccatttctaaaactgtttcttctactattccaagagaaactattcctttcttacatttaagagtaaagactcctgccggagactggaaatacgaccgtcaattgtcatctcttttcttggatggtttggagaaggctgccttcaacggtgttactttcaaagacaagtatgttttgatcactggtgctggtaagggttctattggtgctgaagttttgcaaggtttgttgcaaggtggtgctaaagttattgttaccacctctcgtttctctaaacaagttaccgactattatcaatcaatttacgccaagtacggtgccaagggttctactttaattgtcgttccattcaaccaaggttctaagcaagatgtcgaagctttgattgaatacatcttcgacagtgaaaagaacggtggtctaggttgggatctggatgctattattccattcgctgccattccagagcaaggtattgaaattgaaaacatcgattctaaatctgaatttgctcacagaatcatgttgaccaatattttaagaatgatgggtggcgtcaagaagcaaaagtcagctagaggtattgaaacaagaccagctcaagttatcttgccaatgtctccaaaccacggtactttcggtggtgatggtatgtactcagaatctaaactgtctttggaaactctattcaacagatggcattctgaatcctgggccaaccaaatgaccgtttgtggtgctattattggttggacaagaggtaccggtttgatgagtgctaacaacgtcattgctgaaggcattgaaaagatgggtgttcgtactttctctcaaaaggaaatggccttcaatttgttaggtttgttgaccccagaagttgttgaattatgtcaagaatctcctgttatggctgatttgaacggtggtttacaattcgttcctgaattgaaggaattcactgctaaattgcgtaaagaattggtcgaaacttctgaagttagaaaggccgtttccattgaaactgccttggaacataagattgttaacggtagcagtgcagatgccgcctatgctcaagttcaagttcaaccaagagccaacattcaattggacttcccagaattgaagccatacaagcaagttaaggaaattgctcctgctgagcttgaaggtttattagacttggagagagttattgttgttaccggtttcgctgaagttggtccatggggttcttctagaaccagatgggaaatggaagccttcggggaattctctttggaaggttgtgttgaaatggcctggatcacaggaaacatttcataccataacggtaacttgaagggtcgtccttacaccggttgggttgattccaagaccaaagaacctgttgatgacaaggacatcaaagccaagtatgaagcatctatcttggaacacagtggtatcagattaattgaagctgaattattcaacggttacaatccacaaaagaaggaaatgatccaagaagttattgttgaagaggacttggagccattcgaagcctccaaggaaactgctgagcaattcaaacaccaacatggtgacaaagtggatgttttcgaaattccagaatctggtgaatactccgttaaattactgaagggtgccaccttgtatattccaaaggctttgagattcgaccgtctagtggctggccaaatcccaactggttggaatgccaagacttatggtatctctgatgatatcatttctcaagttgacccaatcacattgtttgttttggtctccgttgtggaagccttcatttcctctggtatcaccgatccatatgaaatgtacaaatacgttcatgtttccgaagttggtaactgttccggttccggtatgggtggtgtttctgctctacgtggtatgttcaaggaccgttataaggatgaaccagtccaaaacgatatcctacaagaatcgtttattaacaccatgtccgcttgggttaatatgttgttgatctcttcatctggtccaatcaagacacctgttggtgcctgtgccacctctgttgaatctgttgatattggtgttgagactatcttgtctggtaaggccagaatttgtattgtcggtggttacgatgatttccaagaagaaggttcttatgaattcgctaacatgaaggccactaccaacactttcgaagaattcgaacatggtcgtacaccagctgaaatgtccagacctgccaccacaacccgtagcgggttcatggaagcccaaggtgctggtatccaaatcatcatgcaagctgatctagctttgaagatgggtgtgccaatttacggtattgttgccatggctgccactgctaccgataagatcggtagatccgttccagctccaggtaaaggtattttgaccactgcacgtgaacatcactccactttgaagtacgcttcacctaacttgaacatcaagtacagaaagcgccaattagtcacccgtgaatctcaaatcaaagattgggtagaaaacgaattggaagctttgaaattggaagtggaggacattccaagcgaagatcaaaacgaattcttgcttgaacgtaccagagacatccacaacgaggcagaaaagcaactaagagccgctcaacagcaatggggtaatgacttctttaagagagacccacgtattgctccattgagaggggctttggccacatacgggttaaccattgacgacttgggtgttgcatcgttccacggtacctccaccaaggccaatgacaagaacgagtctgccacaatcaacgaaatgatgaagcatttgggtagatctgaaggtaaccccgtcattggtgttttccagaaattcttgaccggtcatccaaagggtgctgccggtgcatggatgatgaacggtgccttgcaaatcctaaacagtggtatcatcccaggtaaccgtaacgctgataacgtggacaagatcctggagcaattcgagtacgttttgtatccatccaagactttgaagaccgacggtgtcagagccgtgtccatcacctcgttcgggtttggtcaaaagggtggtcaagccatcgtggtccatccagactacttgtatggttccatcactgaagacagatacaacgagtatgccgccaaggtcaatgccagagaaaagggtgcttacaagtacttccacaacggtatgatccacaacaagttgtttgtcagcaaggagcacgctccttacactgatgacttggaggagaatgtctacttggacccattagcccgtgtctccaaggacaaggtcggcagtttgactttcaacgccaagggcatccaaaacaaggacagctacatgaccaccagtgccgtcgagaccgccaaaatcttggaaaccatgaccaaggagaaggccgccaacggcggtgttggtgtggacgtggaattgatcaccagcatcaacgtggaaaacgacactttcatcgagcgcaacttcaccgcgcaggaaatcaagtactgtaccgcgcaaccaagcgcccaaagctccttcgccggcacgtggtcggctaaggaagccgtcttcaagtccctgggcgtcaagtccctcggcggcggtgccgccttgaaggacatcgagatcgttcgtgtcaacaagaacgggcctgccgtcgaattgcacggcaacgctaagaagcttgctgaccaagccggcgtcaccgacgtgaaggtgtccatctcccacgacgacgtgcaagccgtcgcagttgccatctctaccaagaaatag

SEQ ID NO: 2538 - DNA, 618 bp, Saccharomyces pastorianus
atgatgccctataacacacctcccaacatccaagaaccaatgaatttcgcgagcagcaatactttcaatttcaatccagatacgatcagtttcccgaatttcaagtatgaccatcttcagcagcagcagcagcagcaacaactacaacaacaacagcagcagcgtccacctccgctacagccgcaacagcaacaacagccaataactccccctttgtttcttgcaggcgccaacgcaagctcgaatcccaacaagaatgtcagcactaataacgtccctccactgcactttagcgggtcatcccagcattacgctgtcccggacatagatcactcctccataatatacaagaacaatatctgcaagtccttcaaagacgatttgtttttctgcccaagatcactgctgtctgtagaagagcaacaagcgtgcgaaaaaatggatagactgactgctgaacaaatgtcactacatcaacaaaatgcgccctccagctccaactccggatccttgtcttcctccccgccaacttctgcgtcgtctatattcaactctaggcccaaatttaatccttacacttcacaaagttttaatcctttggaaagcgtacaagaatga

SEQ ID NO: 2539 - DNA, 1632 bp, Saccharomyces pastorianus
atgagttatactgacaatcctcctcaaacaaagagagctttatcgttagatgatttggtcaatcacgatgagaacggaaaggctaaactacaaaaactaaacgaagcggctgacgcgaccgcacaaccacgtatcggcagggatgaagaaactagttcgaaccaagtccttgcagcaactgaaactggtaaggctaatatagatcacgggtcccacccagtaagacccaaacaacgcaagtcaccgggcgatgatgaagaaaccgacacggatgatgatgtgggtacgactggggagattaacttcgatacaggaatggattttgattacgacaaacaacatagaggcctttcccccaatggtttacctctcacagatgcagccactgacgccgaggttaaattagaaaaatcttccaatattacgacacttcctaatgtgaaaacagacaatgaaagggaaatactgaaaaaaatcaacgacgggaacactggaaacaataacacaggccaaatgcaaccacaggaccagaagaaatttgaagagaagccaggaagaaatggaattaagatggaagaagaaaaaaacacagcggtcaacaatatttttgaagaaaaagctaccttacaatccaagaaaaacaacattaaaaaggatttagaagtactaaatgaaatatctgcatcctcgaagcccagcaaatataaaaacgttccaatttgggcacaaaaatggaaacccactatcaaagctttacaaagtatagatgtgaaagatctcaagattgacccatctttcttaaacattattcccgatgatgatttaacgaagtcagtacaggattggatctatgccacgatatattccattgcgcccgaactgagatcattcatcgaattagagatgaaatttggccttatcattgatgcgaagggcccagatcgtgtaaatccacctgtttcttcgcaaactgttttcactgaccaggatgctcacttaaccccaactatcgacgagtctttgttcaaagaactgagtaagtatatccgtggtatcagtgaagtcagtgagaatattggtaagttcagtattattgaatctcaaacaagagattcggtatatagagtcggattatccacacaaagaccaaggttcttgagaatgagcactgatattcaaacaggtagagtggggcaatttatagagaaacgacatgtggcccaactgttattatattccccaaaggatagttacgacgttaagatttctttgaacttagaactacctgtacctgaaaatgacccaccagagaaatataaatcacaaagtccgatcagtgaaagaacaaaagaccgtataagttacatccacaatgattcttgtacaagaattgatattaccaaagtggataaccataataaaggtccaaaaagtagacagtcggaaactactcacgaagtcgaattggaaatcaacacgcccgcattgttgaacgcttttgacaatataaccaatgatagtaaagaatacgcatctctcatcaggacgtttctaaataatggtacaattgtcagaagaaagttatcttctttatcatatgaaatttttgagggttcaaagaaggttatgtga

SEQ ID NO: 2540 - DNA, 1014 bp, Saccharomyces pastorianus
atgatagagttgagattcttggtcgacaacaaaaacactgtgtgtttcacgttattcgtcgctttagtactttcagtatatctcctggtttatttattttcacatacaccaaggccgccttacccagaagagctgaagtacacagccattgacgaaaatggcgttgaggtcactcgtactttgcctactctaggcaaagaacaccaaaatggtgacgacgaagaaataattttgtcggttgtaatcccaagttataatgaaacaggtaggattttgctgatgctgacagatgcgataaagtttttgaaagaaaagtatggttctaagtgggaaattgttatagtggatgatggttccacggataataccacacaatactgtttaaaaatctgtaaggagcagtttcaattagactatagacaattcagaatcattaagttttctcaaaatagaggtaaaggtggtgctgtgagacagggtttcctacatattagaggtaaatacggtctcttcgcagatgctgacggtgctagtaagttcagtgatgtggctaagttaatagaggccataaaaacttatgaaacttccggcacaaatggaaaaacagtgaagcctgttgtagccattggttccagggcacatatggttaacacagaggctgttattaaaagatcgatgattagaaattgtttgatgtatggtttccacactctggtattcatatttggtattaggtctattaaagatacacaatgtgggttcaaactgtttaataggcctgccatattaaagattttcccatatttgcataccgagggttggatctttgacgttgaaattttaattctggccatcaggaaaagaatccaaattgaagagataccaatttcttggcatgaagttgatggctctaaaatggctttggctgtcgatagcatcaaaatggcgaaagatctagtcgtaataagaatggcctatttattagggatatataacgataacaagaaatgttag

SEQ ID NO: 2541 - DNA, 3552 bp, Saccharomyces pastorianus
atgcctccaaagaagtttaaagatctaaactcgtaccttgacgaccaaccagcggacccaggcctagttgcctctccattcggtggttatttcaaaaaccctactgcagatgctaacagtaataatgctactaacaagagcagttaccagcaacagcgtaataggacacaaggtggcaataaccaaaatgcacctttccaacagggtggctaccaaaacaaccagtcacacaacaataactataataaatacaataaccaaatttatcaaaaatcgagttataaacagtctgctgtgacaccaaatcaaagtgggactccaaccccatctgcttctactacatccttgacttctctgaatgaaaagctttgtaatctagaattgacacccatttctcagattttgtcaaaaatccctgagtgtcagagtattactgattgcaaaaatcaaatcaaattaatcgttgaagaatttagcaaagaaggtaacactacaggtgaaaacattggacaatggaaaattgtcgatgtcctatctaaattcatcaaacctaagaatcccccattagttagggaatcagccatgctagttgtttctagtattgcccagttttttaacggcaaggctccacaagaagcttacttgttgccatttttcaatgtcgtccttgattgtatttccgataaagaaaacaccgtcaagcgcgcagcacaacaagccatcgataatttattgaattgctttccaatggaagctttgacttgtattgttttaccaacaatcttagacttcttatcatcaggtgctaaatggcaagccaagatggccgctttgactgttgttgatagaataagagaagattctgcgaacgatttattggaattgactttcaagaacaccgttccagttttgactgatgtagccactgatttcaaaccggaattggctaagcaaggttacaaaacattactcgactacgtttctatcctcgataacttagatttatctcctcgttacaagttgatcgtggatactctacaagatccatctaaggtgcctgaatccgtgaagtccttgtccagtgttacctttgttgccgaagtcactgaaccttctctttcgttgttagttcctatcttaaacaggtctctaaacctatcttcttcatcccaggaacaattaagacaaactgttattgtggtggaaaatctaacaagattagtgaacaatcgtaatgaaattgaaagttttatccctctactattacctggtatccaaaaggtcgtcgacactgcctctttacctgaagtccgtgaattggctgagaaggcccttatcattttaagagaagatgacgagcctgaaaaggaaaacaaattctcaggcagaatgactctacaagaaggtagagatttcttactggatcacctcaaggacatcaaagctgatgattcttgttttgtcaaaccttttatgaatgacgaaaccatcataaattacatgagtaagatcttaaccgttgattctaatgttaatgattggaagagactagaagaatttttgaccgccgtttttggtgcttcccaaaaagaatttgttcaacaagaatttatccataacttgagagctctattttaccaagaaaaggaacgtaccgatgaggatgagggtattgaaattgtcaacactgatttctccttagcttacggttcaagaatgctattgaacaaaactaacttgcgtcttttgaaaggtcatcgttacggtttatgtggtagaaatggtgctggtaaatccactttgatgagagcaattgctaatggtcaattggatgggtttcctgataaggacacattacgtacctgtttcgtcgaacataaactacaaggtgaagagggtgatttagacctagtttctttcattgctctggatgaagaattacaatccacctctcgtgacgaaattgcaaaagctttggagtctgttggattcgacgaagaaagaagagctcaaaccgttgggtctttatccggtggttggaaaatgaaattggaattggcaagagctatgctacaaagagctgatatcttgttgttagatgagcctaccaatcatttggatgtttcaaacgtcaaatggttagaagactatttgctagaacataccgatatcacttcactaattgtttcccatgactctggtttcttggacattgtctgttcagacatcattcattatgaaaacaagaaactagcttactacaaaggtaacttggccgcatttgttgagcaaaagcctgaagctaagtcctactatactttgaccgattccaacgctcaaatgcgctttccacctccaggtattctaacaggtgttaaatctaataccagggcggtcgctaagatgacagatgttacctttggttatccaggttctcagaagccttcattaagccatgtgtcttgttcgttatctttatcttcccgtgtggcttgtttaggtccaaatggtgctggtaaatccaccttaatcaagttattaacaggtgagttagttccaaatgaaggtaaagtggaaaagcatcctaacttacgtattggttacattgctcaacatgccttacaacacgtcaacgaacacaaggaaaagacagcaaaccaatatttgcagtggcgttatcagttcggtgatgatcgtgaagttttgttgaaggaatccagaaagatttccgaggatgagaaggaaatgatgactaaggaaatcgatatcgatgacggtagaggtaagagaattatcgaggctattgtcggtagacaaaaattgaagaaaactttccaatatgaagtcaaatggaaatactggaaaccaaaatacaattcttgggtgccaaaggatgttttggtgggacatgggtttgacaaactggtccaaaaattcgatgatcatgaagcttccagagaaggtttaggttaccgtcaattgattccttcggttattaccaagcattttgaagatgttggtcttgattctgaaattgctaaccacacaccactaggctccttatctggtggtcaactagttaaggttgttattgcaggtgctatgtggaataaccctcatttacttgttttggatgaacctaccaattatctggacagagattctcttggggctttggccgttgctattcgtgactggagtggtggtgttgttatgatttcgcataacaatgaatttgttggtgccttgtgtccagaacaatggattgtggagaacggtataatggttcaaaagggtaccggacaaatcgatcaatctaagtttgaagatggtggtaatgccgatgccgttggcgtgaaagccgccaacctaaaaccatctgtcgatgacgatgactctcccgctaatatcaaggttaagcaaagaaagaagagattgacaagaaacgagaagaaggtacaagtcgaacgtcgtcgtttacgttacatcgaatggttgtcgtctccaaagggaacaccaaaaccagtcgatactgacgatgaagaagattaa

SEQ ID NO: 2542 - DNA, 441 bp, Saccharomyces pastorianus
atgtcaagttttaatgctgagaccgctgataacttagaagatattgaaaagcaattcgctgttgtcgccgttgaacaagcggaaacatactggaaactattaacaagcgttccaggttccaaattgcgtttgaccaagttcgatgacgaaatttacgaaaacttcatcgaaagattcccggaatacaaggatattgaaagaattaagaaattcacagacgaagaactaaagaccaaagaagctaaagaaagatggagaaagttcttcacaatctttgaaaaaacagtcgaagattataactttggaactttattgagaacagactcctcagccgagtacggtcaatatacgacctgttttgttgtgaggctacaattttacgcctttgaaatcgcaagaaataagcacggtttgaacgattggattgttggccacgaatga

SEQ ID NO: 2543 - DNA, 1503 bp, Saccharomyces pastorianus
atgaccaatgaggaaggccttaacaagtctctcattaatgacgttttagcccgcagtatgtcagaattcgatgatgatgacgatgaagatgaaaacgatagtgacatgtatagaggtaatgacgaaggggaggatgtctttgacctgccgctcaagttgggcatctcacaaagcagaaatttctctgaagtaaatggtgtgttggatccattatccagtttgcatggtccatccaagagggtgagatttgaaaaacgaaggcagcagcagcagcagcaacaacagcaacaacagcaacataataacgactttaatatcgatccgagcctgaagagtccgtccggtaaaaaactggatgtggaacagctgatacagtccgccagcgaattcaacgattatcttgctaataacattgacaaagtaaatagcttcaattctgaacttttaggcagcagtggtaaactgcctgggaaagccaaaagtgacacagcaactcagggcactggccgtttagattctatgtcgaactttgctcttagcgacacagagctgaacaatgatgacgatgattatctgctagatcccttagcaaatggcagttctagtactccgaccatggaccgccatggttacagtttattagatgatgctctgtctacttctgataaggagaaaatatatacgaacaagatcaattctaatagtcaagtagatactgatgaccgcactcacgagagtggaaacacgaccagtgataacgaagagaataccaatgagtcatctgaggtcatagattacacaaagttcgattctttcccctaccctccatcgcttgtccccaatgaagagccgccggatttgaaagtactgagcatcgagtctgaacaggaaaacgaaaaagagctacgacgaatatctttactcttggatcactacgaatcaataaagaaattaccagatctatcggacgatgaagctttatcgagattccgtgagaacattgatttaattttgcagctgtccaagagaatcgatgaaaacgcaaacactttagccatttcctccgaagatcctcaaaaatttgttaattttacaatgaaaaacccaccttcattatcattcaaagatttcattgatagaattcagaataaatgcatgtttggcgccatagtctacctcggtgccacctatttacttcaattagtctttctgactagagacgacctaggcggccctatcaagctaaaggctaaactacaagaggaccaaacacataggatcatcatagccacaatacgtattgccaccaaattattagaagattttgttcattctcaaaattacatctgcaaagttttcggaatatccaaaaggctgctaactaaactggaaatttcatttttggcaagtgtgaacttcgatgggttaatgatcacttgcgagaaattggaaaaaacatcgcacatcctcgaagacacaagacaggcattgggaaattcatga

SEQ ID NO: 2544 - DNA, 3525 bp, Saccharomyces pastorianus
atggagcagtctaataaacagcatcgtaaagcgaaagagaagaacacagccaagaagaagctgcatacacagggccataatgcaaaggcatttgccgttgcagctccaggtaagatggcaagaactatgctaagatcaagcgatgtgaatgaaaggaaactgcatgttcccatgattgatcgtaccccagatgacgatccgcccccttttattgttgctgtcgtaggtccaccaggaacaggtaagaccactttaatcaagtccttagtgaggagaatgacaaagagtactttaaatgatattcagggccccattactgtcgtttcgggtaaacatagaaggttaacattcttggaatgtcctgcagatgacttgaatgcgatgatcgatattgccaaaatcgcagatttggttctattgttaatcgatggtaatttcggttttgaaatggagacaatggaatttctaaatattgctcaacaccatggtatgccaagggttctcggtgtagctactcatcttgatctgttcaaatcccaatctactttaagagcttctaaaaaaagattaaaacatagattttggacagaagtttaccaaggtgcaaagttgttttatttatccggtgtcatgaacggaagatatcctgatagagaaattttaaacctttccagatttatctctgttatgaagtttagaccattgaaatggagaaatgaacatccttatatgttagctgataggttcacagacttaacacatccagagttattagagacccaaggacagcaaattgatcgtaaggtcgccctttatggttatttgcatggtactcctttgccatctgcgccaggtaccagagtacatattgccggtgttggtgatttttcagtcgcacaggtagaaaagttaccagatccatgtccaacacctttttatcagcaaaaattagacgattttgaacgtgaaaagatgaaagaagaagcaaaggctaacggagaagtcaccacgggttccacaacaagaagacgtaagagattggatgataaagacaagttgatctatgcaccaatgtctgatgtcggaggtgtgttaatggataaggacgctgtgtatattgatattgggaaaaagaatgaagaaccaagttttgtcccaggtcaagaaagaggtgagggtgaaaaattaatgacaggtctacaaggtgtcgagcaaagcattgcagaaaaattcgatggtgtcggtttacaactgttcagcaatggtactgaacttcatgaagtcaatgaagatgaagacctagacgttgaagatgaagaaatcagtgaagaggatgaaagaaaaagcaagggaagaactactttgagacaaccaaagatttatggtaagtcagttcaggacgaagatgcagacattgataatttaccaagtgatgaagaaaactacgcaaatgatgatgacgtagaaggttctgcaccaagaatggtcgaaattgattttagtgacgctgataaacaagactcggaaaaactagccttggaaaccgactcagaatttgaagagagtgaagatgaatcctcttgggaaagaaatgcagcaaacaagctgaaaaggacagaaagtaaaaatagaacttggaatatcggcaagttgatatacatggataacatttcacctgaagaatgtataagaagatggagaggcgaggaagataatggcgaatacgaaagtgacattgaagagaatgttgacgatgaatttttcaaaaaaacagatggaactgttacgaaagaaattattaaagaagactcggttgatttggaaaagttcgctccctactttgatactttcgaaaggcttgctaagaaatgggacaatgttgattccataaaagctcgattcctcggtgctgggataatgggcaacgagaaggcaaagaaaacttctgatggaaacgacgaagaagcatatggtgactttgaagatttagaagacgaaaacggttctgaaagtgcagaagaaaatggtagcgaagaaaatgaagaggaagacggagatgacaattcattcaccaacttcgatgctgaagaaaaaaaggatttgactatggaacaagaaagagaactaaacgccacgaagaaagaaaaattacgtgcacagtttgaaatggaggaaggtgaaaatttcaaagaagatgacgaaaataatgaatacgacacatggtacgaattacaaaaggccaagatctccaaacagttagagattaataatatggaataccaagaaatgaccccggaacaacgtgaaaaaattgagggtttcaaagctggctcttatgtgcgtatagtcttcgaaaaagtcccaatggagtttattacaaatttcaatccaaagtttcccgttgttatgggtggtttgctaccaactgaactaaaattcggtattatcaaagctagattgagaagacaccgttggcataaaaagattttgaagaccaatgatccattggtcttgtctttgggttggagaagattccaaaccttaccagtatacacgacgagtgattctagaacaagaacgagaatgttgaaatatacgccagaacatacgtattgtaatgctgctttctacggtcctttgtgttctccaaacacgccattctgtggtgtccaaatagtcgccaacagtgatactagaggcggtttcagaatcgcagcaacaggtgttgttgaagaaatagacgtgaacgttgaaattgtaaaaaaactgaaattagtagggtttccttacaaagttttcaaaaacacagcttttatcaaggaaatgttctcaagtgcaatggaagtcgctagatttgaaggtgcacaaattaaaactgtctcaggtatccgcggtgagatcaagagagctttgtcaaaacccgaaggccactttagagcctcctttgaagataaaattttgatgagtgatattgtgatattaagatcttggtaccctgttcatgttaagcgattctataacccagttacttctctgttattgaaggagaaaactgaatggaaaggtgtacgattaaccggtcaaattagagccgctatgagtttggaaacaccatctaatccagatagtgcataccaaaagatccaacgtgttgagagacacttcaacggtctaaaggttccaagggctgttcaaaaggacttaccatttaaatcccaaatccaccaaatgaaaccccaaaagaagaagacttatatggccaaaagagctgtcgttttgggtggtgatgaaaagaaggcaagatcgtttatgcaaaaggtgttgacgatctcaagagccaaggatagcaagaaaaaggaacaaaaggctgatcaacgtaaagaaagactaaaaaaattggccaagatggaagaaaaaaaggcacaaaaggacaaagaaaagaagaaagaatattttgccaagaatggtaaaagaacaaccatggatggtgacgacgagtctcgtccacgcaagatgagaagataa

SEQ ID NO: 2545 - DNA, 717 bp, Saccharomyces pastorianus
atgaagttcaccccaagcatagttcttgatgctccgcaatattacgttgaccattttaatggcaagtacaacgtcgataaatgtgttattttaagagatttgcagctagaatctgacacagaatccatgccatctagcctgaaacacctcaccaagccaacacacatcctggatttgacaaataatgaacttctcacaattccggatctatcgagcagaaatgatatacacacattgctgttggctcggaacagtatagtggatgtagatggtcgactgttgccaatgaacttgcaaaacctcacgttgtcaaataatggcttaagaaggtataaagaacttcagtttttacgcagagcgcccaagacactgaaaactttgactttattaggaaaccaagtttgccatttggccaactatagagagcaagtactccgattagtaccgcatctagaaactttagatttccaaaatgtgacaactgaagaaagaaaggctgttttgaagctttcaggaaaggtggatgccacgacaccaaaggcgatcgatgctacaacaaaagacaatgaatccagagataagacgatggaaatcatgaatttggtggtgagcaagatgacggtggagagaagagacgaattgaaaaggcagctggcagaagccacctcgttggaagaaattgcccggttggaaagactactttcaggtggcgtttaa

SEQ ID NO: 2546 - DNA, 546 bp, Saccharomyces pastorianus
atgagacaattaacagaggaagagacgaaggttgttttcgaaaagctggctggctatatcggtagaaatatttcgtttttggttgataacaaagaactacctcatgttttcagattacaaaaggatagagtatattacgtgcccgaccatgtttccaaattggctactagcgtagcaagatccaacttgatgtctctaggtatttgtttgggcaaattcacaaagactggaaaattcagattgcacattacttccttgacagtactagccaagcatgccaagtataagatatggatcaaacctaatggggaaatgccattcctatacggcaatcatgtgttaaaggcgcatgtaggtaaaatgtctgacgatataccagaacatgccggtgttatcgtttttggcatgaatgatattccattggggttcggtgtcagttcaaagagtacctctgagtcaagaaacatgcaacctgctgccattgttgctttcagacaagccgatatcggtgaatatttgagagatgaagacactttgtttacttaa

SEQ ID NO: 2547 - DNA, 1749 bp, Saccharomyces pastorianus
atgtctccagaaatattagaagcacttcttcaatgggctgcgtccattggtgtggtggttccagagggactgaagtttacatacagcgatctcaagggcattctttgtgtatgtgaaaaagaaatggatgaaccgaagatcaagatccctcccaagatcatcatttcaagaagtttgcccataaaatgcttcaaactccatgagtccactgggaatatcaacggatggttgaagttattcttggctaagataaagttcgatgaatataatgataccatcgtggataatgtttgcgtgaacaagaaattcaaaccttacttggatgcgttacccttgcagcttaactcaccattgatttggaactcaagcgagctggagtgtttagcatctacgaacctggggaattctattcatgagaaatttgcgaacatattcaaagaatggtttgaattgatcacctcttccgatatatttgatttagaaaaagtggcagatgatattcagatataccgcacgcttgacgggatggcatacgaggctctttatgaacgaatcttgaagaagactgaacttcaaacgccaaccatttggtattcgttttctgcatttctatggtcgcaactaatattcacttcaagagcgttccctgaatatgtggtgaacgggaagtgtccagaaaattctatcgtattacttcccattattgaccttttaaaccatgactaccgttccaaagttaaatggtatcctgaaaatggatggttttgctatgaaaaaatggggacggtagcccaagggcaagaattgttcaacaattatggcggtaaggggaatgaagagttgctgtctggatacgggtttgtcttggaagataacatttttgactcagtagctttaaaaataaaattgccgttagatgtaatttctgcaattcttgaaaaggaacctcttctgaaactgcctacactttcagattacacaacatttgcctttgaagataagaattctaaccgacaagacggtgaggcagctcgtgatgctacggattacgcagacggtgtaacttatttcattaatacgcaaaatgagcaaagtttagagccattgctaaatcttttcacttacctatcgaagactgaggaggaaaccttgcatgatctgagagcccgtttcgaaggtatacaaattctaagaaatgcattggaaagtaaattgaacaacattttaggagctacaccaattgattcatcaaatatcaactcctacagatattattgtgctgatatttatagaaaaagtcaaaaacaaatactaaaggaatctgtagcgcgattgaaaagattagagaagacaatgctatcagagaacaagaaccgactactaactatgaacaaaatcttgaagaacgaccctgcttttacagaaactgagctcccttcactgtttagtaatgaagatgatgaagagctcgtcttcgaatccacctacgatttgttggtcctgtgggtcctagtgaaggctaggtgtcagtcattccctacaaaatatcagtgggtgggacagcagtacattagttctgggaacaccgcatatatctcggatgactccaaggctttccatgcccagtacttcggcaagcaagataacatggacttgaaacaagtggaccacgcaatccaattcgtaggtgctaactccttcaccagagcctcgtctacttcaggcgataccgttctggttcgcaagtag

SEQ ID NO: 2548 - DNA, 966 bp, Saccharomyces pastorianus
atggttgagattgtaggacatagagctttcaagggaaaatatcctgaaaacacgcttttagcgttcgaaaaggcgtacgcagctggggcagatgtgatcgagacagatttgcaaatgaccagcgatggtgtggtggtggtcaaccacgactctgacacggaccggatgtgggacaaaaacctggtgattagcgagtcgacttgggaggaggtcaggcgattgcgctgcaaagaggacggctctctggctatgatgactttaatggagatccttgagtgggcagttagtcatcccggggccaagttgatgttggacatcaagttcaccaacgagaagatcatcatgatcaagacgttcgctgccatgctggaggttaagaatgatttgaaattctggcaagagaggatcacttggggcatttggatgttagattggtacgacttcggtatcgaaacaggagtactgaaagactttagagtcatcgtgataagtttatccttagatatcgcgtctcaatttgtgaagcgttccctgtcgttgaacgatcctcattacaagcttttcggcatcagcgttcattttgtctcctcgtggacgagccggttcagactgaagctgctaccgaccctgatggaaaacgacatcaaagtatatttgtggaccgtcaacaaacccgtcgatttcaagtatctttgtgaattatcaatttacggtgctatcactgatgacccggtcaaggctaggaaattatgtgaagggcagcctatgacaaagccgtcctgtactgggaagaaattccggatacctagtttgagatctgtggatgggctaagattccatgtctttgtcaaggtctacaccattctttgtacacttttgttttccaaatgggtccacatcgaagtgaggggttggtccattgcttacgtgattttcctatttcttcgcaccattcattttctttga

SEQ ID NO: 2549 - DNA, 1458 bp, Saccharomyces pastorianus
atggatttgagagtaggaagaaaatttcgtattggtaggaagattgggagcggttcctttggtgacatttaccatggtacaaatttgatcagcggcgaagaagtggctattaagctggagtccattagatcaagacaccctcaattggactacgaatcccgtgtctacagatacttgagcggtggcgtggggattcctttcatcagatggttcggcagagagggcgaatacaatgccatggttatcgaccttctaggcccatcattggaggacttgttcaactactgtcacagaagattttccttcaaaacggttatcatgctagcgttgcagatgttctgccgcatccaatatatacatggcagatcgttcattcacagagatatcaaaccagacaactttctcatgggagtaggacgccgtggtagcaccgttcacgttattgatttcggtctttccaaaaagtatcgagatttcaacactcatcgtcatattccctacggagaaaacaaatccttgaccggtacagctcgttacgcaagtgttaacacacatcttggtatagagcaaagtagaagagatgacttggaatcgctaggttacgtcttgatctacttctgtaaaggttctttgccatggcaaggtttgaaagccaccaccaagaaacaaaagtatgatcgtattatggaaaagaaactgaacgtcagcgtggaaactttatgttctggtttaccgctagagttccaagaatacatgtcttactgtaagaacctgaagtttgatgagaaaccagattatttgttcttagcgagactattcaaggatttgagcatcaaactggagtaccacaacgaccacttgttcgattggacaatgttgcgttacacaaaggcaatggtggaaaagcaaagagacttgctcatcgaaaagggcgactcagacgtaaataacaacgcgaatagcgcaagcagcgccgacaacaagtctgaaaccttcaacaagattaagctactagctatgaagaagttccctactcatttccactactataaaaatgaagacaaacacaatccttcgccagaagaaatcaaacaacaaaccattttgaataataacgcagcttcctctttaccagaagaactgttgaatgcactggataaaggcatggaaaacctgagacaacagcaaccgcaacaacagggccaaagttcacaaccacagcagcagcagcagcagcagcagcaaccgggtggacaaagaccaaattattatcctgaaccattactgcagcagcagcagcagccagtccccatggctgccaccagggtcactcagtatcctccgcaagtaagcgccaataatttcaatactaatcaagcatctgcacaacctcaaatgagatctaattcgcagcaaccacctcaagataaaccagccggccaatcgatttggttataa

SEQ ID NO: 2550 - DNA, 1146 bp, Saccharomyces pastorianus
atggatttcgttgcgggacaacctcaaccagttggtcagtcaatccaacagcaacagcaacagcagcaacaaaatgcaaatacgcacgaacaagatttcccgcaaccgcatcatgacctgcaacagcgacaacaacatcatcaacaactgctgccatctcaactgcctcagaaatccctgatttccaaaggtaagtatacactacacgacttccaaatcatgagaacgcttggtactggatcttttggtagagttcatctggtacgttccgtccacaatggacgttattatgctataaaggttttaaaaaagcagcagattgtgaagatgaaacaagtcgaacatactaatgatgaacgacgtatgctaaagcttgtcgagcatccatttttgattagaatgtgggggactttccaagatgcaaggaatatctttatggtaatggattatatcgagggtggtgaacttttttcactgctaagaaaatcccaaaggttccctaatcctgtagctaaattttatgctgcagaagtcatattggcactggaatacttgcatggccataatatcatttatagggatctgaaaccagaaaatatcttgttggacagaaatggccatatcaagataaccgattttgggttcgctaaagaggtgcaaacggtcacatggactctttgtgggactccggattatattgctcctgaagttattaccacaaagccttataataaatccgtggattggtggtctcttggtgttctaatctacgaaatgttagctggttatacaccgttttatgatactacgccaatgaagacgtatgagaagattttacaaggaaaagtcatatatccgccatatttccatcctgatgtcgtggatttactaagtaagctaattactgcagacttaacaagaagaatcggtaatttgcaaagcggttccaaggacattaaagcccacccatggtttagtgaagtggtatgggaaagattattggccaaggacatcgaaactccatacgagccccctatcacatcaggcattggtgacacctctttgtttgatcagtatcctgaagagcaattagattacggtatccagggtgatgatccatatgcggaatacttccacgatttttaa

SEQ ID NO: 2551 - DNA, 1365 bp, Saccharomyces pastorianus
atgggtattcctatgcagatatatcagggccagaacagggtgctattttacgacaggagaagtcagaacgagccagatgaacgtgttaatcggtattgttactacactgcaagtaacgactacccacagctgccaaatgcgataaaggagcagatttgtcggtttttgtcgagcagcctgggagaaaatgatttggaagcggaaaactcggttgaggacgaggaagaggttgaagatggtcctcgaagtgacacaggattggaatttgttaggattaataaccatttttcttcccatgacttgcgaagttttaaaagttataaaaattttaacaacgagtactggatgttctattctgacgaaacagatgataggaaagtagtgctgtatgattttaaggatcagcatttcatcgtcattaagcagcaattccatggccagctgaacttattgttgtcgaacacaataacctgtatggactgtaattttgattataatacaagcaccgttcaagtcctgattggttttcagaatggaaagctcttaaaactatgctgtgacttgaatggaaacgttaataatcacctacttctgaaggacccttcaacttccttttatcagcatgggagaaatcggtctatactaaatgtttgggcaggtttgctgccccattttgttgtatcatttagtatggaagagggactgctaataacttctctgaatcaccagcaagcaaacggggatttacagagtttcaaaacaagtttttatttacctagaaatctaggaagtgacacaaatgccaagtccgttttaaattttccacagtttactctatacaagggagacagcttgatatgtcactgtgataatgtcttggagcctactggttctgcaaacaaggaattaaattttatgttgaaaatagatgaatgtgttcaaaatatagattatctttcaagaatagaccatgtcctggttgaatcgaacttgagatatctctcgattccagtaccaaactctaccgacgatcctagctctattgaaaacaataaagaaatttgtccgatcttctacaagacacaagaacttaatatgcatgatccaagaacagggcgccaaacagcaaacaatgacaagtatatttttataacagagcagcatctttacgggacggcgctctcggtatacaaatattcgacatctttcgaacggtggttgtttgttggttattcagatatcagggctaagtatggcataaagaatgtgaaagacatttttgtaggtaattgcccctccataaatagcccaattgtggccatccttactgatgataataacattcaaacaattcttcttaaatag

SEQ ID NO: 2552 - DNA, 480 bp, Saccharomyces pastorianus
atgttcaaggagtgtgtggcaaggaaggtggcgccaagcttatacatggttcgtagctacctggtgacttgcaaaaggaaacagcagttgtggttgctgcatagaaggttgtgcacattaaataataattacttctttttagaatgggaactgctttttttaactaatgaggtcgtaaagtggaaggaaatgatcggttttttggagagccagttgtcatgcataaaatgctacatcgagatagagaagccaagctacgggcaaaacttccagcgtctgatagatgattacaatgagcaactgaacgaaaataatgttgttatttccattctgaagaatagaccgcgggtttctccattccccgtatatctttacgatgaagtatattcacgtaccaaactcgccatcgcggagttggactcgttgataataatctcttttatttccttggtgtttttatgggtatcgatagaaatctaa

SEQ ID NO: 2553 - DNA, 804 bp, Saccharomyces pastorianus
atgtttggagtaaaagatgctatattcaaaatcaaacgttcctttgggggtacagattcttcagactccactgcctacactacagcaaaccaatccccctccccctcccaaatgaaagataatcataacccttttcgaaaaaaaacgacatctaacagaaccatggtcgaggactgcaccttaccatcagtgacgctgaatggctattttccctcaactaaaaacaagctccttactcctgaaatgtgcgatgaaataagatccttaatgcctacaagaatacaactgtacacagagtggaatcttttatatagtcttgagcaacacgggtcttcactgcactctctatatagtaacgttgctccagatagtagagagtttagaagagtggggtacgtattagtaataaaggatcgtaagaacgggatctttggagcttatagcaatgaagcatttcatcccaacgaacacagacaatatactgggaacggagagtgcttcttatggaagctagacaaagtgcctgatgttaatatatctgaaaaggaggatcctaagaaagaagacagagaggaaagatggagattttcgggttatccgttcacgggagttaatgaatttgctatatattgtacgtctaaatttctttcaatgggtgcaggtgatggccattatggccttttgtgcgatgatgggctcctccacggtgtatcgaacccttgtctaacgtatggtaatgatgttttaagtgcagaaggcaataagttctctatagttgctctggaagtatggcgagtgggatag

SEQ ID NO: 2554 - DNA, 1818 bp, Saccharomyces pastorianus
atgtcattcagggcaaccatcacagatccggggaagcagaatatctggtttcgtgcgatttatgttctatctacaattcaagatgatatcaagattactgtgacgacaaatgagttgatcgcgtggtcaatgaatgaaactgataccacgctttgtcagatcagatttgagaagagtttttttgaaggatacgaatttaagcctcatgaaatcgtgtttggggagaatgggatccaagtcatagacgatacgtacggtgataaccataaactatattccttccgagttaatggaaagcacttgacaactatttcgagaaagccagacagcgacggcataaaatcattcactattgcagtcaataatacttctacatgtcctgagtcgctcgcaaataggttgattgtagtaattgaaatggattcgttgatagtaaaagaatactgtcctcagtttcagccgattaaatatgatcctattataatcgatttgaagtacaaaagaaaatttttggacatttttggaaccgcagcttccgatcggaatccgcaagagccgttggaccctaaactattggaggttttcgtaagtactgaacgtgaactaacatctgctctatttaatgaagatgttgaatcagacatacggaaaagaaatcaactaacagctgctgatgaaataaattacgtctgttgcagctcaacactgttaaaaaactttctagataactgcaatgtaaacgtgactgacgaggtaaaactagaaattaacgtccacaagttgagcataacagcatttactaaagcagtgtacggaaaaaataatgacctattgagaaatgcattaagtatgagcaacactattagcacattagaccttgaacattactgcctcttcacaaccgtagacgatgaaaaagaagagaagcgatcacatagcaagcgtaaagaacatacaaaaagcattgtttttaagctaaaagacttcaaaaactttataaccattagcccatcctggaaaagttcacaaggtggaaatgacaatataagcttatggttctgtcatccaggagatcctattctgatgcaaatgcagaagccaggtgtgaagctagaattagttgaagttaccgatagtaacatcaccgatgattcaatgggagggaagtatataaaggcagccatttcgggccccaaagaagaaaccggaaagcaagaagtcaaagaagggtatgaaagcccgctaaggagtaggattgcgcttcatagagaaacccagtcaacttccgtcactagcactcggaagagtcctctaaaaacatcatctcttgtcccaggtagtggtaatgcggttaccaagagctatagaaataacacggcaaagaagttatttgtagaagagcagagccaaactatgagttacggaggaaagagcctgttcgagcaggacattttggttaatacaaatgtgaataaggaaaggattcttaatggtagtgaagcttaccagtctaatgcgttgaagaggtctagaaacgatattcgtaatggagccgaagatgcttcccaagagtcaaccgtcgcaaaaagagctgataccacagtgacttggggaagaacattaccaacttcggatgacggggtttcgtccaacgaggtcaacaagagagaaatgctaaagagagagaaactaaagcatttacagggactgatgcattctagaaatggctcaaataataacaaaagtcaagacgataaggaagaggaaggcgggctgggccctacgcaagttgagaagccaaggggtttgttcgattga

SEQ ID NO: 2555 - DNA, 1077 bp, Saccharomyces pastorianus
atggacttgaactttacggcgaaaactgtcgaaataaacggtgaaacccatagaattctactgcaaaacgaaaatggaccttgtgcgctcttagcacttgcgaatgttctaatactctccccaagtcataccaaaatttcttgtgagttaataaagttggtgaacaaaggaaatgaagtccctttaggagaactcgttcaagtgctagccaacatcggtttacaatttacagataaagctggtactgacataaatgaattattaacaatattaccccaattacataaaggcttgaacgttaaccccaaattcaacggatcctttgaaaatagtatagagatgtcaatattccggttgtttgacgttgatctcgtccatggttgggtaatcgataatcgtatagatgatgcaataaaagaaaaagtatgtcactactcttacgaatctgcccaaagaatcttaacacaagcagctgatataaatagcggccttatgaaagaagataactcgaaggaaatcttggacgatgctatgcatattgaactttttttgaacgaatcaccaacgcaattaacagacatcgggctacgacaactaagagaaaagacactgcagaacacatattcaattttattcagaaacgaccatttctctacattgtacaagtacaaagatcaattatacacactgatcacagactttgggtttaagaattgtacaggcatcgtgtggcagtctctaggttctgtagatgggtcaggtgatgccttttttgctggtgatttcagtagcgcaaagtcaaatgatgagtcgccggcaaatgagactgaacatggctttaaaaataataatcggtcaatcaaagaggctcatcaaattgaaaatgatagcgaattggctagacgtttacagcagcaagaagaagagcgtctaacaatgttagaaactaagcgaaggaactgccactctagaaaaaaatcagaaagcccaccaaaaaaagaggcgtctaaacgaaaaagtagtcctgcaaaggtgaaccggtccgaaacctcaaaaagtgagtgcatcgtgatgtag

SEQ ID NO: 2556 - DNA, 207 bp, Saccharomyces pastorianus
atgagggctgttacgaggaataaagtagtaaacaacctgtacttttccacgttccttattgcattcgcatccgtggccatcggttctatactgccgtgcccagcgcattccgttgaatctgattcgccggctgtggaacaacacaagcttcagctgactcacgagcaggaggttaagaagaataatgctctgaggaaagagatatag

SEQ ID NO: 2557 - DNA, 1851 bp, Saccharomyces pastorianus
atgtcggtgtcgaggatatggagtagcgtcgtacatttcttttctgtgcaggcggttgattcacgcataaagccagatcctgaattcaaaagacgacggaaactgttcattagctcctcgaaaaacgaaactggttcatcatccatcaaaagcatagtttctactgtcagtggcactactcgtagcccagtgagcggttctaataacccatctttatcactatggaatacgtgggaatttagactatattatttagcgtttttaatagtgcttccgtggatgctcaaagctgccctggctacaagttccgattccaacccgaattattacaaatatagtggcctgctatctcgtggctggcttctggggcgtaaagtagataacagcgactctcagtacagattttttaggtcaaaatttttcccattgtctgtattgatactactacaaactgcattgaaaaagctttttattaaatttagtaaaagctccaagatatatttcgattttgcgtgcggtctagttttcatctgcttattttatggtatcaattccatcaagttcttcacgcatgcttttatcttttttactttggcacattcgttgaagagaaagcgttcattagccacattagcaatttggtcttatggtgtctttacgttattcattaaccaaaaagtgaggaattttccttttagtaatattgctacaatcctgaaccccatggaccattggtataaaggcattatcccaagatgggacttttttttcaatttcacattgttacgtttattgagttattctatggacttcttggaaagatggcatgaacaattgagtccgcaacctacaacaaattatgaggataaccagcccgaattcaggaaaagttcatctgtttctactttacaaaccatttatgaatcaggtaagaatagcgccttggacgaaaaagatcgaatggtcgcagaacatcacatacaggattacaattttattaatttcattgcttacatcacgtatgcgccattattcttggtaggcccaataataacttttaacgattatctttatcagacaggaaataagttaccttctttgacgagaaaaagcataagtctatatgccctaaaagtatttctaagtttgcttttgatggaaatcgtcctacatttcttctatgtaggtgcaatagcaagaactaaggcatggagtaacgacacacctttacaactagccatgatcggactgtttaacttgaatatcatgtatctaaagcttttgataccatggaggctctttagactatgggctatgattgatggtattgacgcgccggaaaacatgctacgatgtgtagacaacaactatagttcactagggttttggagagcttggcatacgagcttcaacaaatgggtaatccgctacatatatgtcccgtttggtggttccaacaatagaatatcaacaagctttgccgtgttttcattcgtagcgatatggcacaatattgagtttagattattattttggggatggttaactgtctttttgttgctggctgagacttttgttactaaatgtttcattaaatatagattcaaggtctggtatagatttttttgtggtgctggtgccgtaataaatatttgcatgatgatggttgttaacctatatggattctgtttgggcgcagatggtacgaaactcctattaagggacatcttcagtactttgtctggtttagagttctctcttatgggtgcagcaagcttattcattgccgtccaaataatgtttgaaattagggaggaagaaaaaaggcatggcatcaacttgaagtgttga

SEQ ID NO: 2558 - DNA, 465 bp, Saccharomyces pastorianus
atgaaactctcaacaattgttacagctgttttgtttacagcttcttccgttttagccgccccagttaataccactaccgaaaatgaaacagctcaaattcctgccgaagctatcattggctacttggatttggagggtgattctgacgttgctgttttgccatttgcaaacagcaccaacactggtttactgttcataaatactactatttcaaaccttgctgccaaggaagaaggtgtttcattaagcaagagagaagccgatgctgaagcttggcactggttgaaattgagacctggtcaaccaatgtacaaaagagaagctgaagccgatgccgatgctgaagcttggcactggttgaaattaagacctggtcaaccaatgtacaagagagaagctgaagccgatgccgatgctgaagcttggcactggttgaaattaagacctggtcaaccaatgtactaa

SEQ ID NO: 2559 - DNA, 282 bp, Saccharomyces pastorianus
atgtttctacagacgctccgccttaatatgccaagggtgctatcgcacttgaaactgtctcccgcaacggtaacgagggcgtacactctgccctccctcttgtcggcaggtcctcaacagccggcacttacagcagctaacaggtcgttggtgttcagcaggggctttaaagtcagaacctctatcaaaaagttttgtagcgactgctacctggtaagaagaaaaggacgagtgtacatctactgcaagtcgaacaagaagcacaagcagcgtcaaggctga

SEQ ID NO: 2560 - DNA, 3042 bp, Saccharomyces pastorianus
atgaaggacgtttctcattacggtcctgctttatgtaccaagtttcataatgactatgttctagccggctacgggcctttcgtccatgtgtatgactatcgttcgaatacgttgatcagcaaatgtagaatgtttcataaaaacaaagtccatggaattagcatttctgccggagaagaggttttggcctacggtgcgaggtcaatatcagtggtaaggttcgaagacattttgaaaaacgagtcattggtggattcggaaaagattaactcagattgggttactaatggtgaattcagttctgacgggtcccaagtatatttactgacctgttataacaaagtgctgatttgcgatttgagttgcgaagtgctctcaagcaaatctttacgtggagaaaggtccatcttatattctggtatgattaaagtctttgctccagataaagtgtatatcagtgctggtactgtcatgggtggtatcatcatctgggatcttttttcagagaccaaaatccacaacttgctgggccatgaaggttctatcttctatgttactttaagtaacaacggcagtttcgtagccagttgttctgacgacagatccattagactatgggatttagacactggtgaagaactgtctgttgggtggagccacacagcaagaatttggaatttgaagttctttgacaatgacacaaagttaattagtgtttcggaagactgtacatgtcgtgtatggaccgttatggaatctcaaaaaaacattaccgaattatcgatatctaatatttatgacgtgcacttgagcaaaaacatctggggcgttgatgtcaaagaagatgatatgatagctgtgacatctgggaatgacggcagattgaaactgatcgatctactacacttggaaagacatggtgatgaagaaacatcattcaacttggatgaaattagtcagcaacttgacattgtctttgataaaaatgaaactatcaaggggttccagggattttcgtttggtatagttatcatcacatcactaggcaagatccttcaatttagaaacactactaagcaatggaaattattgctaaccgacgaaaactttgtcgcgtattcaatcacgaacggaattcaagcacaaaatattgttgtcttctctaacaataagaaggatattcttttgattagatttagcgaaaatggagatgaagtaatgcatgttgagcaacatcatacaactgagctttccaagaccaacaactgtcttgtgactgagtacgacgaacattcatttcttctaaccttggaatctccaaaccctcgtgataagcttttatgtctagagatagattttcaagacttgaaaattaaaactaagcactgttttaataaacctgaaaactttgcttcctcatgtttagcgtcttttcaaaatttcgttttggttggatcgcgttttagtacattggcgatctttaacttacttaatgatgatgacgagcctttcataattaggagattatgtccaggtgacactactacctcaatcaaattcgtagaaaataaaaatgactccactgtcttttctgtaaccaacagggatggttactatgacttcatagaactgacgaaaagcaactgcgaaagcccccatccccaattttcctacaagattttacactctaacaagatgatgaaagggttcttagaaggtgcttttttcaattcaaacggtgaatatatcacttatgggtttaagtctagtttattctacctctacaatgagacaaactgttatgaattagctagtgaagtatgtggtggtgcccatcgtcaatggaagctcaacaatgtcaatgatggtcacattctgatgtatatcaagtcatcgcggttgcatctaaggaaaatgtatcattctgtgtttcctgagactttagaaaaaggcattcatggaagagagattagagacatttcgatttgtccaggggcaagtgccgatacagatggcaattttaaaggaggtcatatattttgtaccgcatctgaagacaccacgatcaaattaggatacttcgacaataaaacaggcagaatccggaacttttggactcagaggaaacatatttctgggttacaacgctgtcgattcattaatgaaaaattaatgatatcagcttcagctagagaagaattgtttttgtgggaattgaatgataagtacgataaacgaccatatgtaacaatacggcaaacgctaccgacatccactaacaacccagatttaagaatcatggattttgacgtgaaatttgtatctcagtcgggtgatttcatcttaataactgtttattcagattcagccataaagatctggtattacaaagaagaagaaaacaaatttgaattaattacggaaggtcgttacaagacgtgctgcatattcaacgtcgcgttggttgcactgaagaatcagcttttcgttgtcatttcaccaacagatggatatgttgttatctataatgtaacagaatacgtaccgtttaccattgatgttacttctggtgatttggcggacaataaactagatactgttgtttcgggtcttcccatgcctgtgttgcagttgcaagtgcatcagtcgggtatcaaatccttagactacgtcgttgacactatgagaacatcagcagcaattttgacaggtggtgatgacaatggattggggttgagctacttgacgttggatgctgtgaacactccagcgttaaaggcaagcgattttatcgattcagctgcatcttcaacaataacgtcaggtatattgatcaatggcggcgaagaagctatcaccacgtctgttgaccaaatcgtacgcgcttggaagattaccgaggggaaacttactctggcggatgaaaagtataccactgtggcggacacaggttcattggacatcatttcaaataatgacaacacggaattcgacaaaacgttgctgatcggtggtgtcgggctatccttatggagaaaatga

SEQ ID NO: 2561 - DNA, 630 bp, Saccharomyces pastorianus
atgtctttagaagaatttgacgaatttaaatatgaccattcaacaaaacgtcttgataccccatcaagatatctgctgcgtaaggcaagaagaaaccccaatggattacaagaactgcgtgagtcgatgaaatcttccaccatttatgtaggtaatttatcattctacacatcagaagaacagatttacgaattattcagcaaatgtggtacagtaaaaagaataatcatgggtttagatcgtttcaagttcacaccatgcgggttttgttttattatatatagttgtcccgatgaagcactgaatgcggtgaaatacttgtcagatacaaaattagacgaaaagacgattaccattgatttggatcctggatttgaagatggcagacagtttggtcgtggtaagagcggtggccaagtcagtgacgagttaaggtttgattttgatgcctccagaggtgggtttgccattccgtttgcagagcgtgtcggtgtacccaattctagattcgacaataatagcaattctcaatcaaccaccaatgattatattcccccccctgatgcaatgggtacttttagaccaggttttgacgaagaaagagaagatgataactatatcccccaataa

SEQ ID NO: 2562 - DNA, 876 bp, Saccharomyces pastorianus
atgaattataactgtgaaattcaaaacaggaacatcaacagtgttgacaatcaagtctgtctgcctcctatccaagtcctatttaactcgatagaaagacggaacgtgcccgaactggcatttgcaaatacagaacacccctgcgataacctgcggtgcaagatcaacggagaacaaacctatttcgctcctgtcctactcccacagcattcagacgtgtatcctgtagtcaattctggactcgaaactactactactatcgctacctcgcaattcctacctgagagtacgaaggagcccgaacacgtcttggagaatctaaagccttgctataagtcagctccaatctacgaaataatcaataatgaagcggatatgcacacagagacaaagaggccgattccagagtttgaagattctaaatcgaagaaaaagcaaaattctggtagaaggtctaacctaccaaaggaaactgtgcaagtattgaacacctggttattgaaccatctaaacaacccctacccaacacagcaagaaaagagggaattgttgattaaaactgggctcaccaaaattcaactgtccaattggtttataaacgtaaggagaagaaagatattcagtgactactacactttagtaaactcaattcccagtgataacgcgaacaataccccaatggaacaagcgcaaaacgcctcgatatatcacaacacattgtctgctgccaacaacaccacatacgatgccacatcgaactgctctaccgattatgaattgtccaagagattcgctcatgcccccgttacacgacgcaaaaaattgattgataggttagaagaactgaaaaaactatctaaccccgatatgaattga

SEQ ID NO: 2563 - DNA, 2352 bp, Saccharomyces pastorianus
atggtaaatactagaggttacacggcagtcccaaacgttgaacagccaaccagtaactcacaagatgtgccgactacacccgtatctgagcctgatatggaaatgccaatagagcctcccgtatatgtagaagagatgggcgtagaagaacctcgggtatcggaagcctttagtgaaaaagttcaacggttccgaatatgtttcgaaaataatgtagtgattccagtgaaggaaaaggtagtggatccactagcgcaaataatgtctctgatgtctgaaaagtttgatttgattttgagcaagtgtggtaatgttttggtaatgaaaaggatattttaccttgtgttaatgtctattgtgacagctttgatcatctccagtgataaattacccaatggaacagcccggggttcaagtggattattctcagaccacgaactcctattacagtacgccaagaagtctattgacctttcaaagatagagagagatttggagtatattagtagtatgcctcacatgtcaggaacaagcggagatgcagctgttcgacattacatcagagaatcatttgataaaaatggtataaagctggctggagaggaagaattcatggcatattcgaattatccaggaaacgcttcactttacgtgtacccgaggggtaattcagaaggatttggcatcccattaaatgaagaaaatttcaacccaatgagtcgcaatggtgaattcagaaacacagccgtaatctatggtaacgaagcatcattggacgatatggtttctctaaaagatgggggggtcttaaacggagacttcatcttacttttacattacggagattatgttttccagcaaatgatgagggcgcaggagtatggcgctaaggcggttatcttcatttctgaaccatacaaagataacaaagatgtggtacaaatgaaatctgttgccttacctcaaaacggtactggtgacgcacttacgcccgagtgggaagggtccattagggacccgattgatgtcgatgacgctagatatctgcccaagattccatcaataccgatatctactaatcaaggcgaaaaaattctatctacattatctgacactggtgtgaaattttcgaataatttatatagtgggtctcccaatgactgtctaatcgatctgctggtggaaacagcgactagggaacgacatccggttcacgacatagtgggtaatattgaagggtcagagcaaaacggaatggcaattgttatttccgcgccaaggaactctgttagctttggtactacgtatccttcttttgggactgttgtcttgttatctctaattcaattgtatcaagaaatggtttacaaattcgactggaaacccttaagaaatatttacttcatttcctttggtggttcagagtttaatgaagcaggagccacagaattgatggagaagagagcagaagtactgaagaatgaaatatacaccctaatcgacgtaggccaggttggcatatgggatgagagtaacattttggacatacaatgccatccgttactagcagactttttccaaaagaatggtaccagccgtggtctcgatgttcaagtggataacattcatcagttcggtgactggacgccgtacctggcacggggaatgcccgttgccattatttcatcgcctagtgtgatgaacagaaagcttcctataggcaccgtagaagatacgttcgaagccgtcaaggatacattgcgagataaaaataagggtgaaatgctctctgaaatgatgctctatcttgttgaaaaatcactcgagctcatcgacgacccaatgatcccattcagtgtatcaaattacgcagaattcctttcaaataccttgaagggtattcagaaagagtgtcccgataccgtgaactttgacgaggtattttcaggtacggcgctatggaaaaacactgaactacagttcaatacgtggaagagcgggtgggcggacctaatgtatggtagcagcacttctatagagcccaccatcatagccattaaccgttggtcgtggaactacttactgtcccggattggtatcacccagtgcttggagaaagggttaccggaaaggacgttttacaagaacgttatcctcggtcccaagctctgggtgcagaaagatgacccacttcgctcatggacttttcctgaaatcagagattctattgccatcaaagactgggtttccgtacaggaacaactcaacgccttaggcacgatgttgcagaacacagctcgttatttccttgggaacaaaaacctccgcgaaataaacactaataattactag

SEQ ID NO: 2564 - DNA, 894 bp, Saccharomyces pastorianus
atgtctggaagctatcaacatctatccaacgtgggatcgcgtgttatgaagaggttgggtaaccgacctagaaatttccttccccatagtgaaaagttcatccaaaaatctactcccgagttcatgaaatcagatttgaaggatgtagatgaagagactagcttcaagagcgaaaaagaatggaagtttttaccgggagacagagtagttataatgaaaggagcttccaagggaaacatcgccataattaaatcatttgataaaagaacaaatgcatttgtactagatgaaaatggaccaaccaagacagttcccgttcccaagcagttttggctagagggccagacctcccacatgattacagtcccagtatcaattttaggaaaggatttaagattagttgctgatttcgacgatgaaaaaaccccaggacagacaaggaccgtggcggtgagggatgtttcatttaacggttcatactatgatgaagactacaaaaaggtgatgccatatagatgtgtaaagggccaaccagatttggttattccatggcctaaaccggatccactcgatgtgaaaacggatctggccaccgatccagcaattgctagagaacaaaccttctgggtagattccatagtgaaaagccctattccaaagggtgccattctgagtattcgtaatcctcactccaaatacaagaggggcactttgacagcgaaagatatagctaaactggtggcacctcaaatgcctctaactgatgttaagaagggctacttggaagaaaagaaagaactagcccaaagagaaatgccaaagttaaccgaagaagatatggaagccattggggccagagtttttgagtttttagaaaagcaaaaaaccgaataa

SEQ ID NO: 2565 - DNA, 459 bp, Saccharomyces pastorianus
atgtcgttcattaaaaacttgctatttgggggcgtgaaaacgagcgaggacccaacggggctcacagggtccgcagggtctaacacaaacgattccagcaaacccagcgagccggtggtggccggtaacttcttcccaaggacgttgtccaagttcaatggtcacgatgatgaaaaaatcttcattgcgatcaggggcaaagtgtacgattgcacacgtggaaggcagttctacgggcccagcggaccatacacgaactttgcaggccacgatgcgtcgcgcgggctggcgctgaactccttcgatctggatattatcaacgactgggaccagcccatcgatcccttgacggacctgaccacggagcagatcgacgcgctggatgagtggcaggagcatttcgaaaacaagtatccttgcatcggcacgctgattccagagcccggcgtgaacgtatga

SEQ ID NO: 2566 - DNA, 1122 bp, Saccharomyces pastorianus
atgactattgatgaggatgtgcgggaaatttccccatattttcaggtaaggcaaactacatggggaggtagggcttgttttagtagcagtaatattcctgaaggaacaacagttttgcaagctgctcatttcacaggatcatccatttcctacgaatttagaaaggaagtttgccacaattgtttcgcgtacgataatgcgagaaccatgaagtacaaactgaactatgattctattaaaaatctgatctgcggagcgggttgtcagatcaatccccaaaagttcctcggcgctggattatggttttgctcggaatattgcagagattcttatcttcaaataccgaatatcgttgaactgatcgagttttatgagatattattgcgccatttcccaaatatgttgaaaagatataatactactaccgaacaagagacaaaattaaataccgtctcgatttcagaaagcattatacagtctgcatgggacgaaattgaaaacgattggataccaagcatcgataacatgaaaggaaccaaaaaaataaaccaattaccaccaatttcagaagacgagtactgttgtattaggtttgtttgcgaaagtttgtttaatttgaaacacatggaccctcagtctataacgcaacgaactttcaatatgctgcaatccaatgagcttggtaaaatatcgagatttcctgtcttgttacatttccaaaagctagtgtttcaaacactctacattctgttaccttcacatttgcacaaaatgctcacaataccattgttaagacatattttaggtacagaatatgggaacgcattcggcatatggcaagacggtgaagctgctgaaagtagagagtattttggatactgggtattcccagaggcctcttacttcaatcattcttgcaatcccaatgtgactaaatatcgcaaaggtaattcaatggtgttcaaggtcaataaagacatcaaagaaaacgagcagatatgtatagattattccggagtgttggccgtaccaactaaaaagcgtcggaagtttttggctgaaagctggttttttgattgtgcttgtgagaggtgtaactcagaattgcaatctgtccattaa

SEQ ID NO: 2567 - DNA, 768 bp, Saccharomyces pastorianus
atgattttcaatgtattgtgtagtttattgctagtttcttccggtgttgtatgtgcccaatacaccaacggcacccagagctataccccatacaccaagacattatccccaacctactctgttctgcctcaagagacaacattgacatacagcgatgagacgaccaccttctacttgacatccactgtctactctacccattggttcaccccctctccatcagctactattacaagcgcacctaccactagcacccccgctttaagtacatctacatctgaatataccaccacctatttcgacacagacaccacttacacatctactataacttccgcttttaccattactctgtcctcggaggccactactgagaaggctgaatccgttttcactagcgtcacagaaattgcgtctaccatcactaactcgggtagcacgtacacttccaccttaacttcaactttgttagttactgtacgtaattcgaaagcaagcgctaccgcgacagttgcttcaaccacaggcgcagcctctgatatcggtgctttagaaaaattggtctctgctgaaagccaatctcaagctgctgaaaccgcatccagcggtgatgcgcaatgtaatgcagccactcagtatgttacaattactgctactccagttactaaattagtcactactactgcagaacctgtcgttcaatacgttactgttacagccggtgctggtaatataactactgctgctaacaacggtacccacatttag

SEQ ID NO: 2568 - DNA, 831 bp, Saccharomyces pastorianus
atgttttcttctgaagaaaaggatacctgccagttgttgggacctgtgtctcttttggttcaaacattgatgggtataacagcagtggctgtgttactggttaaaagaaactatgagcatccaagaaggaaaatgatcgtgtggagttatgatatcggaaaacagattatcggttcactcggaatacattttttaaatctgggtattagcatattgaaaagaaggcggaaactatttttactggccaccggtagtgatgacgacgaagaccaatgcgactggtatttcctgaatttgctcttagataccactctcgggatccccattctttggttatccttatacacaattgaaagagtgctaaaatctctgcattttcaaaatattgaaagtggtaattacttcccatctaaaaaggtcaagaatcaccctagaacgcctttattttctgcatttgtgaaacagctggtcattttcattctcgggctgggcgtgatgaagctatgcgtgtttttcatacttaattacctggaggaatgggcctattggtttgcggatctgatccttggctggtcagattcatggccaaacttgcaggtttttttggtgatgtttgtcttccccattttgctgaattgctttcagtacttttgcgtagataacgtcatcaagttacctacagagagtttgacgctaactaatgcggagaattttgaaacaaacacattccgcgatgacgaatttcccgatctatcggaagactggacttacaccaacactgaagcacctaacaaaggcaacaacgcttccagctatggcagtataatatag

SEQ ID NO: 2569 - DNA, 3276 bp, Saccharomyces pastorianus
atgtcttctggtctggtcttagaaaatacggcacgtagagatgcgttgattgccatcgaaaagaaatatcaaaaaatatgggctgaagaacatcaattcgaaattgatgctccatcaattgaagatgagcccatcactatggactctgaagaattgcaccgcaaataccccaagtttatggcatctatggcctatccttacatgaacggtgttttacacgccggccattgtttcactctttccaaagtcgaattttctatcggtttcgaaagaatgaatggtaagagagctttgttcccattaggtttccactgtactggtatgccaattctagcttgtgctgataaattaaagagagaagccgaattatttggtgataactacgacaatgtaccagctgaagaagaagaaactaacgaagaaactccagtcgaaaaagaacatgaggatgtcactaagttcaaagctaagaaatcaaaggctgctgccaaaaaaggtcgtggtaaatatcaatttgagattatgttacaacttggtatcccaagagaacaaattatccagtttgccgatgctaagtattggttaacttatttcccacctctatgtgaaagtgattgtagctcgctgggttcccgtattgactggagacgttcttttgtcactaccgatgctaatccttattatgatgctttcatcagatggcaaatgaacaaattaaaggctgcaggtaagatcaaatttggtgaacgttacaccatctactcagaaaaagatggtcaagcttgtatggaccacgatagacaatcgggtgaaggtgttacaccgcaagaatatattggtgttaaaatcgaagctttggaattcgccgatgatgctgcagcaatcattgactctacttccgccattgacaaatctaagaagttctactttgtcgccgccaccttgagacctgaaaccatgtacggtcaaacgtgttgcttcgtctctccaacaattaaatacggtattttcgatgctggtgtctcttattacattactactgaacgtgcattcaaaaacatgtcataccaaaagttgacaccaaagagaggcttctacaaaccagttgttgccattcctggtaaggcctttattggtaccagaatccatgctccactatccgtatatccagaattaagaattttacctatggaaactgttattgccactaagggtaccggtgtggtcacttgtgttccatctaactccccagatgactatattactaccaaggacttgctgcacaagccagaatattacggtatcaactctgaatggattgaccatgagatcgttccaattatgcgtactgaaaagtatggtgatttaactgccaaagccattgttgaagaaaagaaaattcaatctccaaaggataaaaatttattggcagaagccaaaaagattgcttacaaagaagattactatactggtactatgatttatggtccttacaagggcgaaaaggtcgaagttgccaaaaataaggtcaaggctgatatgattgctgcaggtgaagctttcgtttacaacgaaccagagtctttagtaacgtctcgttctggtgatgactgtattgtttctctggaagatcaatggtatgttgactatggtgaagaaagctggaagaaacaagccattgaatgtttggaaggtatgcaactatttgctcctgaagtgaagaacgctttcgagggagttttggattggttgaaaaactgggccgtttgtcgtacttatggtttgggtactaggttaccttgggatgaaaaatacttagttgaatctttatcggactctactatttatcaatcattttatactattgctcatttgttattcaaggattactttggtaaagaaatcggtccattaggcatctcagcagaccaaatgaccgaggaagtgtttgactacattttccagcatcaagacgatgttaaggattctgatattccgttagtctccttgcaaaagttgagaagagaattcgaatacttttatccattagatgtctctatctctggtaaagatttgattccaaatcatttaacttttttcatctatactcatgtcgcattgttcccaaagaaattctggccaaagggtattagagccaatggtcatttgatgttgaacaacgccaaaatgtctaagtccactggtaatttcatgactttagaacagactgtcgaaaagtttggtgcagatgcttctcgtattgcgtttgccgatgctggtgacactgttgaagatgccaattttgatgaatctaatgccaatgctgctattttaagattatttaacttgaaggaatgggcagaggatattacccagcatccctctcatttgagaaccggtgaaataactgatttctttgacatcgcattcgaacatgaaatgaatgctttgatcgaaaagacttacgaacaatatgctttaactaattataagaatgctttgaaatacggtctttttgatttccaagctgctagagattattaccgtgaagctagcggtaccatgcataaagatttgattgcccgttacattgaagcacaagccttattgctggctccaattgctccacattttgctgagtacatgtaccgtgaagtattaggcaagcaaagttctgtacaaaataccaaatttccacgtgcttccaagccaatagataagggagttctggcctctttggattacttaagaaatttacaaagaagtattagagaaggtgaaggtcaagcactaaagaagaaaaagggtaagtctgctgaagttgatgcatccaggccagttaagttgattttattaatttctgaatctttcccagaatggcaatcacaatgtgttgaagttgttcgtaaaatgtttgctgaacaaactttaaatgataacaagaagatcagagagtacgtcgaacccaaggaaatgaagagagctatgccatttatttctttgttaaagcaacgtttagttagtgaaagcccagaacatgtctttgaaagagaattgcaattcaatgaaattgacaccgttaaagctgctgctaagaatgttgaaaaggctgctcaagctttgaaaattgctgagttcagcgcaatttctttcccatatggcgctaagaccggtaaggatatatttactggtgaagaagttgaaatcccatctgtaacaaagattgttgaaaacgctgttccaggtaatccaggtgtcattttccaaaacatgtaa

SEQ ID NO: 2570 - DNA, 762 bp, Saccharomyces pastorianus
atgttaaagctagctagcacatttatctcgcccttatcaaggaatagtgtcgtttccttaagaatagcttccacatccaaacgatatcagtcttcatttacatttttaaataaccactcgttattgtccaaaagtcagatgaaatctaaaaggaaaaagggtagtaaaaaggcggcgtatcatcgccaatccccagagcacgaatgcaatacaccacttatagagcaaagcgaagcaatatccaaaacagattctaccaatataagggcttcacattcaagaaagaaaagacgcgatttttcgtggcttccaagagttccatccacctcacacctaaagcatagtgacatgaccacaaacgtactctattctggatacagacccatatttattaatcctaatgacccaaagctaaaagaagataccggaagtacattgtacgagtttgccatgaagctagacgatttaaatgaacctctgtccccatggatatcctccgccactggacttgaattcttttcagaatgggagaacatacctagtgagctgctgaaaaatttgaaacctttccatccacctggcgaaaaagcaatggacgttaatgaactaacgagtgtagctgctaaaggtaatacggcaaacagcaatgagaataacgagacttttcagaagaaaatggacgaggttttaaaaagaagaggtaaaggaagaaaaaaaccagtggtgacattactacaaatgaaaaaaaaaatggaaggatga

SEQ ID NO: 2571 - DNA, 918 bp, Saccharomyces pastorianus
atggtaaaaagtttcattcatgcttcgaagataagacatgcagcacgcaaaaggaagcatcattccaagtacaaaaccttgcgaaagctaatagaggaaaatgcttacaagatagagtcgtcaaagccgttgaatggaaaactttttaagtactggaaaaatagacgtcgattgttttcaaaaatagattcgtcatcgatatatatgacagatgagctttggttcagtgtaacgccagaaagaattgcgtgtttcttggcaaatttcgtcaaggcatgcataccaaacggtgagaagatattggatgtattttgtgggggtggtggtaatactatacaatttgccaagcaattcccttatgtttatggggtggattatagcatcgaacacatatattgcactgcgaaaaatgctcaaagctatggagtggatgataggatatggctgaaacagggatcctggaaaaaactagtctctaaggaaaaactctctaagataaagtacgattgtgtatttggatcgccgccctggggaggcccagagtacttaagaagtgacgtttatgatctagagcttcatttgaaacccatggggataacgaaaatgctaaagagcttccttaaattaagtcctaatgtgatcatgtttttgccaaggaattcagacttaggacagctttctcgagccacgaggaaaatcctgggcccatttgccaagtgtaaagtactatatgttaaggaaaatggatatatgaagggaattttttgcatgtggggggagtgcttctttaattacgaacctggaacgcaaggaaacaacggagtagagctgtgttctgaagacgaaaaacaggagaaaggcgaaactactgtagcaaccaaggataaaagtgtagacatttacgacataaatggttga

SEQ ID NO: 2572 - DNA, 861 bp, Saccharomyces pastorianus
atgatcacggactcgtcaattttaaaaaagcacgcatcatctaaaaaaagcacaaggatagtatctctgacgctgattttcctcgggatagtaagctttctagtgtttacatgggacgactccttagaattttacaataacgctacgggccttaacgacagtaacgatagcaacgagcaagggagcgcgaagagattgatttacaagctaccaaacttattaaagaccgcagacggtcttccagataagaaagaaaatgaattgaatattttaaaagtcaaagaagaaatctcgcatatccaaagtgaagtcgaggtcgatatcccggcatccgcatttgagtctacaacatcgtctttatccacagcattccaaaaagatgtgcccgcgcccagaacagctacatcaacagtgccctcatcctcatcctctattatcttgaaaagaaacatcaaccaaaagaaattcgaccccaaagtgagctttcttgacatcataaatacctcgccagctgtgctatttattatgtcatcacaaacggactctgtttttttgagaagcttattacaaaaagaacttgagatttcacctgaattggctattgtcgatttggaaaaacattctcatggttatgaattagaaaagtatatcaagcaaaataaactggacatagaccccagtacttccttggaaaccatccactcgccctacttgtttttgaatggcatttccgtaataaacaacggaatagcaagagacataatcgagcctcattcaaaggggttgttactatcagttttaaagtccgaagcccgcggtaacttactcattgaaaagaaagacatcccttccaattcatga

SEQ ID NO: 2573 - DNA, 1221 bp, Saccharomyces pastorianus
atgttcagtttacaagctctattaccattggccttattgttgttggccagcattaatccagccgctgccaaagttcacaaggctaaaatttacaagcatgaattgaccgatgagatgaaggaagctacatttgagcaacatttggctcatttaggccaaaaatacttgactcaattcgagaaagccaaccctgaggttgccttttccagagaacatcccttttttaccgaaggtggtcacgatgtcccattgacgaactatttaaatgctcaatattatactgatatttccttgggtaacccacctcaaaacttcaaagttattctggatactggttcttcaaacctttgggttcctagtaccgaatgtggttctttggcttgtttcctgcactctaaatacgatcatgaagcttcttcaagttataaggctaatggtaccgagtttgctatccaatatggtactggttctttggaaggttacatctcccaagacacactctctatcggtgatttaaccattccaaaacaagactttgctgaagctaccagtgaaccaggcctaacatttgcctttggtaaattcgacggtattttaggtttaggctacgacactatctccgtcgataaagttgttccaccattttacaatgccattcaacaagacttgttggacgaaaagaggttcgctttttacttgggtgacacttctaaggatagtgaaaatggtggtgaagctacctttggtggcattgacgagtccaaattcaagggcgacgtcacttggttgccagttcgtcgtaaggcctactgggaagttaaattcgaaggtattggtttaggccatgagtttgccgaattagagggtcatggtgctgccattgacactggtacttctttgatcactttaccatcaggtttagctgaaatgatcaacgccgaaatcggtgccaagaagggttggagtggccaatacgctcttgactgtaacactagagacggcttacctgatttgactttcaacttcaacggttacaacttcaccatcggaccatacgattacactctggaagtatcaggttcttgtatttctgcaattactccaatggatttcccagaaccagtcggtccattggccatcattggtgatgccttcttgcgcaaatactactccatttacgatttgggtaaagatgcagttggtttggctgaagctatttaa

SEQ ID NO: 2574 - DNA, 2514 bp, Saccharomyces pastorianus
atggaaaatattacacagcccacacagcaatctacgcaagccacacaaaggtttctgatcgagaaattctcgcaggaacaaattggtgagaatattgtgtgcagagtcatttgtaccacgggacaaattccaatcagagacctctcagctgatatttcacaggtcctaaaggaaaaacgatctattaagaaagtatggacattcggaagaaatccggcatgcgactatcatctgggcaatatttcgagactatccaataagcattttcaaatactgctgggcgaagatggtaatcttttactaaatgacgtttccactaatggaacctggttaaatggtcaaaaagtagagaaaaataacaaccaattgctatcccaaggtgatgaaataactgtcggcgtaggtgtccagtcagatatcttatcgttggttgtattcataaacgataaatttaggcaaagcctcgagcaaaataaagtagatcgcaaaagatctaacttgaaaagcacgtccaaaaccacctctccaggtcttacttcctccactccatctgtcgtcgccgctcacaagactggtattttcaaagatttttctattatcgatgaagtggtaggccagggtgcttttgccacagtaaagaaagctatagaaagaaccactggaaaaacgtttgcagtaaagataataagcaaacgtaaagtaatcggtaatatggacggtgtaacaagagagttggaagtgctacaaaagctccaccatccaaggatagtgcgtctaaagggcttttacgaagacgctgaaagttactacatggtgatggagtttgtttcaggtggtgatttaatggattttgttgctgctcatggtgctgttggggaggatgcgggaagagagatatcgaggcagatcctcgaagcagtgaaatacatacactccatgggtattagtcatcgtgatttaaagccagataatatccttatcgagcaagacgatcccgtgttggtgaagataaccgattttggcctagcaaaagtccagggaaacgggtcctttatgaaaacgttttgtggcaccttagcatacgtagcacctgaagttatcagaggcaaagattcgtctgtatctccagacgaatatgaagaaagaaacgagtattcctcattagtggatatgtggtcaatggggtgtctcgtgtatgtcattttgacaggtcacttgccttttagtggtagtactcaggaccaactttacaaacggatcggaaggggctcttaccatgagggtcctttaaaagatttcaggatatctgaagaagcaagagattttatagattccttgttacaggtggatccaaataataggctcacggctgcaaaggctctaggccacccttggatcaaaatgaatccgctcgtcccacaatcggatggtgatttttcccaaatctctttgtcccaatctttatctcaacagaaaatactagaaaatatggacgatgctcaatacgagttcgttctagcacaaagaagattgcaattagaacagcagcaaatattacaagagcaagagcaagagcaagagcaagagcaagagcaagagcaagagcacaatgaagaagatcaagatggtaaaattcaaggattcaaagtacctgctcacccacccgttcgatatacacagccaaaaagcattgaggctgatagccaagaacaaaaaatcatgcatcccaataatataacaaacaacatgagcgcaaagaaaaaggggcatggtagatttttgactttacagccattacctgatagcattattcaagaaagtctcgaaattcagcaaggtgtaaatccatttttcattggcagatccgaggattgtaattgcaaaatcgaagacaacaggctatctcgtgtgcattgtttcatttttaagaaaagacatgctatagggaaaagtatgcatgaatctccggcccaaggtttggacgacatttggtactgtcacacgggtactaatgtaagttatttaaataatagtcgaatgatccaaggtacgaaattccttttacaagagggagatgaaataaagatcatttgggataagatcaataattttgttattggctttaaagtggaaattaatgatactacaggtctattcaacgatgggttgggtataccgcgggaacaaagagtaatattgaaacaaaccactgaagaacaagatctggttaagaggctaacccaaatgatggctgctcaacgtgcaaatcaaccctcggctgcttcttcaccaatggcggctaataagtcacaaattggcgtcgtagccaataacagcaacaactcagtcttaagcgatttggtagaaccccccagtaatgcaaacacgggaaacatccttaagagaatacactcggtaagtttgtcgcagtcacaaattgatcctagtaaaaaggtcaaaagagccaaactagaccaaacttcaaaaggtcccgagaatttacaattttcataa

SEQ ID NO: 2575 - DNA, 1077 bp, Saccharomyces pastorianus
atgctgccggaaaaaagattattgaccgcagaggacatgaaactatgggagaagtcccaaacaagagctgatttcacgaagttcattataaacctagctgaatctgttaaagggcacgaaaactctcagtacaaggaaccagtgtctcagcaaataactggtatgctgaacctgctttcccagataagagacattatagagaagcacccagtggtgcaagatgtagatagttcaagatttggtaaggtggagttcagagatttttatgatgaagtctcacaaaattcccgaaaactgttgaaatctgaattttcttcgcttacagatgaacaggtggaacaactatctatttatcttgatgaatcatggggcaataagagaagaatcgattatggttcaggtcatgagctaaatttcatgtgtttactctatggactatatagctttgagattttcaatctttcaaacgattcgacgaatctcattctgaaagttttcatagagtaccttcacataatgagagtattagaaactaagtactggttggaacccgcaggctcgcacggggtttgggggttagatgattatcacttcttaccgtttttattcggcgccttccaattgaccacccataagcacctaaaaccaatatccattcacaatagtgagcttgtagaaatgtttgctgatcggtatctgtattttggttgcatcgcattcattaataaagtcaagtcatctgcctctttgagatggcattcccccatgctagatgacatcagcggcgtaaagacttggtcaaaagttgccgaaggaatgataaaaatgtacgaagccgaagtcctcagcaaactgcccatcatgcagcatttctatttcagtaaatttttaccctgtcctgaaggcgtatctctaccaagaggccatatacacgatggcactgatgtggacgacgagtgcaacattgaaggtcatgcccatagtacttggggcgattgttgtggtataaaattaccaagtgctattgcagctactgagatgaataaaaaaaatcacaagccaataccttttgattaa

SEQ ID NO: 2576 - DNA, 1356 bp, Saccharomyces pastorianus
atggatgaaaacgtttataattttgaaaatttggcggatatagacaagttctatacgacgatacggtggaacaatcaatactcgcacatgagtaccttaccatcttatctacaaaaggagagagagagccataaatccctgttggagcggtatgatacctacgcaaataaaaattcttcttccaattgtgaaaacaaggaacttgcgctacagactatttctaaagatatgcgaggaacatctcaagctttagttgacaagaaagagcaagacacgaatgcatcatcttttgttgatgaaatttttcagccagaaagcactgggcactttatagtaaataggtatgaaaaactgatatcacaaaaaccagaatggcatgccccttggaaactttcacgcgttatcaatggacatcttggatgggtacgatgcgctgcaattgaccccgttgacaacgagtggtttgtcactggaagcaatgacacaacaatgaaagtttgggatctcgcaacagggagattaaagattactttaacaggacatgtaatgacagtgcgtggcattgccgtctcggatcgacatccctatttattttctgtcagtgaggataagacagtcaaatgctgggatctggaaaaaaatcagatcattagggactaccatgggcacttgtccggagttcgtaccgtgagtatacatccaacgctggatcttatagccactgcagggcgagatagtgttgtcaaactttgggatattagaaccagggtacctgtcataacgctcgtggggcataaaggtcctatcaatcaggtggaatgtgctccagtggaccctcaaatagtaagctcatcaactgatgctacggtgagattatgggacattgttgcagggaaagctatgaaagttctgacacatcataagagatcagtgagagctatcgcgttacatccaaaggagttttcaatggcatcggcgtgcaccgatgatattaggtcgtggggattagcagaagggtctttattaactaatttcgagtccgaaaaaacaggaataataaacactttgagtattaatcaagacgatgtcttatttgctggtggagacgatggaatgttgtcgttttatgactacaaatctgggcacaagtaccaatctttggctacgagagaaatggtaggctcgttggaaagtgaacgaggcgttctgtgcagtactttcgataaaacgggactaagattgattactggggaaacagacaagagtataaagatttggaaacaagatgaaactgcctcaagaaaatcggaacctgggttagcatggaatcccaatctacgaactagaacgttttaa

SEQ ID NO: 2577 - DNA, 2613 bp, Saccharomyces pastorianus
atgtcgactacaatggcaacaccggcgaaactaaagaacttgcttctcaacctacacactcgttgtattgggctacatattaatgatgtcacactaaaagtatactttagactactgatacgacaccttctacagatatccaggtcaaatgctgctcatcccaagcaaaggagaagggcccagatattactaatatcactttttgtgtcagcagtcacgcttttatccggcataacatacggtaccaccaaaattattttaaagtgctacaaattctacaaatacccatggaaaaggaagaacaggaggcctgtaattagaagaacaaggtcccaaatgcagttggatagtggtgcgaggataatgtacatccctgaagtggagttattagatcgtcagaactcgaaagataataaacatgaaactactatagataagaagaagaggaaaagaatctttatcccaccaaaggataacgatatatacgaacatgacaaatttctttttaaaaacgtggaaccggagagaacgaaaaactcacaattattctactcgaagtttttgaatcagatgaatgttttatctaaaatcttaattccaacagtttttgataaaaattcgttcctcttagtagctcagattttttttttggtaatgagaacttgtctatctttgtttgtcgccaaattggatgggcagatagtcaaaaatattattgctgggagagggaggagctttttatgggacttggggtgctggtttttaattgctgttccagcttcttataccaatagcgccatcaagttactccaaagaaaattaagtttaaactttagagtaaacctgacccgttatatccatgatatgtacctggacaaaagacttacattttacaaattaatatttgactcgaaagcatccaattcggtgattaaaaatattgacaactcaataactaacgatgttgcaaaattttgcgatgccacatgctcagtttttgcaaatattgcaaaacctgtaattgatttaatattcttttctgtttatttacgtgataatttgggtactgttggtgtggcaggcatatttgttaactatttcattaccgggttcattttaagaaggtatacgccaccattgggaaagctggcgagtgaaagatcggcgtctgatggtgattactacaactatcatctaaatatgatcaacaatagcgaagaaattgcgttttatcaaggaacagctgtagaaagaacaaaagttaaagagctatatgatatactaatggaaagaatgctattggtcgacaaatgcaaatttggttataacatgcttgaagactatgttttgaaatacacatggtcaggtttaggttatgtttttgcctctattccaattgttctctctaccttagcaactggcattaatgcggaggaaaaaaacatgaaagaattcatagtcaataaaagattgatgttatcacttgcggatgcgggttcaagattgatgcattcaataaaggatatttcacagctgaccgggtatacaaataggatttttactctactttctgctcttcatagggtccattctctaaactttaattatggcgccgttccttcaatatcagcgctgcacacagaagacaatgcaagaaatccaaatatgttaaccaatgctgacaattcacaagacgttattcgtggcaccgtccaacgcaactttaacggcatcagattagaaaacatagatgtaataattccatccgtaagggcaaacgagggtattaagttgatcaacaaactaactttccaaattcctttacagatcaattccatggcttcaaagtccaattccatacaagatttatcaaaggcaaatgatataaaactaccatttttacagggatctggttcaagtctacttatattggggccaaatggatgtgggaaaagttctattcaacgtattatagcggatgtttggccagtatataacaagaatggtctactatccatcccttcagaaaataacatattctgcattcctcaaaaaccatattttagtaggggcggcaccttgagggaccaaattatctatccaatgtcttcggacgaattcttcgatagagggttcaaagataaagatttagttcagattttggcagaggtgagactagactatcttttgaaaagaggcgttggattaacgtatttggacgctgttgccgattggaaggatttattaagcggtggtgaaaagcaaagagtaaactttgctagaattatgttccacaagccattatacgtagtattagatgaggctacaaatgcaattagtgttgacatggaagactatttgtttaaccttctgaagagatacaggtttaattttatttccatctcacagaggccgacgttgatcaaatatcacgaaatgttgttagagattggtgaaaatcgtgatggcaattggcaattgcaagccataggcacagacgaagcaattctatcaattgacaatgaaatagaagaactagagaaaaaattagagaaagtaagaggttgggaagatgaaagggaaaaactgcagaaaaagcttgaaatcatttga

SEQ ID NO: 2578 - DNA, 1359 bp, Saccharomyces pastorianus
atggcccctaccaacgtgaccaagaagccttctcaatacaaacaatcttctagaaagggtaagaaagcatggagaaaaaatattgacatttctgaagtagaacaatatatggaaaaaaaaattgaccatgaagttacacatggaacaagtgatatgacttcgttacagaatgatgcccttttccaagtcgatgttgaaggtgacgacatattgaaaaagaaattgattaagagaaatcaaatcaaaaaaagtttgaaaagtagagagattcttgatgccgtcaaaactaattcaaaaatttcagcacttaaacatcatacgagtggtagtggggaaaaatccaagaaaattcaaggtgtttctaagcatgaattgaaaaaattaatggctttggctggcagagttcacggtgaatcaaagatcaagaacagagctgccaaagatggtttaatcaaatcaacggctggcgacttgtggggtagcgaatctagtcccaagaaacaaaaaatcaaactgccttccggtattgaacttgatgtgaatgaaaagggccaaatacctgaggatttactcaaaaaatcaacaacaggttggtctattgcttcagttagaccagaaactttgaacgtggaaccacttgcagtgaaggactttgtggagcttccacatgctggtaaatcttataatcctaacgacaaatcttggtctgaattgataaataaggagtataaagatgaaaaagtaagagaagatgacagagtcgccttagaattgtatagagaaaggattagtcatttaatggagacattagaggacaatgaagaggaggaatcttcctctgacgaaggggaaaaagaagaagagaacgaagacgagcaaagcggtagttctgatgatattgaagtaagactatcaataaatgaacctgttaagaataagaaaaagacgaagtatcaaagaaataaagcaagcaaacatgaagagaaggttaaattgcaacaagaactaaagaaattgagagagcgggttaaagatttagaaactgttattgattctgaggagaccaggaaaacttctgtcgtagagcctaaaaatgccaacaaggttaagaagagcaagaaaaataaaaaaaataaattaggcaccaagtattctgttattgatgagagattggaagtcaaattctctgatgaactatctgattcattgagaaaagtgagacctgaaggaaacttgctatacgataccgttagaaaattacaaagttccggtaagattgaatcaagagtaccggttaagagaggcagaagatacaagcaaaaaatcactgaaaagtggacacacaaggactttaaatag

SEQ ID NO: 2579 - DNA, 1305 bp, Saccharomyces pastorianus
atgtctcaatacgcaagttcatccttatggacttctttcttgaagtcaatcgcttcatttaacggagatctttcgtcattatcggcacctccatttattctatctccaatctcattgaccgaattttcacaatactgggctgaacatccagagttgttcttggaaccttctttcatcaatgaagataattataaagagcattgtccgatcgacccagaagtcgagtctgcagaaatctctcgtatgttggcagttaccaaatggtttatttctactctgaaatcccagtactgttctcgtaatgaatctttgggttctgagaaaaaacctttgaacccatttttgggtgaattgtttgttggtaaatgggaaaataaggagcatcctgaatttggcgaaactgttttgttgagcgaacaagtctctcaccacccacccgtcacagccttttctgtcttcaatgacaagaataaagtgaaactgcaaggctacaaccaaatcaaagctagtttcactaaatccttaatgctcaccgttaagcaatttggccacactatgttagatattcatgatgaaagttacttggtcactccacctccattacatattgaaggtatccttgttgcttcgccttccgttgaattggaaggtaaatcatacatccaatcttccacaggcttgctatgtgtcattgaattttcaggtagaggttatttctctggtaagaagaattctttcaaagctagaatttacaaggactctaaagatagtaaagataaagaaaaggcgttgtacacgatatctgggcaatggtctggctcttcgaagatcaccaaggctaacagaaaagaagaatcacgattattttatgatgctgctagaattcctgctgaacatttgaatgtcaaatcccttgaagaccagcatcctctagaaagtagaaaagcctggtacgatgtggctggtgctatcaaattaggtgatttcaatctgattgcaaagacaaaaagtgaattggaagaaacacaaagagaattaagaaaagtggaagaggctaaaggtatcagctggcaaagaagatggtttaaagatttcgactactctgtaacacctgaggaaggtgcattcgtacctgaaaaggatgacactttctctaagcttgcttctgctttgaatttatcaacaaagaatactccaagtggtactttagttggcgacaaggaagataggaaggaagatatctcgtccattcattggagattccagagagaattatgggatgatgaaaaagaaattgttttgtaa

SEQ ID NO: 2580 - DNA, 1059 bp, Saccharomyces pastorianus
atgtctctaccaaaatggtgtcctccacattcaaacctaaagataaatccaatgacgggggaagacgtgtactgcatatgtaaaaaaccggattatggggaactaatggtaggatgtgatggctgcgatgactggttccatttctcttgtcttcatattcctggccagtttaaagacttggtgttttcttttttttgtccctactgtcaagcagggattactggtaagaacaaagatgccataatgaatggtgaaatgaacttgcccaagactttatggaaaaggaaatgtagattgagcgattgttacaagccatgtctacaggatagcaaatattgctcagaggaacacggcaaagagtttgttgatgacatttgggctcgattgaaaacggatgaagacaaagttaaagttaaaaaaatggtcgaacaaactgaacatgtagataagttcaaaaaattcggtcaagctgattttatcaacaacgatatagttataaaaaatgaccaggaaaaagagattttcgatcaaattgtagcacgagatagtacattaaaaatacttgaaaacgatcttcgggaacttcaagagaaaacgctcccattattcaaaaagaaatttgagcttttagaggtatatttgagttggttagacaacgtgtacactgaaattcgcaagttagacgatgacatcgcggccaatatggaaggcgataaaacttctactaaggggacaaataagaagaaaaagaacaatagcaggagcaggccgaggaggaatatttgtggctattactctacatatgaacagacaccttgcgctgtagaagaatttgtggctgagattgggaaggacgaggaaagcactacaatccgtggggtatgcacaaaatggaagtgtaacaggcattcagactgggtgtctacaaatcaagaacagtatcttcaacagattgattccttggaatcgatgcaagagaggttacagcatctcatacaggcaaggaaaaagcaactcaatatccaatattatgaacaacttctgagaaaaggcttatag

SEQ ID NO: 2581 - DNA, 498 bp, Saccharomyces pastorianus
atgtttcctattttaaccagactagcaaggcctgccgtgatggctgcgagacccgtgaacgccgccgggttgttaagggcgtccagcataacaaaaagactgtaccatcccaaggtcattgaacactacacacacccaagaaacgtggggtcgttagacaagaaattgcccaatgtcggcacaggcttagtgggtgcaccagcgtgcggcgacgtgatgagactgcagatcaaagtgaacgactccacgggtgttattgaggacgtcaagttcaagacatttggttgtggctccgccatcgcgtcctcttcttacatgactgagctcgttcaagggatgaccctggacgacgctgcgaagatcaagaacaccgagattgccaaggaattaagcttgccccctgttaagttgcactgctccatgttggcggaagacgctatcaaggcagccatcaaggactacaaatcgaagagaagcaccccaaccatgttgtcatag

SEQ ID NO: 2582 - DNA, 174 bp, Saccharomyces pastorianus
atggcggagccacaaccaaatgtcttgaacttgacgtcctcaataacacccgtggagtcgttcactttgatctgcagtctcatcacgtcgccgcacgctggtgcacccactaagcctgtgccgacattgggcaatttcttgtctaacgaccccacgtttcttgggtgtgtgtag

SEQ ID NO: 2583 - DNA, 1359 bp, Saccharomyces pastorianus
atgtcagcgaatagcggggtaaagcgagctagtaaggcatttaaaacatgtctattttgtaagcgatcacacgtcgtgtgtgataaacagcggccgtgttctcgatgtatcaagagggacattgcacatttgtgtaaagaagatggtataccgattacaaatgaacgactgtcacagcaaggaaattcacccgaggagaattgtatagcaccggaaacatatccaaatagggcgaataatgggagtatgtttgattgtcaaaacaatcgtaatggatcgacggacaccagtagccccaaatatggggagcctcaatcatctaaactagactctactcttgtaaacgatacaaccagtttattacttccacaacagcctatatttgtatcagagaatgtcggctcggaattcagttctttgaatgaatttctttcgatgctagaaaaccctctgctggcccattcagggttgagctctggtggcacgagtgatattcatttagaaaatggatcacaaagcacccaatctccattagaatatcaaaatgacaaccatagaaatggaaacgaagtggtaagacgaggacagaatgcaccggatataattccagcgtcttctaatgatgtttcaaagacgtatggacataacgagccgaaggaagtatctaatgatcagttcgaggccgatcctaacgagaacagtgctccaacgcctaaggaacagtttttcttaacagccgcagatccatctacagaaatgacgccggaagataggttgaaattggtcataaacgccaaactagaggcaggattgttgaagccttacaattatgccaaggggtacgccaggttacaagattacatggacaaatacatgaatcaatcttccaagcaacggattctgaaacccctgtccaccatcagaccagcgttcaggaccattgcgcgttcgttaaaggatgtggatctagtactcgtggaggaaagttttgaaaggatgctattgtcatatgatcgtgttttcacctcgatgagtatgcccgcttgtctgtgcagacgtacgggggaaatttacagggccaacaaagagtttgcctccttggtcgattgtacggtggacgatctacgcgatgggaagttagcaatctacgagttgatgacagaggaaagtgcagtaaacttttgggaaaaatatgggtccattgcgttcgataagggccagaaggccgtcctgacaagttgtagtctacggaccaaagacgggatccgtaaacgaccatgctgtttcagcttcaccatcagaagggatagatacaacatcccgatttgcattgtagggaattttatccctttatcatag

SEQ ID NO: 2584 - DNA, 894 bp, Saccharomyces pastorianus
atggtattccaaaaagacgctaagtcctctgcttactcctctcgtttccaaactcctttcaggagaagaagagaaggtaagactgattactaccaaagaaagagattggtctgccaacacaaggccaagtacaacactccaaagtacagattagtcgtcagattcaccaacaaggatatcatctgtcaaatcgtctcttccaccattactggtgacattgtcttagctgctgcttactcccatgaattaccaagatacggtattactcatggtttgactaactgggctgctgcttacgctactggtttgttgatcgccagaagagccttgcaaaagttgggtttggacgaaacctacaagggtgtcgaagaagttgaaggtgaatacgaattaaccgaagctgtcgaagatggtccacgtccattcaaggttttcttggatattggtttgcaaagaaccaccaccggtgctagaatctttggtgctctaaagggtgcttctgatggtggtttgtacattcctcactccgagaacagattcccaggttgggatttcgaaaccgaagaaattgacccagaattattgagatcttacatcttcggtggtcacgtttcccaatacatggaagaattggctgacgatgatgaagaaagattctctgaattattcaagggttacttggctgacgacattgatgccgactctttggaagacatctacacttctgctcacgaagctatcagagctgacccagctttcaagccaactgaaaagaaattcaccaaggaacaatacgctgccgaatctaagaagtacagacaaaccaagttgtccagagaagaaagagttgctcgtgttgctgccaagatcgctgctttggctggccaacaataa

SEQ ID NO: 2585 - DNA, 672 bp, Saccharomyces pastorianus
atgaggaaacaaatattaatggttgcagttcaaagtattttatgttctaccgtttttggtgagcgaaccaacgtggggctttccactgaagaactgggtggtgactcagttgtgtactttgatgaggacccggttgtggtagaaataaacacgaagtctataaacaaacaggctttggaacagttggcaacgacgagaaatgttgttcttactgatttgcctgaaacccttgagtttatagacttcaacgagtacgcaaaaatgaaggcgaaatccgacatgctattagagtatatcaacgaatacgaattcgatgattttgaggaaagttcggaaggcggtgtttatgaagaggaagaagaggatttgatttatgattttaatgttcaagcaaaggacacggacaaaattaatgccaatgtttatgaatttgttaaagaaaaagaagtaattaacacttatgataaaaatattacgaactcaaccacggtggagtcatctactactattggtccttttaaaacgtctcactcttactccgcttctattactccgcattcgaatgcttcaatagcgggtgaggactacgataacgggagctccttcttgaccccaacaactgtagctttgacagtattgttgaccattttgttatttatacagacctactaa

SEQ ID NO: 2586 - DNA, 813 bp, Saccharomyces pastorianus
atggctcccaagaagaccagcaccaagaccatgaacaagggtaagaagcccgtgaccagcaagagcaaggacaagccgcttgccaagacagcacctaaaaagagcacgccaaagaaggaagaaccttcgtccaagagctacaaagagctgatcgcggaaggactcgcagctctgaaggagcgcaagggttccagccgccctgccctcaagaagttcatcaaggagaactacccgatcgttgggtccacgagcaattttgacttgtattttaacaacgctattaagaaaggtgtggaaaccggtgactttgagcagcccaagggccccgccggagctttgaaattggcaaagaagaagtctccagaacccaagaaagagaaagaaaccagtccaaagcccaaacaatctgccaccgccactgcctctgccactgccgccgccataacaacgccaaaggcgaagaccccgtctaagaaacaagcgcccaaaaaagtagtaaagaagaagtcgtcgcctaccgccgccagcgccagtgctgccgccaagaaggcggcttccccttcttcattgagctacaaagaaatgatcttaaagagcatgcctcaactcaatgacggcaagggctccagccgtatcgtcctgaagaagtacgttaaggacactttttcgtccaagttgaaaactaactcaaattttgactacctcttcaatagcgctatcaagaaatgtgtggaaaatggtgaactggtgcaaccaaagggcccctccggcatcatcaaactaagcaagaaaaaggctaaaatatccacctaa

SEQ ID NO: 2587 - DNA, 2688 bp, Saccharomyces pastorianus
atgacgcaatctttgggtatcgaacagtacaagctttcggtcgtatccggtggtaaacccgctttgaacgatttcagctcggtgaccggtaacaagaatatcgcacgtttgtcgcacgaccagctgaactatatcattcctttcaacaatcagatcaaggtgtactccgtggaaaccaggcaatgtgtcaagacactgaagttcgccaataaccccgtgctttgcgggatctttttgcaagaacaagaagacaacgagtccatagtaaagattttattggacgacataactgctcctcagcagaagaacgcacatctgattaccgtgtttaccaagagcggctacgtcgtggttctgaactacaaggggaaactagtcgagtctcccaagcatttcaaaatttctttggaaaacgaacagctctctaatgtgttccacagcaaaggcacattcaggatcctaacaacgttcaaagacgtcaaacagaaagcccaaaactccttgcagtcctacaggctgcacgggttaactttcgatgaatccaaaggacagttcgatgtaactttccaggccgaatggagcaacgtcatcttgtcgaatacctcttctaatgggaaattgctggcattaatgaataaagacgtttcaaaaaaggaccacgaacacaaatctatctcagtcgtttcgattttcgatgactctgtaaccttgagtttccccctcagttccgttctttcttcacagactcaatccctgtcttccaacaccagatacgtttctagtatggctatagacaacatgggccaacaactggctattgggtttgcctcaggggttataagtatcgtgaacctggctgacttgcaaataaggttgctcaaatggcatatcgactctgttctttcgctggcattctctcacgacggaagctatcttttgtctggtggttgggaaaaagttatgagtttatggcaactggctacaaactcccaacagtttttgccccgtttgaacggtatcgttatcgattgtcaagtcctgggtcctcaaggtaactactattctttgattttacaaatgactgaaaacaattcaaattcggattaccagtttttgttgttgagcgcttccgatttgtcctctaaattatcgatcaatggtcccttaccagtgttcaacacggctataaaacacattcaacaaccaatctccgctgtcaataccaagaactctaattcaatcacctctatcaaccactccaagaaaaagcagttgagaaaactaatcaaatcaaaaagacaggatttcaccacaaatgtggaaatcaaccccatcaataagaatctctatttcccacacatttccgctattcaaatttttgacttttacaaaaatgagcaaattaactatcaatacctaacatcaggtgtcaataattctatgggtaaagtcaggtttgaattaaacttacaagacccaataataactgatttgaaattcaccaaggatggccaatggatggttacatatgaaattgaatatccacccaatgatcttttgtcatccaaggacttaactcacatcctcaagttctggaccaaaaatgataatgagacaaactggaatttaaaaacaaaagtgataaatccacatgggtcaagtgtccctataaccaatattttaccttctccaaggtcaattaatggaggtcaaggctgtctaacggcagataacaacggtgggttgaaattttggtcatttgacgctcatgagggcaactggtgcttgaagaagatctcattaccaaacttcaaccactacagtaattctgtctcattagcttggtcgcaagatggatctctagtattccatggattcgatgataagttgcagatcctagatttcgacacttttaaaaagtttgagtccttagacaacacaaagacagtcagtgaatttacactggattcagaaatccaaaccattaaattgatcaatgacactaacttaattgtcgctactagaacaacacttaatgctatcaacttactgcaaggtcaaatcataaatagctttgacctgtatccatttgttaacggcgtttataaaaatggacatctagatagattaatcacttgtgatgaaaaatcaggtaacatcgcattagtaataaaccaacaattgactaacctcgaaggtgtaccaaccacaaattataagtctcgtattatcatatttgattccgatttatccacaaaattgggtaattttacacaccacgaatatatatcatggatcggttggaattatgatactgatttcatatttttggacatagaatctgcattaggtgtcgtcggaaccactgttaacactcagttatccgatgaagtgaataatgaaggtattttggatggtctagtgaacaatactaccgcgactttagcttccaacaatgatgtttttgcagagcaattgaatcaattgtcatccagaggtaaaagtgaagctagtgataaagatgctaatggtaatgacgaagacgaagaagacatcactttagaatttataaacggtgaaaagaaagacaaactggtcaatatgaatagcttcacaagcatgtttgacaatattcaaaatgtgcaaatggatacttttttcgatcgtgtaatgaaagttattacataa

SEQ ID NO: 2588 - DNA, 762 bp, Saccharomyces pastorianus
atggattataacaattttggaagtagtgctaataaaagatttcaagatgatacactaaacagagttagaaaagagcatcaagaagctctgaagaagttacgtgaagagaactttaattcaaacacatcaaacttaggaagtaagaaacaatacaaagcacaggaaagaatgagcccacctttacgtagactgtctcctgtgaataacccagaaaataagaaaatgagaagtccattagatgataagctcagaagacaattaagggaaggcaatacacgactacctcctccatcgttctccagttatggagcgccttcaaacaacggttccaatctggataggataagaagaagaaccagctcacccgtgaggagcgagcggttcacagcacaagatgtaatagatgatcaaagattagaaataaaatatctggagcgtattgtacatgatcaaggctcagtcatcgatgacctaacatcaaggataacgagattggaatccgttatgttgaattctgcttcagacagaggacaaagcaattttaatgctgtcgaacattctaactcattttccgggtttcctacaaataagacgtatgacttacaaatgggtggactatatgaaaacgaaatgccttatcgaaggggtagcgacaacatcaaaagagaaagaccgagagttaatcgatcttcaccaatccatattgaaaacgaaagtactgaagatatattaaaaattttatcatcgtccttccatgactga

SEQ ID NO: 2589 - DNA, 1542 bp, Saccharomyces pastorianus
atgagtgactactccttgaaacactcagttacccagtatttggaagaaattccccagcaagtgcaaaatagactatacacttcaccagctacatgtttggccatctatagaattttaccacctttagccaaattttttatcatggcaatggtttttaatgaaaacgaagtccctctattagatctggataaatgggttaactcaaatggtaaattgcagtttcaagatgcaatcaaatcaatgaagtctttgcatcttctcataccaaacaagtcttctggtactttgatgatcaacctaaatccaactttcaaaatcagtctgagaaacgcgttgacaggcggagaggttcagaattcttttggtatcgttgtagaagataatgtggttagtttgaacctattggacgaatattcagccaataaatgggaaactatattacatttcatggttggtactcctctagctaaaattccatccgaaaaagttttgaatcttctgaagcacagtaaacttatggaagaaataaactccaccggtgaattcaaaatcactaatgaaggttttcaatttcttttacaagaaattaactcccagttatggtctttactactacagtatttaaaagtgattgaaacgtccaaaatggatttagtcgacgtgttacatttcattttcatgttaggtgcattagaagtcggtaaggcgtacaaaatcgatgcattaagtgaaacgcagaggattatgttacaagatatgagagattatggactagttttccagaaacattcaaacgataccattttttatccaactaaattagctttaatgctaacttccgatacaaaaacgattagatcggcctccaatgcgatggatagtgtattaagacagaacagggaggaaccctcagtgaatgaggacggcaacaatggtaagcctacaggagatatcaatatacccgatgatttaaacaaagttgattcgaaaagtcaggatatacctgatggttcattaattgtagaaacaaatttcaagatttattcatattccaattctccgttacaaattgccgttttgtctcttttcgttcatttgaaggcaaggtttgttaatatggttttgggccagataacaagggaatctattagaagagcactgaccaacggtatcactgcggaacaaatcattgcatatttagaaacacatgctcatcctcaaatgaggaggttggctgaggaaaagttggagaaaaaactagagctagacgccaactgtaaagagccattacaaatcctacctccaacggtagtagatcaaatcagattatggcaactagagctagatagagttatgacatacgatggctctttgtactccgattttgaaaccaatcaagagtacagtatgctgaataaatatgctcaagatattggtgtgttattatggaaagacgacaaaaagaggaaattcttcatttcaaaggaaggtaattcacaagtactcgatttcgccaaaagaaagttaaaaaagaaacagtag

SEQ ID NO: 2590 - DNA, 1857 bp, Saccharomyces pastorianus
atgagtgatttgtcccagaacgtagctaagctaaacattaacgacaaagaaaacggtaacgatggcggcaaaccttcgtatgtcccaccacatttaagaggcagcggtaaaccggcgtttaggagaaccggtcccccaagggaggatagaggttcaggtggaggattctttagtcgttcgagcaagcaggccggcgataatgacggtttttttggtttttctaaaggaaacaatggaggatcgacttataaccgcggaggcagttcaagtttcaagtcatcaggaaacagatgggtgaacgggaaacacgtacccgggccaaagaacgcaaggttggaggctgaactattcggtgtacacgaagatcccgattaccactcatctggtattaagttcgataattacgacgatatccctgtagaggcatccggtaaagatgttccagaaccgctattagagtttgattctccacctctggatgcattgctactggaaaatattaaacttgctgggttcaataagcctaccccagtgcaaaaatactccgttcccattgttactaataatagggatttgatggcctgcgcccaaactggttcagggaagaccggcggatttttgtttcccgtctttacggagttgtttgagtcgggaccttccccgatgcctgagaaggcacaaagcttttattctaggaagggatacccatctgctctagtcctggcgccaacaagagaattggcaactcaaatttttgaagaggctagaaaattcacttacagatcatgggttaggccatgtgttgtttatggtggtgcaccaatcggtaaccaaatgagagaggtcgaccgtggttgcgatttactggttgctactccaggtcggttgaatgatttattggaacgtggaaaaatttctttggccaatatcaagtacctcgtcttagatgaagccgatagaatgttggatatggggttcgaacctcaaatccgccatatcgttgaagaatgtgatatgccatctgtaggtaacagacaaactttaatgttttctgccacattcccagtggatattcaacatttggcccgtgatttcctagataattacatctttttgtctgtaggaagagttggttccacttcagaaaacatcacacaaagaatattatatgtggatgatatggataaaaaatctgctttactggatttactatctgcagagcatgaaggtttaacgttgatttttgtcgagacaaagagaatggctgatcagttgactgattttttgatcatgcaaaacttcagagccacagctattcacggtgatcgtacacaagttgaacgtgagcgcgcattatctgccttcaaatctaacgtggccaatatattagtcgcaactgccgtagcggcaagaggtttagatattccgaatgtcacccacgtcattaattatgacttgccttctgatattgatgattatgttcatagaattggtagaaccggtcgtgctggcaacaccggtgttgctacttcattctttaatagtaataaccagaatattgtaaaaggcctgattgaaatattgaacgaagcgaaccaagaagtgccagcatttttaaatgatatgtcaaggcagaatccaagaggtggtaaaactagaggtggaggcggcggaggtttcttcaataaccgcaacaacaattcaagagattatcgtaagcatgggggcaatggttcctttggaaatacaaggccaagaaatactggaacatcaaactggggttccagcagtgggggagggtttaggaacgataatgaaaacagtggttttgggagtagcaatgcttcatggtggtaa

SEQ ID NO: 2591 - DNA, 1035 bp, Saccharomyces pastorianus
atgactttggcagagttgctgggacggtcaagaattgctcaagtagcaaacaatcataaaccgttgacatatactggtaaaaagttccatccaacacaccaaatcattgaaactaagccatcaacactttatcgacaagaatgggggttgaaatccgctattccgtcaaaaataaagtctaggtacttagtatataacgatttggacactttagaacgaattaccacattcgaacccagaggcggtacccaatggaacagattaagattccaggaaatgggagtacccatcgtgtccaatataggcagacaaaacccatttttcaaggacccctcacgttctgaagatgattcagatgctaagttgtctctattcaaagaaatgacaggcgaggcagatatctcgcccgcagccatggaaaagcgtttagagaagacaatcagactgatcaaatcgtttcaaaaggaattcaaggaatggttggtggagaaccatccagaagaactgagattaaattccaataagctggaagattatgtagtgaaatttttaaaccgaaaattgaaagcaaagacgagcaacaaatttaactccgagattataggtacaggcggtttgtcatacagtttatcaggaaaattgaaaaactcgccaaatggcgtcattcaaagaactgtagtacctggcagagtcttgaatgttgttaaggaaaacaacgacaataaatggcttgcggccattggtgggttcgttgctgatgtagtctttttccaatctccacccaattccttcaattcaatgggcgacttcataagaatgaagactttcttgttcgagattttggaggcttctatggagaaaaatggttctgtttctatgcatgctagactactagagccacagaatgacaagactagagaattttttaataaaagaccaatctacaaacccctaacccctagaaggtctcgtcgaccatcagtgggcaacattcaagaggccaataatcttttgaatataattaagggaaattga

SEQ ID NO: 2592 - DNA, 867 bp, Saccharomyces pastorianus
atgactgccgacaatagtagcgtgcctaatagtgcagtatctagctacgccaagctagtgcaaaatcaaacacctgaagacattttggaagaatttcctgaaatcattccattacaacaaagacctaatactcgatctagtgaaacttctaatgaaaaaaccgaagaaacatgtttttccgggcatgacgaagaacaaattaaactgatgaacgaaaactgtattgtcttggattgggacgataatgctatcggtgccggtactaaaaaggtgtgccatttgatggaaaatattgaaaagggtctattacatcgcgcattttctgttttcattttcaatgagcaaggtgaattgcttttacaacaaagagccactgagaaaatcacctttcctgatctttggaccaacacatgttgctctcatccactgtgtattgatgatgaattgggccttaaggggaagttagacgacaagataaaaggtgcaatcactgcagcagtaagaaaactagaccatgaattgggtatcccagaagacgaaactaagacaaaaggtaagttccacttcttaaacagaatccattatatggcaccaagtaatgaaccttggggtgaacacgaaattgattatattctattttataagatcaattccaaggaaaatttgactatcaatccaaacgtcaatgaagttagagactttaaatgggtttcaccaaatgatttgaaatccatgttcaatgacccaagttccaaatttacaccttggttcaaaattatttgtgaaaactacttattcaattggtgggaaaaattagatgatctttctgaagtcgagaatgacaagaaaatccatagaatgctatga

SEQ ID NO: 2593 - DNA, 2100 bp, Saccharomyces pastorianus
atgtcttccacacaatcagacccgttggagaggttttataggcagtttcagacctttgttcaaaataaccccaatgtcatatcggccgctcgtgcagccgctcaaatcccagagtctgcgaaggccgttgttgtgttatctccttattctttgcagcatgttttccccagagaatgggtaacaaagtcgtacaaaaaaaccatagtcgaacgaccagagaggctgttagcaagttcaatgggtatatcggctgcaattaccatgtatccgtcccttttcactttgaaatcttctcacttgcggaaaggttcgttgatggcacctcatgtgctcaaggtgcacggcagtcattggccaactgaattgattgagctttgtcaaatggcagacgccaaattgttgaagggcgagatcgaagttccggatacgtggaactcgggtgacatttatttgagttcaaagaccatcaaagctctgcagggtacaattggtgctattgaaaccggtgtagactcgattttcaaaggtccttctccggaacatattagtaacagagcctttgtggctatacgaccacctggccatcattgccattatgctactccatctgggttttgcttattgaacaatgtccatgtagccatagaatatgcgttcgatacctatgatgttacacacgttgtcgtactggatttcgatctgcatcatggtgatggcacccaagacatttgttggaaacgtgctggttttaaaccggaggaggagtcagagaattcatcctacgacgattttggtaaaaagtttgctgagtttcccaaagttggttatttttccatgcatgatataaattcatttccaacagaatcaggattcgcaacaaaagagaacatcaaaaatgcttccacatgtatcatgaactctcatgacttaaacatctggaatgttcatctatctaaatggaccactgaagaagaattcaatatactatacagaacaaaatatagaactctatttgcaaaagcagatgagtttttcaagactgcaaaattagaaatgaatcaacaggagaaaacgttcaaaggtttggtagtaataagtgcaggttttgatgcgtcagaattcgaacaaacttccatgcaaaggcatagcgttaacgtccctactagtttttatacgacattcactaaagatgcattgaaattagctcaaatgcactgccacggtaaagttttatccttaatggagggcggctattctgataaggccatatgttctggtgtttttgcacatctgattggtttacaaaaccaagattgggttaaagaatgggggtcagaacaagttgttaaggagatcgttcgtggatgtaaatcaacctggaaaccttacaagacaaggagagctaaagatgttataaggatatgggccgaagaagttatcaggctaggacgagcaatgataccggaattcgatgacatgatctttaaagacattgtcaaaacagcttcacctgattctttacccactaacattgtagagccagtaatgacgtcaacaattgcccaaagaatcataagatctcatagaagcagcgcttctccagagaaagaaatttatgaaagcaagctcaagaatattgaaaaggaaaaaccagaagaaagagaaagttgtaatgaggtcaaagttggtcaaccttcatcaaataatagagctgctgaaactaaagttccgtttttgcaacaagaattttctagtgaagatgaagatgaagaatatgtttacaatgaagaattgaacaaaacgttcaatcgtacagtggaagatattactattgatgacatttctagacatttggaaacattggaaattgaaaaacacgatgaagaagataccgaccaagaaaaaaaggataaaaactggaaaagctcccatcaacgtcgtttacaaagcaatggaatgtataaaattccctctaataccaaacctcatcgcatgagacaaacccaaaatacaaatacaccaacttacgacgatagtgacatatcaatgatttctcatgtttcaagaaaacatacaacaaggagtggtggtagatggtaa

SEQ ID NO: 2594 - DNA, 3411 bp, Saccharomyces pastorianus
atgtcaaataatttgaccactacgcatggtggcagtactacccttgaattactagcacagtacaatgaccatagatcgcaaaaggacaagagtatagaacacatagaaaaaggaacgtcttcagaaaatgataatagaccctcatatgatgaaatattcacggaaaatatcaaactaaagttacaagtccaagaatacgaatctgaaattgagagtttaaaaaaagtcattgacattttgcaaaaaaatagagaagcgtccttagacgtggtactagaacaggtccagaatgattcaatagactcgcatgtccctgaacagtcttttgtgttacctccgagatctgctgaaaggaaaacgcacaacaagagcctaaatttgtctataccgacattgtctccttcattgcaacaaggtaatagtatcccttctgaaacgattgtaacgcccacaatacctcaaatagatgttacgtcaaattcggaccctaaccggtcgagtacttcaataagtaggaagcatttacaaaatatgatactgagcgaggaaatagaaactaacagtggatattcgtcgcccaaaaccgttagtaggtccgcatcgagtcctacgaaagtaaaatcggagcgatcagctagcccggctgcatcagtaacatacacgacttctagaataaccataaaatcgcccaacaagactccaaaatccccattacaagaacgtttacgttcaccacaaaaccccaacagaatgacagctgtcatcaataaccatttacattcaccactgaaggctgctacgtcaaacaatttagacgagctgactgaatgtcaaggccaacaactctctaaaaacatcatgcagaagaatgagcacgcctattcttctgtaacctcttccgcgtataccaatgcaacaccctcttcattaaccaaaagtccattatcacattcgaaaactaaagagaatagtaacgatacgtcgaatttttctccagcatcaaaagagaaacttaataattttacacaattacttgactcttcatttggcgaagaagatccggttaaaccagaaataaaaggttcagcaattgcaaagccaataatgaatgaaagtctacctccaccaccagcacctccaacgtttttttcacctacctccaacactgatgggaaagacactactccactatcaagccatttggcatcgccagtgatcttaaacagaaaagatgatgttgttaatcccaatggtgcaagcaatttgaggaaccctgccttaacttcctcactttccagcccttccacaaaatcatcagcggcaagtcaaaatacttctctcccctcaaatccccccacagaggctctgtcaaaacaaaaacagtctgtagagactgcgtctatcaattcgaacaatactgccaatacattcaactcaaattctcaaggctccagtaaaactttcagaagaccacacgcgagtagcgttagcacggttaaatctgctgctccaagctttaaatcggaaattccattattcgtgcaaccagaagactttggtaccattcaaattgaagtattgagcacgttgtacaaggaaaacgaagatgatttatcaacgttgtttgctatcatagacaggaaatccggtaaagaaatgttcgaattctcgaaatcgattcataaagtccgagaattagatgtttatatgaagtctcatattcctgatttgccattgccctcgttacctgatagacaatttttccaaactttatcacctgtgaaggtagatacgagaagaaatattttgaatcaatactatacaagcatatttagtatccccgagttcccacaaaatgttggcttgaaaattgctcaatttattagtacagacacagtaatgacacccccgatgatggatgataatagaaaagatggatcacttttattaagaaggccaaaaactctaacaggtaatagttcatggagggttcggtacggtgtcctgcgcgatgacgtcttacaactacttgataaaaaccaagcgatggaaacgattaggctgagacaagcgtctatagaactcatacccaatcttcctgaagacaggtttggtaccaagaacggatttttaatcacagagcataagaaaagcggactatcaacttcaacaaagtactatatttgtactgaaacgcctaaggaacgtgaattgtggctttctgcattcagtgatttcatagatccttcacagtctgtgtcactatcaaattcaaggaatataacttacgcaaacgatacagattctgcatctcatttgagtgcaaattcacatttctccaaatttggaaatacaaccacatcagcaactgagactccatcatatgttacagatttaacacaggagtatagcagtaataataacaataacaataatcacatggtgaatggtgacaatattgatactaatttgccatcacattctaatcctcttgccaatccaactttcagtgcagatgaagagaaagataatagaagagtcaaaatgagaagtttgttcccattcaaaaaattaaccgctccgacaagtgcgatgaaccacttgggtatcacagtctcgaacgattctgattcaccaacatcccctgattttgtcatcagatcgccaagcaaaaagttaatggatatcccaaagacgacaaactctttttcaatgggctattcaaccgctgtagtatttgggtcatcattggaaacatgtttgagattgagttcgcataaatatcagagtgtttatgatttgccaagtgttgtttatcgttgcttagagtacctttataaaaatcgtggaattcaggaagaaggtatatttaggctaagcggatcgagcactgtcatcaaaaccttacaagaaagattcgatagagagcatgatgtcgatttatgccgttacaatgaaatcattgaagctaaggacgatggaacgtctccaagtttatacatcagtgtgaacactgtgagtggactactgaaactttacctgagaaatttgcctcatttattgtttggtgacgagcaatttttgtcttttaagacagtagtagatgaaaaccataatgatcctgttcaagtttcattaggatttaaagacttaattcagtcaggtgtagtaccacacgctaatatgtcattgatgtatgcccttttcgaactattggtaaggatcaatgaaaacagcaagtttaataagatgaatctaagaaatttatgcattgtattctctccaaccttgaatattccaattactatgctccaaccttttattactgattttgcatgtatatttcagggtgaagacccaatcaaagaagaggaaagagagaaagtagatatacacattcctcaggtttga

SEQ ID NO: 2595 - DNA, 1185 bp, Saccharomyces pastorianus
atgataaccctaattgacactgcggacacaacacattctgccaaaccaagaatactagtaccttataagaagttatgggaagtggccagtcatcttcctgaataccaaaaactgtctgaaaaagtggaattctacaagtataaaatgtctacaaatgacgactttattgagtttttgaaaacccacagaataaacgccttttggataactgaggaatttttcagtgtgttggggaacccttccaactacattgaattcttcccatcttctttgaaggccatcctggtaccttgggtcgggtgcgattttattaatagtaaactgttgagatcgaaaggtatcactttatgcaacatcggaccacacgctgctgacaacgtcacggaattagccattttcctgaccataagttgcttcaggatgacttcattttgggaatactgcttcaagtatattgaaaatggtagcgttgaacagtgtaagaaatacatttcgagcggctcgtatgaaaccattacagacaaataccataatcagggaataaaattcccccaaagaactgaccgtgttcaaaatgacggaaaggtagtggatttggcaagaaattacaatgttggtggaaagattgtggattcaccaatgaacaagacaactttgatcctaggctttggctctattggtcaaaccatagggactcatttgcaaagaacctttaatatgaacatcgagtattataaaagatccggacccgtccagaaagatctacttctttacgatgccatgtaccactctgatctcgatgatccagacacttggaaaaatgctgacctgattgttttgtccctaccaggaacaccatccacaaatgatataatcaaccgtaaaactttggcgatgtgtaaagatggtgtcaggatagtcaacgtcggaaggggcacatgcatagatgaagattccctcttagacgctcttgaatctggtaaagtgacaagttgtgggctggacgtcttcaaaaatgaggaaaccggcgtcaagcaggaattactacgtagatgggatgtcacggcactaccacatatcggtagcacggtagccgacatgatcttgaaacaaacgcttattacgttggagaatgtccatgacatatttgtcaacgggggcgagggtaaatacgtgcttaactaa

SEQ ID NO: 2596 - DNA, 1206 bp, Saccharomyces pastorianus
atgagtcagttcggtacagatatcgtttccggttcagaaacaccaccttattcggggggcagctatgaagacgctaaagacgataatgccaacgctcactcaccatacgttggcgcagggaaatccggcgacggtagcggtgtaagtggggccagtgcacatggcggctgctcgagaggcagcagcggtgacgatgatgattatgatgactccggcgctaagacgaaaatggtggataacattaccattttgaaatatttgttggattcgctgtctggtagagacaagtttgctaaaattatcaaatatgccttggacatactgaaactgttcattgaaaagtccaagaaaaacctaactgttctagacccttccgtgttgacctactataccaaaatcctaaagaatttgactataaaggtcgctctaaggcatcccatcacagtgattaaggttatgcttttgtctgttctgaaaaattttgataagaaaattgacttcatcagccaacaattaagcacgtttagatacatcctaagattcggcgggaccccattcaggttggttagcttgttggggaagctcaacaggaccaggaaatgcaacttccaagtcgaccaaatcaagaaaatatggtttaatgaagcctcactcagagagtttttggatttgtactacggaatctttgatgaactagacctcctgtacaagttgaaaatttggtcgaacaaatctttctattcctttgtcagtagacaagagtcgctctcatggcagtacgatatcctgctcagcttgaaggataactggctcaacctgcaaaacttacaaagaaaacaaatggaattggaggtccaactaaaagtacaaaataacgccctactactatcgcccataattatgcacaaggcccgtgacgatgcctcccaatcgccaattagaaagcaactgttgagcgacctaaacgcagacaacaagccagaactgctaatacgcaagcaactgaaggccatcaaggacgaaaaaacccttttgtatctagacatcacaagactctctttcgactgtatggccaatacgtctgacattctgaatttgaaaactccaaaggggacgtacgcagttttgtctctagggtccggcttaactggactggtcaaactttggataaccgcaaagaggaagctttgttcctcaaacgattaa

SEQ ID NO: 2597 - DNA, 1002 bp, Saccharomyces pastorianus
atggaaactggtcctcactacaactattacaagaaccgcgaattgtcaatcatctcagccccattcagtggtggccaaggtaaattcggtgtcgagaagggtcctagatacatgctgaagcatggtttgcagtcacgcctggaagagttgggctggtccactgagttggaggccactcttgacgaggctgaatttgtcaccaaattgaaaaaggaaaaagaatcgtccactggaggctcttccgttttggacggaggagttaaggccaagagagccgacatggtcggtgaagccaccgagatggtttacaagtccgtgtccaaagtggttcaggccggcagattcccagtgaccttgggtggtgaccattccgtcgccatgggtactgtatcagccgtcttggacaagttccctgaagccggcgtgctatggatcgacgcacacgcggatattaacactatagagaccacagactcgggtaacttgcacggttgtcccgtttcattcttaatgggcttgaaccaagatatcccaggctgtcccgagtcattgaaatgggttcccggtaacttgagtccaaagaaaatagcattcatcgggttaagagacatcgatgcaggagaaaagaaaatcttgaaagacctgggcatttccgccttctccatgtaccacgtggacaagtacggtattaacgctgtcgttgagatggccatgaaagctatccacccggaaacaaacggcgaaggccccataatgtgctcttatgacgtcgatggtgtagacccactatacatccctgccacaggtactccagtgagaggtgggttgactttgagagaaggtcttttcgtggtggaaagattggcagaaaccggtaacttggttgctctagacgttgtcgaatgtaacccagatttggccatacacgatatccatgtctcaaacaccatctccgccggctgcgccattgcaagatgtgcattgggtgaaaccttattgtag

SEQ ID NO: 2598 - DNA, 3657 bp, Saccharomyces pastorianus
atgaaatttgggaaaacctttgctaatcatcgaattcctgagtggtcaaaccaatatgtgggctataagtcattgaagaaaatgacaaaggaaataacaagacttcaagaggacatatacaggaattataacaggaataactatgatgaaaacgggccaccaacgaaaatgagagactcggctaatagcgctcagaattatttagattccccaaaagtacagaagtcattgggatcttttttctttgcaatcgatagggatattgaaaaagttgacacattttataatttccgatatgctgaatatagaaagagatttgaaaggttacttttgtctaaccaatttaatgaaataaaactgacttcagaggacaatgtcaatgccgaagatggggtagcacaaaccttactcgcaaaggatacatgtgagattgatcaacttttaaaaggagccggccaagctaatcgcacaccttaccacaaagatgatttgatagagattcagtctattctcgctgacttgacgaagcaattcaggaatttgaaatggtatgcagaactgaataaaagggcttttatcaagattctaaagaaattagacaagaaagttggcaccaatcaacaaaggtcatctttggaaactagaatcttaccattacaatttgctgatgatgccctcataactaaagatctgagtttgctaaaaaaagtttgggaacaagtgacgttaaaaataaacgcatacgaaaagttaactaataattccacacttagtgcaaatgtaagtgaaaatgtggagtttttcaaggtaatttccatttttattgaagacgataatagcaaaggcctcattagagagttgacgaacctatactcggaactgtcttcgatccccacaagaataatgattaatgtattgaataaagctgcattatcaaaatcattggcatgtattgatgctattctaaatgttattccttcgttaaatgattcagaagacattaataaaagaaattttttccaccaccatataattgcattaggtaagttaattggaaggcaagacgtttcggataggaagagggtgtcacagccctctaaatacaccagtaataacggagagattataactgatttaaacactttgcataatattttagccgtatcagtagaatcagatgttacagaggaggaaaagaagtctgccctgacgatttcctatattttaaagaaattaccagttcatttaacaccatgcctttttcaacatgataattataaaagaactcccttgcattatgcttgtcagtacggcttatctgaagttacagcattgattattaagctgatgaaagaatggaacgtatggaaaggttttcctatcgatgatgtttccgcattcggagattctgaatctttgacacctttacatttgagtgtgttgggcgcccatccgagagccacgggagttttattacattcattggatccaaacgtaaagctaaaaagttcaagtttgctacacttagctacagaatggaataattacccccttttacatgtccttttatcctcaaaaaggtttgatataaattaccaagataacgaactgcatgagacgccattgtatcttgcttgcaggttaaatttctttgaagcagctgtttgtttattgtataatggagctgaccctgaaattaaagagaaaatatttggttggacagcagtgttcgttgcagcagctgaagggtttaagaagattattagtcttttagtggctaatcgtgtgaattttgatattgaagacgaaggcggatggacgccgatggaacatgctgtactacgtggtcacctagacgttgctgatatggttcaaatcaaagatgaattagtaacacatcctcaaccgcaattaaacagtggtagcgaagacaaggagacgtcaaatgcgattacttctgaaaaatcagacgacagaaatgaaaacgggaatggaataaataaaggacctttaggaccaatcaagtcgtatggacataggtttttgagcaaaaatgaatctctgatattactaacgttgggaagtaatgatacaagaaacagaggcccttcgattttattagatcaagaggcactagcaaaggtcataggtttggagacagaatgtgcgttatcactggtaatttcgtgtagtgattcgattgataagttctccacgattatagacctaccattagatgataatgtagatgcagtagactttaaagtaccattcaaagccgattattctcatacattatattttgatattgtccccacatatggaacacattcattggagtcaaaaaacaatatcgattgccaaaaggataataataatcacgtgatggggaggggtgtttccatgttgaacaagtcacatagctcagtgggagttaatagaagtgtgttaaatgggaatatgaccacccctatcattgccaaccatacattagaggtactcggaacgttgaaatttgaatatattattataacgccattcgaacatgcaaagcttcctttagaaagaacagaaacttattggaagtccttggtagcgacacgggttatagggcatagaggattgggtaaaaataatcctaacaaatcgttacaaattggggagaatacggtcgagtctttcatcatggcagcttctttaggtgcatcatatgtggaattcgatgttcaactgacgaaggacaacgtaccagtggtatatcatgatttcttagtagctgaaacgggtgttgacattcccatgcatgagttgacactagagcagtttttggatttaaacaatgcgaataaagagcatactcaacgagacgccggtcgttcaactcgccatgttaatggggtagaaatggcattacagaaaaacagaagacgttcagtggatgattctaacgtcaacacattgagaagggcttgggatttacataacgttgacccagaggagagatccaacaatgccaactggtccaacaaccgaatgaggctaaccaagacattcaagaagaacaatttcaaggggaacgccagaggccactcgatagcgtcatcttttgttaccttgaaggaactgttcaagaaaattccagccaacgtcggcttcaacatcgaatgcaaattccccatgcttgacgaagccgaagaagaggaattgggacaaatcgtgatggaaatgaaccactgggtagacaccgtgctgcaggtggtgtttgataacgcgaatggcagggacataatcttttcgtcattccacccagatatctgcgtcatgttgtcattaaagcaaccggtgattccaatattgttcttaaccgagggcggtagtgagaagatggcggatttgagagcgtcatcgttgcaaaacggaataaggtttgccaagaaatggaacttactggggattgtgtctgccgctgcgcccattttaaaggcgccgcggttggtgcaagtggtcaaatcgaatgggttggtatgcgttacctacggtgttgacaacaatgatcccgagaacgcaagtattcaaattgaagctggtgtggacgcggttatcgttgacagcgtgctagcaattaggagggggttgaccaagaaatacgaaaagtaa

SEQ ID NO: 2599 - DNA, 747 bp, Saccharomyces pastorianus
atgataagaagtcacggatggtcaatacttagcaagttttatccagctcggaatttcacaagatgttccaagatagatatgacttttgagggaaacactcaggacatttccgcttctgctgaagaaaggatgtccactgtctttggaggtcgtctgaaaggcgagccaccaagatctacaagcagggtgcttacgggtggaatgaagaaaatagctggtgtccctgtacctgcaaaaccgcaggaacctgataactgttgcatgtcagggtgtgttaattgtgtgtgggagatatatagtgaggatttaagggactggaaacacaggagaaaagaagctgcgcaaaagattcagggaacaaaggagaagtggcctaaagattggaatccacctttaggcttgttaagcataaaaaacgttccaacggaactacagaaaaagaaattggaacttgatgatatgaaagcagatcaacctcctgatttatcggctatcagagatatgttccccaagaggaaagggcctctgcctaagagtgtcttagcagccaagaaaaaaaacaatgctctaagatacaagcacgagcaagaggaacgggacaaccaacaaacagcccagctagaagcagacgaaggttgggaggatattcctgtttacgttaaagcatttgctgaatttgagtcaaagaagagattacaaaaaattcatcaacaggaagaacaaaaaaagaaaaccgctttggtttga

SEQ ID NO: 2600 - DNA, 1977 bp, Saccharomyces pastorianus
atgttggtccgttccaaggtttgtttatatacggtcattaggcaattgactagcttcccagaagctagtgtgattaaaaaaaagtttctgttcgaaagaaatacttcgactgtagatcagttgaaagaagtatccaatggccaaaaggtggttctcaatggatggatagagcaaaaacctaaaagaattggcaagaatttgatatttggacttttaagggactgtaacggcgatacaattcaactggtcgataacaagtcgttactgaaaggatttactttagaggatgtaattcaggccaagggtgtcctttctttaaaaagaaagctatcaaatgaggaagcgaataagtacgaagtacagctggaagacgtagtggtattaaacgcttcgaataagaaacctgctcaactgcaggatttcaaattgtctgctagttatccaccggaactccgctacctacaactgagaagtcccaagtttcagaactttttaaagaagaggtcctctatctcgaaggaagttagaaattctttcaataatttgaactttacggaaatagagaccccaactttattcaaagctaccccagagggcgcaagggagtttctagtaccaacaaggaccaagagatttgatgggaaaccctcgttttatgctctcgaccaaagtcctcaacaatacaagcaacttttgatcgccggcggcatcaataaatattatcaaatggctaggtgttttagagatgaagatttgagagctgataggcaacccgagtttacacaagttgacatggaaatggcattcgctaattctgaagatgttatggaagtcatcgagaaggtcgttcctgatgtgtggtgtaaattctctgacaagggaggattattaactttaaacaacaattgttcattagtgcctgcgaaaaaagacgacaacacagtatctatctttcgcatgtcttatgagcaagcgatgtctgaatacggtatcgataaaccggacttaagggcaccagacttgaaaattgttaacttgagtgagttcaacgcgtttagtcatgtgaacaaaatgttccccgtttttgaagtgatgatcttaagaaatgctttttcgaatatggaggaatacgacaatcattggtcattcctaaccaatgaaaacaattataactatagaattccaattgtgcttccaatcgaaaatgacgaacaagctcaatcaaactggttcgagaactttcttggaattgcgactttcgaaaatcctcatttaataaccaagtttttaaaattacgtaaaggtgacataatctgcggctgtaccagagaaccaaaccattctatctttgagaatcccactcctttgggaaggttgagacagttggtgttgcaaaacgaaaaaggaaaaaacctctattatagcaccgataaagatgttgcttcttggattgttgatttcccattgttttcgccggttaccatcgaagagaagcctgttaaaatggaaaagtttgcttatccggaatacgagaaggataagctatgctctacgcaccatcctttcactatggtaaagctcaatgattatgaaaaattagagaagaccccagagaagtgtttgggtcaacattatgattttgtagtaaatggcgtagaattgggcggtggctctacaagagttcatgatccgagattacaaaactatatttttgagagcgttctcaagattgacaatgcacaggaactatttggtcacctattggatgcttttgatatgggaacaccacctcatgctggtttcgcaattggctttgatagaatgtgcgccatgatctgtggtactgaaagtataagggatgtaattgcttttcccaaaagtatcgcaggagctgatttggtggttaagagtccaagtgtgatacccgaaagcgtcttaaaggcttacaatatcagatatggcaattcggaaaagtga

SEQ ID NO: 2601 - DNA, 1407 bp, Saccharomyces pastorianus
atgaactttgtaacccactatgcacgaatgagacctctgtttcagaggaggttaccactgccttgtgaatcaaggctacataagccgcaaacgtcgtggtcgtcgttcaatagacatatttctcaaaagccacgccccacgcagaaatcctcgagaaatttcgtacgtatactcgtgctgtctgttttggtaccttacaccggatacgccttttatgtttccttagctaccatgaaacaaatcgatctacggaatgaaatatgtcaagaattggaagaaaaggacaccgatgttacctacaagggatccttgatgaaatattctccattgcaagttttgggtcggtttgaaaacccgtttgaagaatacagaatacagaccgtttttgaattcttcgccaatagagtgttcgaactgtttgaaagaaatagaggaggtattccgcccgatgtgcaccaaatgaacaagctaatgcctgctcataagcctacctgggggcctgatttagtgggtattgaccccgcggtagaaatcgcacggcctttggaatgtactgtattggacgaacctcatacgctaaccaccatcgcagaaaagaacgacttgacggcccctgtctataacacatggttgggccaatcttgtaactatgcggtctataatggattgagaatactaacagatcctctgttcagtgactatcttattcacaagacactaggtcccaaaaggatctcgcaaatgccatctcaaattaccgaagtgccaaaaccagatatcatcctcgtctcccataatcatcctgatcatatagactcggaaagtttggaatattggagtggcgaagattctcctttatgggtggtacccaaagggatgaaatcatacatgacaagtaatggctgtgataatgtcctggagttatcatggtgggaaactttgcaaattaagaaaaataacgaaatataccacatatcagctacgccagctatgcattggtctggaagatcactcctagatacaaataaatcgctgtggtgctccttcttattgacccataatggcactcctatacttttccatgctggtgacactggttatgtgaaggacttgtatgtaagaatcaaagagcgttttggcaaaggttgtaaattagcactgcttccatgtgggcagtattgccctgaatggcatcaaaggcctcgacacattaaccctcaagaagttcttaagatcatgaaggatttagaagctcaaaacgtcctgggagtccattggggcacttttgtactaagtggagaatatttcttggaaccaaaggaaaaactagaaatgctggctgagtggagcggtattaaagaccactgttattgtcccgaattgggcaagacagaacgtttcgattag

SEQ ID NO: 2602 - DNA, 1398 bp, Saccharomyces pastorianus
atgtcatttcgcaaacgaggagaagtactgaatgacagaggcagcggtcttagaagcccattaatgagaggccctccgaggaccccatcaattccatcaagagggcccaatagaaccacccctggcagcgtgtccctacctgacactgcggagaggctgatgaagctgaatatcgccgacgagcccaagagggtggacgggttggacagcacccatgtaggtatcaggccttcccctgcgacgtctcaacctactacttctacaggaagtagtgatttggacaatatcctgggccatatggggttgcccttaggaaactcccttttagtagaggagcagactaccaccgagtttcattcaatccttagtaagctgtttgccgcacagggaattattcacaacagaattacagacggttctgctgataaaactagaaacggtgacacccatgtcattgttctatcattgaaccagatgtttgctaaggaattgcctggcatatacaagggatctcgtaaacaggtgaagaaaaacctgatatctgaagaggagtctaaagtcaccgttcaaaatttgaaccaaactcaaagatctacaccttcaagatacaaggatctgaaaattgcctggaagtataaattagcagatgagaagagaatgggctctccagacaaaagtgacacgcaacaaagttccgaatacaaggactataatcatcagttcgaaatcacatctcgtttgatgcctgcccccatagcatctgagttaacattcatcgccccaacccagcctatctccaccatcctgggtcaaatggagcaaatcattaaaaagaacgacaagaaactgataagaattgtcatcccctccttactacacccggcaatgtatccgcctaaaatgtttgcgtcatccgaaataattgggctactacatggtataagaagtctagtcaagaaatatgatgaaagggttgtactatttgcctcgatatccacagatatcattacgcctccattattggtaatactgagaaacatgtttgattctgttattgacttggagcccttcaatcaagaaatgtcgcaatttttagaacgtgtctacaagtcccaaccggggaagattcagcatggtcttgtccacattttgaaattgcccgtcttcacagatcgcggtgaaatgagggttctcaggtcggaatgggcatttagaaacggtagaaagaggttcgagatcgaagaatggggtatacctgtggacgacgctgaaggttcttcaaatccagaccaaccacagccccagtcacactcgcattcccatcctcattcagatagcccaaatgaagtctcacacaataagccggctaagaaaaccagaatctcgttggagtattga

SEQ ID NO: 2603 - DNA, 546 bp, Saccharomyces pastorianus
atgctaaaaagaagttcccggatgcttactgctgtgagcagaaacaaattatcatctaggtttgccgttacctactaccacaagactcccttaagccaacaacagagagctactacaacaccgcaaaataaaattaagagcttggaagatttggttaatttgaattctctggatggcgttgatcctgaactaatacgtagtctaattaatgagcgtacaacagaattgaatattaagaacgagttagatatgctcaagaaattttgtaaagaggagaaaacagtccacgaaagcccaatgaagaaattcgtcaggcctctttggatgttcatattgatgagctcctctgtatacttattacttcatctcacgtggtggaaactagaacgtgacgagaaagaaagtgaattaaaacaagaagtagaagccttggagtcccaactgaataaattaatcaaccaagataagaatcacaacagtagcaaagacgacgaaaatacggaattatccgatgccaagccttggtttaaaaaatggttttggtaa

SEQ ID NO: 2604 - DNA, 342 bp, Saccharomyces pastorianus
atgccacctatgccacaaagttatgcacaacagcaaccttcaaattgggacaagttcaaaatggggttgatgatgggtaccaccgtcggcgtttgtactgggattctatttggtggatttgccatcgctactcaaggtgcaggcccagatggtgttgttagaacgctaggtaaatacatcgctggctcagccggtacttttgggttatttatgtccatcgggtctattattagaagtgatggtgacttaagctcagcgcccaatcctaacttgaatctacagcaacaggcaagacttgaaatgtggaaaatacgtgccagattcggtatgcataaagattga

SEQ ID NO: 2605 - DNA, 207 bp, Saccharomyces pastorianus
atgaggccacgtaacctaggggttttggttttgggccttacttactccgtgcttctcaccagtttttctatattttattggttgcgcaataatgaatcgttactacactattggtgtgtattgtcgctatgccctgcaacgctctggctatgggcacttatatcctggtgcgatagtgaaatgtttgcaagcagtaaagacgaataa

SEQ ID NO: 2606 - DNA, 1944 bp, Saccharomyces pastorianus
atgcaactatcatggaaggatatccctactgtcgctccggcaaatgatttgctagacattgtcttgaacagaactcaaagaaagacgcctactgtgatcagacctggtttcaagatcacaagaattagggcattttacatgcgtaaggttaaatacacaggtgaaggttttgtggagaagtttgaagatattttgaaaggtttccccaacattaacgatgtccatcctttccatagggatttgatggataccttatacgaaaagaatcattacaagatctctttggctgctatttcgcgtgccaagtctcttgtggagcaagtcgctagagattacgttagattgctgaagttcggtcaatctttgtttcaatgtaagcaattgaagagagccgctttgggtagaatggccaccatcgtcaagaaactaaaggacccattggcttacttggagcaagtcagacaacatatcggtagattaccttccatcgacccaaacaccagaaccttgttgatctgtggttatccaaatgttggtaagtcctcatttttgagatgcatcaccaagtcggatgttgatgttcaaccatacgctttcacaaccaagagtttgtacgtcggtcatttcgactataaatacttgagatttcaagctatcgacacccccggtatcttggatagacctaccgaagaaatgaacaatattgaaatgcaatcgatctatgccattgctcatttgcgttcttgtgtcttatacttcatggatctttcagaacagtgtggcttcactatcgaagcacaagtcaagctattccactccatcaagcctctattcgctaacaagtccgtcatggtcgttatcaacaaaactgatatcatcagaccagaagatttggacgaagaacgtgcacaattattggaaaccgttaaggaggttccaggtgttgaaatcatgacttcttcatgtcaactagatgagaacgttatggaagttagaaacaaagcttgtgagaaattattggcttctagaatcgaaaacaaattgaaatctcaatcaagaatcaacaatgtcttgaataagattcacgttgctcaacctcaagcaagagatgatgtcaagagagcaccatttatcccagactctgttaagaacctgaagaaatatgaccctgaagatccaaatagaagaaagttggccagagatattgaagccgaaaacggtggtgctggtgtcttcaatgttaatttgaaggacaaatatctattggatgacgacgaatggaagaacgatatcatgcccgaaatcttggacggtaagaacgtttacgatttcttggatcctgaaatcgctgccaaattgcaagctttggaagaagaagaagaaaaactggaaaacgaagggttctacaactcggacgatgaagaagaaatctacgacggtttcgaagcatctgaagtggatgatatcaaggacaaagcttcatggatcagaaatagacaaaagacgatgattgccgaagcaagaaatagaaaatcattaaagaacaaggccattatgccacgttccaaactaaccaaatccttcgggaagatggaagaacacatgtccactttgggacatgacatgtcaaccttacaagataaacaaaagagtgctgctcgtaagaaccgttatgtcgaaagaggttccgatgttgtctttggtgaacaagatgctttgacagcttccaccgacaatggtatcaagttgagacaaaccgatagattgctggacggtgttgctgatggttccatgagatccaaggccgacagaatcgttaagatggagagaagagatagaaacagacacgccaaacaaggtgaatctgatagacacaatcctgtttccttatcgaagcatctgttcagtggtaagcgtggtgtcggtaagactgatttccgttga

SEQ ID NO: 2607 - DNA, 1452 bp, Saccharomyces pastorianus
atgctttctacagccaagcaatctttcaaaactttacagataagaactatgtctacgaatattaaacactacgattacttagtcattgggggtggttcaggaggtgttgcatccgcaagaagagctgcatcctacggtgcaaagactttgttaatcgaatctaaagcccttggtggtacttgtgtcaatgtcggttgtgttcctaaaaaggttatgtggtacgcttctgacctggcgaatagagtttctcacgcaaaggaatatgggttgtaccagaacattccattagataaagagcatttgactttcaattggccagagtttaagcaaaagagagatgcgtatgtccacagattgaatggtatatacgcaaaaaatctagacaaagaaaaggttgatgttgtatttggttgggccagattcgacaaagatggtaaagtcgaggtgcagaaaagggacaacactactgaagtttattccgctgatcatatcttagtcgccacaggtggtaaggctgttttcccagaaaacatcccgggttttgaactaggtaccgattctgatgggttcttcagattggaacaacaacctaagaaagttgttgtcgtcggtgccggttatattggtattgaactagcaggtgtgttccatgggttaggatccgaaacacatttggttattagaggtgaaactgtcttgagaaaatttgacgaatctattcagaacacaattactgaccattatgtaaatgaaggtatcaatgttcacaaattatcccaagttgtcaaggtggaaaagaatgaagaaaccaacaaactgaagatttatttgaacgactcaaagttcatcgaaaacgttgatgaattgatttggactattggacgtaaatcccatctgggtatgggatccgacaatgtaggtatcaagctgaattctcatgaccaaatcattgctgatgaataccaaaacaccaacattcctaacatttattctttaggtgatgttgtcggcaaggttgaattgacgccagttgctatcgcagcaggcagaacgctatctaatagattgttcgggccaaaaaaatttcataatgctaaattagattacgaaaacgtccctagcgtaatcttctcccatccggaagcaggttccattggtatttctgaaaatgaggccattgaaaagtacggtaaggaaaacataaaagtttacaattccaaattcactgctatgtactatgccatgttagaagaaaaatcaccaacaagatataagattgtctgtgctggaccagatgaaaaggtggtcggtttgcatattgttggtgattcctccgcagaaattttgcaaggatttggtgttgccataaagatgggtgctactaaagctgacttcgacaattgcattgccattcatccaaccagcgctgaagaattggttactatgagataa

SEQ ID NO: 2608 - DNA, 1968 bp, Saccharomyces pastorianus
atgggtagacgtaaaattgagatccaaaggatttctgatgatagaaacagggctgtcaccttcataaagcgtaaagccgggcttttcaaaaaagcccatgaactctccgttctttgccaagtagatatagccgttatcatactgggctccaacaatactttctatgaattttcctccgtggatacggatgatctgattgatcattatcagaatgacaaaaaccttcttcatgaagtaaagaatccctccgattatggagacttccagaaaaactcatccgtgaacataaaccaagagctcctgagatcgtcgattgctaataagccttctaaatcaaatatcactccgatgaagcaggtgtacaatgatgacgatgaagaggatgaagaggaagaagaggcacatattaatcttcagatggaacagcgcgcgaatacaagatcttccagtagacaagtatcgaatacacaattgaaactactgtcgcccaccgcgcttatttcgaaaatggacggcaatgacaatagtaaacgacatcctgaaaatgcattgccgcccttgcaacgcttaaagagattgaaaccggatcctctacaggctagtaatagatctccacaacagcaacaacaacaacaacaacaacaaaatatatcgagaccataccacaacaacatgtacaatctcaaccaaccttcatccagttcatcctctccttccacgatggatttccccaagttgccgagtttccagaactcttcgtctaacacccgccgcccaccactctccatctcaccaaataagtatagtaaaccctttacagcctcaaacaccagaactcctaaacaggatcacaagcttgacaatagtaataacgataatagcggttattcacagccctctcccaactccttagaagactcaattcaacacactgttaaagctagaaggaaaatgtccgtgagaccagtgcttcgtgtaagaatcccgaataacaacttcagctgtaattctgccattacaagcgaaccttcttccgcatcatccacatcgggaaacgggaacagtttagggtcttcgcaaattttaaaaggaaacaagacaaaccgatctggtaaggcttcaccactttcggcgtccgcctccggacccttgactcttcaaaaggctagcaatggcagagtcgtaataaaattgcccaacgcaaacatgtctttgattaataatactactaataataacagtaatcaccatcatccatattcattcggaaatggctcttcaccactcttctctgcaactcaaccatatatcgcgacccctttgcaaccatccaatattcctggtggaccttttcaacaaaacacgtcctctttcttggctcaaagacaagcccaacaatatcaacaactccctttcaaaaaacagaaccaacctgccccgctaactacaacgttggcgggacgtcctccaaccttttcgggacctgaaaacggcaatggccccccaactggttcattaccatcgaagttcgtacacgatttgatgagcaattctccaaacgtttcatcaatgccaatgttttcagactgggcaatggggcccaatagcgccaggcccataaattctgtacccggtaatacgaatagcgctggttcattccctcctatacctacaagcatggcccccaaccccaacaataacagcaataacagcaacaaccccaaccccaacaattactacaacaacaccgaagaggcccctgtaaatggacctgctgcgcctgatcattctagtgacggagacataagtaatcatcccaactcaaacacatatgatgttgctgcctcctcatacaatggaaataccgggctaactccatatatcaatgctactcaaacaccattaggtacgaaatttttcaacttttcaaccgacatttcgggagagaaaaattcgagcaagatttga

SEQ ID NO: 2609 - DNA, 954 bp, Saccharomyces pastorianus
atgttgttcagttggccttatccagaagccccaattgaaggttactggggcaaacctacctctttgatcgattggtgcgaggaaaactatgttgtgtctccctatattgcagaatggtcgaatactttcacgaacagtatatttttaatgaccgccttttattctacatacagtgcttggcgtaataaactggaaacgaggttcgtattgatagggctcgggttctcgctggttggtattggttcatggttgttccacatgactttacagtaccgttaccaattattagatgaattaccaatgctgtatgcaaccatcatcccatcgtggagcattttcgcagaaactcaagaactattgatcaaagatgaaaaaaagagaaaggaaagctcatttagaatccagatggtcatttctttcattatgtgtggtatagtcaccgttttgacttggctgtacgttgtcgttcaaaaacctgcgattttccaagttctttatggtatcttgaccgttttggtggtgattctttctggtttattgactttcaaccacgtccatgacccggtcgcaaaaaagaaccttttcatcactatggttatgggtatggtgccgtttgtcattgggttcattttctggcaattagatattcacttgtgttctttttggatttacgtaagaagaacgtatttggccttgccactgggtgtctttttggaactacatgcctggtggcatcttttgaccggtacaggtgtctacatctttgtcgtatatttgcaatatctaagaatattgactcatggaaatgcagacgagtttgtattcatttggagatggagatttttccctgagttggtaagaaagggtttgccaatcggcacctcttactcgaccgagtatatgggaccaattgtcaatgcacaatcagaaaacggaacaaaaaaaaataactaa

SEQ ID NO: 2610 - DNA, 1674 bp, Saccharomyces pastorianus
atggctcgtcatggtaaaggtccaaaaactaacaaaaaaaagctggctcctgaaaaggaaagatttatacaatgttgtgctgatatcacattagagttaacagactctttaacctcgggaacaaccagagagattaacttgaacgggttgattactaaatattcgaaaaagtacaaactgaagcaacaaccgaggctaaccgatattatcaactctatcccagatcaatacaagaaatatttactgcctaaattgaaggctaagccagttagaacagcatcaggtatcgctgttgtggctgttatgtgtaagccacatcgttgtcctcatatagcatacacaggtaatatctgtgtttactgtcctggtggtccagactcagattttgagtactctacacaatcttatacaggctatgaaccaacttcgatgcgtgccatcagggctcgttacgacccttacgaacaagcacgtggtagagtggaacagctaaaacagctggggcattctatcgataaggtcgaatacgttctcatgggtgggacattcatgtctctgccaaaagagtaccgtgaagattttatcgttaaattgcataatgcactctctggattcaatggtaatgatatcgatgaagctatcctatattcgcaacaaagtttgacaaagtgtgtgggtataaccattgaaaccagacctgattactgtactcaaacacatctggacgatatgttaaaatatggctgtactagactggagattggtgttcagtcattatacgaagatgttgctcgtgacactaatagagggcataccgttaaatccgtttgtgaaactttcgctgtttctaaagatgctggttacaaagttgtttctcacatgatgccagatctgccaaacgttgggatggaaagagatattgagcaatttaaggagtattttgagaatccagatttcaggaccgatgggttgaagatttatccaactttggttattagaggtacaggtttatacgaactttggaaaacaggtaggtacaagtcatacagcgccaacgctttggtagatttggttgctagaattctggcattagtgcccccatggacaagaatctatcgtgttcaaagagatatcccaatgcccttagtcacctctggtgttgataatggtaacttgagggaattagcgttggctagaatgaaagatttgggtaccacctgtagagacgttcgtactagagaagttggtatccaagaagtgcatcataaagttcagccagaccaagtagagctaatcagaagagactactacgcgaatggtggttgggaaacattcttatcatacgaagacccaaagaaggatatattgattggtttgctaagattaagaaaggcttcaaagaaatatacgtatagaaaggaatttacctcgcaaagaacttctatcgttagagaattgcatgtttatggttctgtggttccactacattcaagggatccgcgtaagttccagcatcaaggttttggaactttattgatggaggaagctgaaagaattgccaaagaagagcatggctcagagaagatttctgttatttctggtgttggtgttagaaattactacggtaagctaggttatgaattagacggtccgtatatgtctaagaagatttaa

SEQ ID NO: 2611 - DNA, 2535 bp, Saccharomyces pastorianus
atgaaaccttacttagttgaattaaagctaaaagacactgagaagctggactggaaaaacggtctatcctcatatctcaaaaaatcgtacggctcttcacaatggaaaacattctatgatgagaaggctacatccgatctcgaccacttaaggaataatgcgaatggagagctagcacctgattcattatctgaacaaaatttaaaatactactcttttttggaacagctttaccttcgtctgggtagtaaaggatcgaggttaaaattagattttacctggtatgatgcagaatactcgtcagcacaaaaggggctcaaatactcccaacatactttagcgtttgaaaaatcctgtactttgttcaacattgctgtaatatttacgcaaatagctagggaaaaaatcaatgatgattacaaaatctcgattgcaaatttgacgaaagcttattcctgttttgagttcttatcagagaactttttgaactcaccgtccgttgatctgcagtctgaaaacacgaggtttttggccaatctttgtcacgcagaagctcaagagctattccttctaaaactattgaatggtcaactatcacccaagcaatacacgttaatcagcaaacttgccaggaccacctgtaacctctatcaaaaatgtcacgattttactaaggacacaggaagcgaattgctcacatatggtgaacccaaatggaagaccattgttacttgtaaactacacttctacgaatcgctgagcgcatattaccatggtttgcacttagaagatgaaaactgtattggtgaagcaattgctttcctcaatatctctgtgcaagaactgatttcgtctcttccttttaaaacatggctgttggaattcttcgatttcgatggatttaaagagactttagaaaagaagctaaaggaactgatcaaggataacgattatatttaccatgaaagtgttccaccagtcgtacaaattgattctataaaatcactcgatgcgatcaaacctctatcatgggagaaagtattagagccatatatggaagaagttggggataagtgtgatgcgttgtacaaaggtattattcctttggatgtttacgagaaggaaagtatttactccgaagaaaaggccacactactaagaaaggaggttgaagaaactgaaacagcaaatttggagtactcttcctttattgaattcaccaacttgcctaggctcttgagcgatttacagaaacaattcaacgctggaaacattgtgtcaaatacggatactcaagtacaactaatgagagaccaaattcaggcatggtgcaaatttgttcagacaaacgaatttaggaatatagaagaacaaatgaacaagactgtcttgaagagaaagcaaatcttagatattctaccggctttacctactgaccagaaggaaaatgttacaaaattgaaatcttctctaatagcggcctcaaattcagatgaaaaattatttgcttgcgtgaagcctcatattgcggaattaaatttattgaatgacagcggaaaggtatggagaaagtttgaagagttcaataacaatagtcctgcacaacctagcctgttagatatcgatgataccaaaaatgataagattttggacttattgaaacaggtaaagggttatgcagaagacttgaggacattaaaggaggaacgttccagaaatttgtctgaacttagggacgaaattaacaatgatgatataacaaaactattgatacttaacaagggaaaatccgacgttgagctcaaaaaagtatttgaaacggaactggagaagtttgagcctttgagtacgagaatagaagcaacaatttataaacagtcttgtataatcgatgaaatcaaagctaagctagacgaaattttccatatctcaaactttaaggacaagtcctctaaagaagaagagttttcaaacgatcgtaaggttttctttgatagtttacaagacgcagttaaagcttttggtgtttttgcgtctgatttgccaaaaggagtggagttttatgattcgctactcaatatgagtagagacttggttgaaagagtaagaacagccaaacagcatgagacccttacgacaaactctcctgcacctcctctccctccgcttgacttcagggcacctgttgtaggagatcgtccattattgccccaaaatagcgcagcgtctcaatctcaacctcaacaaggcttcaatttagaagcacgttttcgaaatctcaaagtaagttccagcaatgacttactccaaggacctaatattccaccaagaacctatgaatcttcaccatatgcagcaattcctaacacgacaggtccaccaataccaccaaaacaatcgcaagaagatctctacgacgtaaggaggcgtagagcggttgaaaatgaagaacgtgagttgcaagaaaatccaacatctttttacaacaggccttctgtttttgacgaaaatatgtactctaaatacagcaactaa

SEQ ID NO: 2612 - DNA, 735 bp, Saccharomyces pastorianus
atgatcatgagtatgagtgtccgtggcctagcgttaaggtctgcttctaaatcactgttgaatcaaggcattcgccgttctccggtcgtggtcggagctcgttgtatgtcttccactccagagaaacagactgatccaaagacaaaggccaattctatcattaatgctattccaggtaacaatatcttaacgaaaactggggttttagggacttcggctgctgccgtcatttatgccatctccaatgaattgtatgttgtcaatgatgaaagtattcttttgctaactttcttgggtttcactggtttggttgcaaagtatctggccccagcatacaaggatttcgcagattcaagaatgaaaaaggtttccgaaatcttaaacgcttcaagaaacaagcatgttgaagccgttaaagacagaattggatctgtctctgaattacaaaatgttgctgaaacaacaaaagtgttgtttgatgtttccaaagaaactgtcgaactcgaaagtgaagctttcgaattgagacaaaaagtagagttggctcacgaagcaaaatccgtcttggattcatgggttagatacgaatcttccttacgccaattggaacaaagacagttgacagcttctgtcattgctaaagtcgagtccgaactaggaaatccaaaattccaagataaagttttgcaacaatccatcactgaaattgaacaactactttccaagttaaagtaa

SEQ ID NO: 2613 - DNA, 1872 bp, Saccharomyces pastorianus
atggctaggcagttattcacacctccaataacaaacccgaggtttgatccaaaccaatcgattagggaatcatacaagaacacaacaagtagcatgcaatttcaaccaatattgcacgaggatcaaagtggcgacgaaaaaagtagttgtgatatcgatgagaaatctgcatgtagtgaaacgccggatggtaccaaatcccctacattgaccaagcaagaaattgacgatgcattaaatggtgttagtaatttaccaccagagttgtcaagattaatcgatatttttattgatgacttaaagcagcccaaatacgtacggccattatcagtattgcagttgtcaagtcttttccaaagcttttacataaaatttgataaagcgtcatttcagcatgtcagttcaatgaccaataatggtaactatagtactaacgggagccctagttcatttttagctgctaaagaaacattgagcagtggacttagcggaatttttgcaaggagtaggagtagcagtggaaattcaatcatgagaccaaggaggtcttcatcactgttcagtaatgaatcaacttcaaactctaataatgtcactcaaatgttatcaccagaggagatcaaaaggcaattgagaatcaatgaattgaacaatatgaggattgaaaagtacatggagttttgtgaaagagacgtctttaagaaaattcttatagtaggtacatctgtatcctcaccaaataaattaaaaaatttcaaaacacaccaactacaaactttcaaagttggaaatctgtttagaaacagtactgaatttacagaatataataaactgttgaacgataaaatactctgtctatcaaaactctctataatgaataaaatcaatttgataaagtttttgagtcttaataaaggtatcgatccagaacccaaatttgaagagatcaaagaaatcttattcgaatttacataccattcgatttcgccatgtgaaaagatcaaggcattactgaaattgcatgagatcatgacatattctcaagaaatgtccaatgacgactatttatcgttattaatttactacatcatcactattgttccgcgtgatattttcttaaacgcagaattcatcaggttgtttagatataagaaaaaacttgtcgaaacggaatcatttgcattaacgaacttggaagctgcattagtattcgttgaaggcttaactaaaaatgatttttcaaatgaaatgcaagataagttaacagaaagcgaaggtaagatcttagaatgttcaataagtagtaaagtcgcattgccatcaaataacggcgtgatgcataaaaccaacggcaacggcagtggtaacatgggagaaattgtaacccctactattcaaagaccggatgtcactagatcaaattcatatgatgggttcagaactgtctttgactcatcattgaagaatattattggtaaaattagatcgtatacgccaccacaccccaacgccgttggcggcaatactgttcataacagtaacagcaatagcaacaacaacaacaacaacaacaacaatttgaacataccaagaagttcgtcccagttgtccatagaattaatcaatagagatacattagaaatttccagagacgtgtcaacgtcatcgtcatcgcaatcttcggcgtctttagaacgtgggaatcgtgaatttacaggtgatctgacagtaggtgctaatgctagtgttaacagtattgagaaaaaggaactccaaaagtcatggaagaaatacaaaggctacaaatttgaggatttaactatatgcgaactaaaagatttatttgaaatataccaaaagatggtgcaataa

SEQ ID NO: 2614 - DNA, 1008 bp, Saccharomyces pastorianus
atggaggtccagatagacgaactgatcaataatgatccagtttggtccagtcaaaacgaaactttgatttcgaaaccctataaccatattctgttgaaaccaggcaaaaacttcagactgaacctaatcttacagataaatagaattctgaacctgcctgaagaccaactggccatcatctcacaactaattgagttcctgcataactccagtcttttgatcgacgatatagaagataatgctcccttaagaagaggccaaaccacttcccatttgatctttggcatcccatccaccataaataccgcaaattacatgtatttcaaagccatgcaactcgtatcccaactaaccgcagagccgctactctaccataaactaatgaccatcttcaatgaagaactgattaatctgcatagaggccaaggtttggatatatactggagagatttcctgcctgagatcatacccacccaagaaatgtatttgaacatggtcatgaataaaacgggtggtcttttcagattgactttgaggctcatggaaaccctgtctccttcctcgcaccacggccattcgctggttccgttcataaatcttttaggtatgatttatcagattagagacgattatttaaacttgaaagacttcaagatgtccaatgaaaaaggcttcgccgaagacattactgaggggaagctatctttccccatcatccatgctctaaatttcaccaagaacgaacgtcagactgagcaacacgatgaaatcataagaattcttttattgaggacaaatgacacagatctaaaactaaaactgattgaaattctagaattccagactaattctttgaaccatacaaaagattttatcaatcggttagtgaacatgataaagaatgatgacgaaaataagtacttgcccgatttgacccagcattctgatacttctaccaatttacatgacgagctattatatataatagatcatttatccgaactgtga

SEQ ID NO: 2615 - DNA, 885 bp, Saccharomyces pastorianus
atgcaaatgcagctcaggaaaaggaaaagggtcgattatacgggcaaaaattcagcgtccgatccgtccgttactacaatcatacccactatagtcgtccctaagaaacgcaaactgaataagccggggatgattgcgccagtcattcaaagccccaccgcgacactgagcagctcgaatatcataataccgagacctttgcagcgccccagcttccgcaatagcgccgaatcacccacacacgatgatggccttgaagtaattcctgtgttggaaattcagaagagtctttcaagtttgattaaaagacaggaaagcttgttttataaggatttgaaaaggccgactttggtgggtttgaaaaatttcgaaatgctgaggctacctaacgacttgcaacttttacaaaacatcgtaaacctgctgcagtcgttcgaccaactaaagagcagcaacccgaagccaaggccggccggtgttactggttcgaaggcattctctcaagcgcactcgaataacctgaaaaaattaatcgtcgagaaaaaacatctctttagccaccccaatcgcagcagtaccacccaccaaaatgacgttctcattcacgaaatagcgaacctgcattccataaacctcatagacctgctgaacctggaaatgtacaacagcaccagccacgcgaataacaccggatcgcaaactacagcgaattccatgacggttaacagtattgtgaaaaaactcgacaagccaatcttaaaggagagaaacaacggtttgatgtggcctcacaaaagtagattcaaagcgaaaaaaaaccaatcttcgcaaaacgactcatcattgatcaataatactaacatcactttatacaacgatatatag

SEQ ID NO: 2616 - DNA, 597 bp, Saccharomyces pastorianus
atgcagcacgatattgtcggcaacgaccaggtggaggcctgcgagttgaagtgggacgagatcaagggcatcatcgagtccggagaactcgcccgcctgaaacgaagtagagagacgaccgagaagtaccacgaacacaagaggttgaccagcggcttggacatgaaccagtacatgttgcagcaattaggatggtcatcagacaagccgcagtcccaggacgccgttgagagggccttcagtgagcgggcgctgtatgttctacgcgccaacgacttcccgtacagcttcgagccgggcgtcgtgcaccttgttctgtggtccaagatcgccctgcccgtccattccccagacaaggccgtgcgcgatgcggcccaggcacgccttaccgcgttccttcaggcacaaccgctgctgcggtcgcttgtgagcgtgggtcacgtggcctggtttgtcaattacccggctctgcagagcgttgcccggatcttccacgcgcacgtgctactgttcttcccacggaactgctgctccgcggaacaggagcgcatcactgtcgacgagatcctgtcgcacggcttcgagtcgctggcctaa

SEQ ID NO: 2617 - DNA, 1449 bp, Saccharomyces pastorianus
atgacataccctgtcatttcactaaaaccaagctataattctgtaatacgtggttgccctggtttgcccgatacgctgccccgaatcgaatgccaattaagagtgcgatccaatgactcgttgcctttccatctggtaaatattgaaattatcctaaaaaccgttgaactctacttcaacaagaacctgtacggtagtaccaacaactctctcgctcccttcaatcattcttcagactcccctaacggcaattcggatacgaacaacaagaacactaccgttcattacaagaaaaacattgtgctttcccaccctacccatgatatcaccggcagtaacagcaacgatcttatcggcatagatataccgttgacaataggtctacccgacgatatcaaagagacaaactataacccgaaatttggtaagacgcagactttcctagactgtacagtctcctacgcaaatgccaccggggcaacctcgaacaagaagcggaacttcctctacccgataaacgtcgaaagatacacttatctcccttcaccgtcatacttcagaccgatcaacagaccaaatatcacttccccggaccaaaaatttctgatcaactactccattgaaaatccgtgcgtttccatggacaatgatacgttgaagctctccatatcgattaggctaaatccattcccaaatagtgccaccagttcttccccgaatgatttcgatatgtctacgccgacgcttttctccacaaagaagaagttcaagtccaaactcaaactgaaatcgattactacgcaggttcaagagtacttggaaattttgaaaaaccaatccgaattctcatccacccaaacttcaaacgttttgcaaacttccataagaacagttgaccaaacaatttccatgaattcgatgcatttccagttcaacataaaattgctcacaaaggacaaacttctacaaggtttcgaatctcctgactcaagttgtcctgaaacaaaactattaataaataaaatcgatgatatacctttacaataccataattcaataagcacaataggccagcatttcaatgtttctcactctctgtcaataaaattgaaatttaataaaagtttaaaaaactttgaaattaaccatcccataatcatatcattttggtcgataaatcaactaccactgattgaaaacttaatatcgcaggaaaggcaaaccgccaaatttgccaagaaattttataaaacctttggacagattaagaaaaagaacgtaagcaacagcaacactagtgcgaactgtttagaatacccctctttaccgccaataatttactatttcaacgacgccgaaacaaataataatttcaatatactgtatttacaaaaggacattagccgcatagacccctctaaactaaaaagagtccccgtcatacaataa

SEQ ID NO: 2618 - DNA, 729 bp, Saccharomyces pastorianus
atgtcaagaccagatataccgctaaatcagaatcccgatgttttccagttacttcgtgacgaggtacccctgtttgacaactctataacgtctaaagacaaagaaatcatcgaaacactatcagaaatatattctattataataactttagatcatgtagaaaaagcgtatttgaaggactctataaacgatactcaatacacaaatacggtcgataagctattaaagcagttcaagatctacttaaattcgcagaataaagacgaaatcaacaaacatttccgatccatcgaatcgttctcagacaaatacaacattacagcttcaaacgcaataacgagactggaaagaggtataccgataacagcagaacatgccatctctaccaccatcactgctgcgtctggcggtaatgagcaggcttcttctagcgataaaaaatttaatgctaaatacgtcgctgaagccaccggtaacttcatcaccgtaatggatgccttgaaactcaactataatgccaaggatcaattgcaccccttattagcagaactattaatcagcataaaccgtgtcaccagggatgattttgaaaacagatcgaaactgatcgattggattgtcaaaataaataagttatcaattggcgataccctgaacgaaactcagataagagaattattgtttgatttagatctagcttataaaagtttttatgctttattagattaa

SEQ ID NO: 2619 - DNA, 912 bp, Saccharomyces pastorianus
atgtccgctaacatcgaaccgcagacaacagctaaatgcatactgtacactacaaagggaaacattgccgttgaattgtgggctaaagaatgcccccagactagtaggcgatttttaacaaagctgtcagatggtacctacgtcaatgggaaatttagtgaattgaaaccaaatcaactcctaaggtttagtacagatggtactgctgagaagtgcgcagtcgcgcaagagagaaatccgcggataaggttcagtaaagatgggctatttggatgggataggcaaagagatacgtggtttataactgtacaggcagattccaaacatgtcttgaacgattgtaacctatttggaaaaatcgtcggtaaatctatctacgctttcagagagatattgagtggtgagatcgaaaccaccactcaaaacgatgaggttaagcaatttatgtaccctgcagttttaaaaagttctgaaattactataccgtattttaaggatatctctctttcaaaaagaggacatgataatgatgaggaaatacgacaacagccaaagaggaagcttcagagatcatcgaaagtaaagatggtatatgaagatgaagatgacgatgatgatgatgatgatgacattaaagatgacgtctttgagaataagccaaccaagagaatggttcttcctgcatggatcaaggataaccaaagcgttcaacctaagcccgacgtgtccgtagatcagccacaacacccctcatcagacactgaaccggtagagctgcatgatcaagccgacccaccaactaaagacccagaggaagtcgaagaaaaggtgatcgataaaagagagcaagaaacgttggatatgttagcgaaattccaacagcaaataaaaaacaaaaagattctcaaataa

SEQ ID NO: 2620 - DNA, 1443 bp, Saccharomyces pastorianus
atgctatctattctgagaaattcagtgagactaaacccaagggcccttggaattgttccagctgctgctaggacattggcatcggtacaggtgtccaagagactcttaaccaattcgtcgacgctgttacagaaggaaataaaggacgacaagcccaaatccattcttacgaatgacatgttgttcaaagccggtgttgatgttgatgagaatggtcaagccaaaaacgaagggaaaagagaagcagaggaagtggaaggggaaggccaaggccagaatgaaccttcttccaagggtgaaaaatccaagaggagaagacaaacttcaacggacataaagagagaaaagtatgctaactggttttatattttctcactgtctgcattagcaggtggtactatctatatggcaagaaattgggagcctcaagaagaggaagaactgaagaaagacatcggtaatggttacacgatgtcactaatgtacaaaagattcaaagctcgtttcaattccatgttcacttacttccaagaaccacctttccctgatctactacctccaccaccaccaccaccataccaaaggccactaaccttggtcattacattagaagactttctggtccactctgagtggtcacaaaagtatggttggagaactgcgaagagacccggcgccgactatttcttgggttacttgtcgcagtatttcgaaattgttttgttctcgtccaattatatgatgtactctgaaaaaattgctgaaaaattggaccccattcacgcatttgtttcctataacttattcaaagagcactgtgtttataaagatggtgtgcacatcaaggatctttcgaaattgaacagagacttgagcaaagtcatcatcatcgacaccgacccaaacagttacaaactgcaacctgaaaatgccatcccaatggaaccatggaacggtgaggcagacgacaaactggtcagattgattccatttttggaatatctagccacgcagcaaaccaaggatgttagaccgatcttggacagtttccaagacaagaagaaccttgctaccgaatttgaccaacgtgtaaaaaaattgaaggctaaatttcacggagacggctctaatggcaattgggccttaaaagcgcttggtgtcaccaacgacatgggcggcagccaaaagttcccgctcgacctaatccacgaagagggtcaaaaaaactatttaatgtttatgaagatgattgaagaggaaaaggaaaagatcagaatacaacaggaacagatgagcggccagacgttcaccttaaaggactacgtggaaggtaacctgccctcacccgaagagcaaatgaagatgcaaatggaaaagcaaaaggaggtagacgcgctgttcgaagaggaaaaaaagaagaagaagagtgccgaatccaaatga

SEQ ID NO: 2621 - DNA, 1503 bp, Saccharomyces pastorianus
atgactaaactacactttgacactgctgaagcagtcaagatcactctgccaaacggcttaacatacgagcaaccaactggtctgttcatcaacaacaagttcatgaaggcccaagacggtaagacataccctgtcgaagacccttccactgaaagcaccgtctgtgaagtgtcttctgccaccaccgaagacgttgagtacgctattgaatgtgccgaccgcgcatttcacgacaccgaatgggccacccaagacccaagagaaagaggtcgtttattgagcaagttggccgacgaattggaaagccaaatcgacttggtctcttccatcgaatccttggacaacggtaagactttggccttggcccgtggtgacgttaccatcgccatcaactgtttgagagatgccgccgcctacgctgacaagattaacggtagaaccatcaacactggtgacggttacatgaacttcaccactttggagccaattggtgtctgtggtcaaatcatcccatggaacttcccaatcatgatgttgacctggaagatcgcacctgctttggccatgggtaacgtttgtatcttaaagcctgctgccgttactcctttgaatgccctatactttgcctccttgtgtaagaaggtcggtatcccagctggtgtcgtcaacatcgtcccaggtcctggtagatctgtcggtgctgctttgacaaacgacccaagaatcagaaagttagccttcaccggttccactgaagttggtaagagtgttgctatcgactcttctgaatcaaacttgaagaagatcactctggaattgggtggtaaatccgctcatttagtcttcgatgacgctaatattaagaagactttgccaaacttggtaaacggtatcttcaagaacgccggtcaaatttgttcctccggttcaagaatctacgtacaagagggcatctacgatgaacttttggccgctttcaaagcttatttggaaaccgaaatcaaagtcggtaacccattcgacaaggctaacttccaaggtgctatcactaaccgtcaacaattcgacacaattatgaactacatcgacatcggtaagaaggaaggtgctaagatcttaactggtggtgaaaaggttggtaacaagggttacttcatcagaccaactgtcttctacgacgttgaagaagacatgagaatcgttaaagaggaaattttcggccctgtcgttaccgtggcaaagttcaagactttggaagaaggtgtggcaatggcaaacagctccgaattcggtctaggctccggtatcgaaactgaatctctaagcactggtttgaaggtggcaaagatgttaaaggctggtaccgtgtggatcaacacttacaacgatttcgactctagagttccattcggtggtgttaagcaatccggttacggtagagaaatgggtgaagaagtctaccatgcatacactgaagtcaaagctgtcagaattaagttgtaa

SEQ ID NO: 2622 - DNA, 975 bp, Saccharomyces pastorianus
atgagcggatacacggggaataataattacagcaggtattcatctactcctccaagacaaagagggaactaccacgctagacgaggaagaggcgcgacgggcggatcgtactatagaggcggcagcggcacgtcttatggtgctaggtatagcggcaactacgagcagcagccgcaggaggctgactcgaggcagcccggtgcgtactacagaggcggtagcgccgacaccaggcccttctacacgggtaacagcaggcaatatccagcgcagccccatagatacaacaacaatgcgaatgcgttccatgcgccatacggagccaacagccaggatgcggccggcagcgtcgcggatgacctgcgagacgaatacgagtacgaggaaaaacgacccaaatccagataccagaacacggaggcagattatccgcttcagcagcctgtaagcagcagcagcagccccaacaacgggcttccgccgccgccttcggtatcctccgtgggaaacagtaggccatatcacaacaacgcctatccatatgccaacaaccaccactatagcaactaccaccatcgcgagacaccgccacctcctcctcctccccctcctccgtcggacaaccaccacagcaggggttacccagcacatgcgaccgaaaatagaagcaatagctcctccggaggcatgataaccaagaagaaaagagtcgcggacatggaagactcgccgttcctgtacctgacggatttcgacaaaaacattaaaagagccgccaacgctgacaccgaatgcgacaaagtaagagacgtattcaacgaaagtgacgtaatcgataccactctacaagacctaaacctaaaagtcaactccaacgagctggagttgcggcttctaaacaaccagtgcaacaagcatgcattgaacatacagctgacccaggaaaaactggactcgttgctgttgatgcagtag

SEQ ID NO: 2623 - DNA, 597 bp, Saccharomyces pastorianus
atgtttcatctagtcaaaggactttacaataattggaataaaaaggaacaatattcaatactaatattaggtctagataatgcaggtaagacgacgttcctggagacattgaaaaaggaatattcattagcattcaaagaattggaaaaaatacagcctacagtgggacagaatgtggccacgatacccgttgatagcaaacaaatcttgaagttttgggatgtcggcggacaagaatcattaagatcaatgtggtccgaatactattccttatgtcatggtataattttcattgtggacagttcagatagagagcgactcgacgaatgttcaacgactctacagtcaattgtaatggacgaagaggttgaaggtgtgcccatattgatgctggctaacaaacaggatagacaagataggatggaagtacaagatatcaaacaaatattcaataaaattgcggagcatataagcgctagagatagtagggttttaccaatcagtgcgttgactggggaaggtgtcaaagatgctcttgaatggatgattgtcaggctggacagaaataaaaagtcaagaccgccaatttataaataa

SEQ ID NO: 2624 - DNA, 1188 bp, Saccharomyces pastorianus
  modified_base (73)..(98): a, c, g, t, unknown, or other
atgtcgttatctttagtattgtaccgtttaaggaaaaccccgtgtctgaacattttcctgcccgttttggccnnnnnnnnnnnnnnnnnnnnnnnnnnccaaagagatcaatccttactgggacttaatgggcaatcgatttctcaacacaaatgggcccatgagaaggaaaacacattctactttcctttcaccaagaaatataagatgccaaagtattcctataaaaagaaaagcggctggctgtttaatgaccacgtagaggatattattccagaaggtcatatcgcccactacgatttgaacaaattgcactccacaccggatgcagctgtcaataaggaacacattctgattttgaccccaatgcaaacatttcaccagcaatactgggataatttgctacagctaaattatcctcgggagttggttgaattggggttcattactccaagaacaaccactggtgacttagctttaaaaaaattagaaagtgctattaaaaaagttcaaactgacaagaaaaccaaaagattcagtaaaatcactattttacgacagaattctcaaagttttgataagttgatggaaaaggaaagacatgctttagaagttcaaaaggagagacgtgcagctatggctttagctcgtaacgaattattattttccactataggccctcacacttcgtgggttttatggctagatgccgatatcatagagacaccaaaatctttaattcaggatatgactcaacacaacaaagccgtcttggctgccaatatctaccaaagattctatgaccaagaaaagaaacaagcatcgattagaccatacgattttaacaactggcaagagagtgaaactggtttggaaatagcttcacaaatgggtgacgacgagattatcgtggaaggttatgcagaaattgccacttacagaccactaatggcccatttttttgacgccaacgggttacaaaatgaagaaatgacattggatggtgttggtggtggttgtactttagttaaagcagaagttcatagagacggtgctatgttccccaatttcccattttaccacttgattgaaacagaaggttttgccaagatggccaagagactaaactacgatgtattcggtttgccaaattatctagtgtatcacatagaggaagagaaccattaa

SEQ ID NO: 2625 - DNA, 1221 bp, Saccharomyces pastorianus
atgtcacaaggtactttatacgcaaatttcagaatcagaacctgggtcccaagaggccttgtcaaagctttgaagctggatgtcaatgttgttgcgccagaaaacgctgctgcgcagttcgccaaggacttcccattgaagaaggtcccggcctttgtgggcccaaatggcttcaagttgaccgaggccatggccatcaactactatctggtcaagctttcgtcagatgaaaagatgaaggcccaactgctgggtgctgaggacgatttgaacgcccaagcacaggtcattagatggcagtcgctggccaacaacgacttttgcatccagatggttaacgccgtcgcccctttaaagggggacgttccttacaacaagaaaaacgtcgacgccgccatggatgccattgccaagatagtcgacgtcttcgacgacaggttgcggaacaacacctatctggtcactgaaagcgtgtctttggccgacttggtcgctgcttccatcttcaccaggttcttcgaaaacctgttcggcttcgagtggagagcccaccatccggccatcgtcagatggttcaacaccattagggactcctcctttttgaaggacgagtacaagggcttttccttcaccgataaaccattgtcccccccacgtaagaataaggaagaggccaagccagtaccagcaccagcaccagcaccagcaccgagcgcaactccttcccggaggccaaaacaccctttggagctgttgggcaagcccaccttcgccttggatgaatggaagagaatgtactccaacgcagacaccagagcggtggctttgccctggttctggcagaactacaacccggaggagtactccctctggaaggttacctacaagtacaatgaagaactgaccttgaccttcatgtccaataacctaatcggtgggttcttgaacaggttggtcggctccaccaagtatttgttcggctgtctcatcatctacggcgaaaacaacgacaacggtatcactggtgtcttcatggtcaggggccaagaccacgttccagccttcgacgtcgctccagattgggagtcctacgatttcgccaagttggacccctccagcaaggacgaccaggaattcgtcaacaacatgtgggcctgggacaagccagtctctgtcaatggcgaaccaaaggaaattgttgacggtaaggttttcaaataa

SEQ ID NO: 2626 - DNA, 300 bp, Saccharomyces pastorianus
atgaccaaagaaactattaccatagactctatttcaaatgggatacttaataacctgttgactacgctcatccaggacatcgtggcgcaggaaaccactcaacaacagctgctgaagacgaggtatccagaccttcgcagctactaccacgacccaaacggatctcttgatattaacggactacgcaaacaacaagagtcgtcccaatatattcactgtgaaaattgtggaagagacgtatcggcaaatagactggcggctcatttgcaaagatgcctgagtagaggtgctagacgctag

SEQ ID NO: 2627 - DNA, 303 bp, Saccharomyces pastorianus
atgtctcaagatccagttatccttgcctcaaacgataataaagagtacgaaataccacgatctgcagccatggtttcaccaaccttaaaggctattattgagggctccttcaaggaaagtaaaggcaggatagaactcaaggagtttgattcgcacattctagaaaaagttgtggaatacctaaattacaattacaaatacagcggtgttgagggagatgatgatgaagatattccagaatttgaaataccgactgaaatgtcgttagagctgctacttgcggcagactatttaaatatttga

SEQ ID NO: 2628 - DNA, 2397 bp, Saccharomyces pastorianus
atgaagaaccccagctttgattgggaaaagttaaaagatgtattttatagaaatagggccattggcgagttgaaatggcctactcaatacgaagactttagatgtgcgttgtcatcaactgtcattgcagtagagatccaagactttatacagatatacgactattttggacagttactgggtaagattaacttactgaaaactcatgaagatataataaaattcgaatttgataagaacgaaaagctgatattggtaacgagtcgctccgtaaggattgtaaaaagttggacaccattgataatcgaaaatgtgccactggaagactcaaatgtagatacaatctgggattaccataatggaatcatgctgttaaaagaatctcgtgatatatacaagttaaacggcaatgaatgggaactgctttataagaataaagataaaaaatacaatttattaacaaaaaaccattggagttgcaatgacgaagttatcattctactagatgttgaccacgtgtaccaggtgagtacctcaaatggaacgttactgaagctgattgcagattcctcgtggcacaaggtaacgatatcgtctaaaggctttatttgtctttataacatgaagtacaataagttacaaatatttaaagatcccacaagaatattgatggaacacgacttggagtcttcaccagatgatgtatgttggtgtggcaatgatactattgcttgctccttcgaagatgaaatcaaattgtacggaccagatggtctgtatgtaacattttggtacccatataacgtaacaaacctaagggcagaaattgatggtttgaaagtcatcactactgaaaaaatttactttttatcaagagtgcaacaacaaacttcgaatatatttagaattggatcaaccgagccgggggctatgctgctggattcatttagtctactggagaaccacgcgcccaaagcgattgaaattttgaagaatttcgatctaaaaagaggcgtactggattgtattgctgctgcagtagatgaattcgagcccaaactgcagaagatactattgaattccgcatcctttgggaaagcttctttaaattacaagtcctttgatgcaggtatattcgtggacgcttgtaaggtaataagattactgaactgtttcagaagttttggtatttttttgactgcggaggagtacaagagtatttctctgaaaggtgtcgttgataggttactggtgtaccacaagtattacgaatgcatacggatatgcaaaatggcagataaaccaatcctcttaggatacgtatttaccgagtgggcaaaagacaaaatcaaagatagtcctgacatggaggatgatgaactattagagacagtcaaatcccggttggattctgtaggtgatatggatacaatacaaatgattgctatttcgaacgttgcatatttagaaggacggttcaagttatctcgagatttagctctattagaaaagaacgaagaagccaaaattaagcagcttttcaagcttgatgatgatagtctggcgctcaaagagtgtgttcaagtacagaattctagtttgacggtttcacttttggttgcactctcaaaaaaattaacaaactcccaattaacaaagcttttgatccttgatatgtccaacaatcctttgtatatctattacatgaggaacgacaaagcttatttgtacgatttttatcgccaaacagatcgatttatcgatttggctcacgtcctattacaacaaggaaaggaacaacaatctttacacagctttttaccacaaattagagacctttatagcaaaatacagaatagcgaaatggctagcgatgtcaccgggctgcttctaagacaagaaaaattgtgggtgtaccaggagtctctaggcaaaagattcggtatttcattcgctgatatgacattggatcaaacgctttcaaaattgatcgaaacaggacaagaaaagcaggtaaaggaaatagtgaaaaagtttaaagtaaatgaaaagaaattgtatcacctgaaatgtagaatgctggttgaaaccaagaaattcgaccaactgatgcaatttgctcagtcaaagaaatcaccaattggctacatgcccttttatagatacctgagaagcagagggcatacaaaagaagcggcttcttatgtcaatatgatacctggtctttcttaccaagaaaaaaagaaactgtacttggattgtgagagtttctacaatgtaattcaactggcgggcaaagagagagacataccgggcttaaaagaaatatacaacattataccggccaatgaaccagaactaaaggcgctcgccaatgaaacaatgggtaggatatag

SEQ ID NO: 2629 - DNA, 2058 bp, Saccharomyces pastorianus
atggagaagacagcagagaaggttgaaggacctaagagcaacaactcaaaacaaaatgataacggtttagacatgaagaccttattcgtcaggtctattcctcaagatgtcacagacgaacagctagcagattttttctctaacttcgctccaatcaagcatgcggttgttgtcaaggacgtcaacaaaagatctagaggtttcgggtttgttagttttgctgtggaagatgacacaaaggaagctttggctaaagctagaaagaccaaatttaatggacacgtcttaagagtagatgttgccaaaagaagagatcgttcaaagaagtcatctgaaggtgctgaaaagagcgcaccaaaatcctttgagaagactgaagttcagaaaaacgaaaatgaggatgatgttgacgatgaagactctatgctaaagggtaagcctaagttaatcattaggaatatgccatggagctgccgtgatcccaccaaattgaaaaagatttttggtagatacggtactgttgttgaagctactattccaagaaagcgtgatggtaaattatgtggatttgcgtttgttatcatgaagaaaatcagtaactgtagaattgccttagaaggcaccaaagatctaacaattgatggtagaaaagtggctgttgattttgctgttcaaaagaacagatgggaagattacaaaaaagctcaagcagaggccaatgtcgaaggcagtaatgaatctgaagacgaggaagaagatggcgaagacgaggaagacaaggatgaagatttagaggaggatatagaactaggcgatgattctaacgaaatagaagaaccaacgagaaaagtgcaaaacaaaagggaagacttttccgtttttgttcgtaacgtgccttatgatgctactgaagagtctttggccgcccatttcagtaaatttggtagcgtgaagtacgcattgcctgttatcgataagtctacaggactagctaaaggtacagcttttgtagctttcaaagatcagtacacatacaacgagtgtgtcaagaatgcaccagttgctggttctacttctttgttgataggtgatgatgttatgcctcaatatgtttatgagggtcgtgttttgtccattacaccaacattggtaagggaagacgctggtagaatggctgaaaggaacgcagctaagagaaaggaagtcctaggtaaagctccaggcgagaaggatagacgtaatttgtatttattgaacgaaggtagagttgtcgaaggctcaaagatgacagacttgttaactaacactgacatggaaatcagagaaaaatcttataaattaagagtggaacaactgaaaaagaacccatctctacatttatcaatgactagattagctatcagaaatcttcctagagcaatgaacgataaagctttaaaagcattggctcgtaaagctgtggtaggatttgccacagaagtaaagaataatgaaagacatcctttgagcaaggaagaaatcattagatcgacgaaagaaaagtataagttcatgggcccagacgagattgaatctcagaagaaaaaagataaaaagagtggtatcgtaaagcaagccaaggttatcatggaagttaaggggtctactgcaggaagaagtagaggttatggttttgtagaattcagagatcataagaacgctttaatgggtctaagatggttgaattgtcatgctgttactaccgaagaaattttggaagggttgagtgatgaagaaaagaaggaagtagaccccgacttagggaaagggagatgtttatgtgttgaatttgccattgaaaattctaacgttgttaaaagaagaagagaacagttgaaacaggcaaggaccaagagaacgagaccagatgatgaagctgccgaagatgccagcgagtccaacaagaaggcaaagaaggaagaagaaacaactccagccaatcccgacgacaaaaaaatggatgatgatataaaaaggataattgggtttaagcgtaaaagaaagcatggtaaaaagtaa

SEQ ID NO: 2630 - DNA, 1668 bp, Saccharomyces pastorianus
atgtataatggcaaggatagagcacaaaactcttaccagccaatgtatcaaaggtctatgcaggcccaaggacaacagcaatctcaaccgtttgtgggaaagaaaagtacaattggaagtgtgcatgggaaaccgccaatgttaatggccaataatgatgttttcactattgggccctataaggcaagaaaggacagaatgagaatatccgttttggaaaaatatgaagttataggctacatcgctgcaggcacatacggtaaagtttacaaagcgaaaagacaaatcaattcgagtacaaattcagccgatgggtttaatttaaatggtaccaacgcaaaactcccgcagtttgacagcgcacaagcaaaatcaacagcttcactggacatgcagacaaattcaaacgccttaagaggaaacttactaaaggatgagaggataactccaggaagaatacgaaccacgagagatgacggatcgtctcaatataattcgcaaaaacagattcctagtaaaaaacctttaaccgtattttatgctatcaagaagtttaaaacagagaaagacggtgtcgaacagctgcattacacaggtatctctcaaagtgcctgcagggaaatggcgttatgccgagaactgaataataggcgtttaaccacattggtggagatttttctggaaagaaaatgtgttcatatggtgtacgaatttgcggagcatgatctcctacagattattcatttccacactcatccagaaaaaagaatgataccgccaagaatggttcgatctattatgtggcagcttctggacggtgtatcgtaccttcatcaaaattgggttcttcatcgtgatttaaaacccgcaaatatcatggttacggtagatgggtgtgttaaaattggggatttgggtctggcaaggaaatttcataatatgttacaaactctttacacaggggataaggtggtcgtcacaatatggtatcgtgccccggagttactgttgggagctagacattatacccctgctgttgatctatggtctgtcggttgtatctttgcagaattgataggcttacaacccatattcaaaggcgaagaagctaaattagactctaaaaagactgttccgtttcaagtaaatcaattacaaaggatccttgaagttcttggtaccccggatcaaaaaaattggccttatttggaaaagtatccggagtacgatcaaattacaaagtatcctaagtatagagataatttggctacctggtatcattctgcaggaggaagggacaaacacgcattgagtcttctttaccacttgttaaattatgatccaatcaaaaggattgatgcctttaacgctttagaacatagttatttcacagaaagtgatatacccgtcagtgagaatgtatttgaaggacttacttacaagtacccagcaaggagaattcacacaaacgataacgacatcatgaatctcggatcaagaaccaaaaacaacacacaatcttcagggatcactgcaggcgccgcagcaaatgctttaggtggacttggtgttaatagaagaattttagcagctgcagcagctgcggccgctgcggtttcaggaaataatgcatctgatgagccatctcggaaaaaaaacagaaggtag

SEQ ID NO: 2631 - DNA, 636 bp, Saccharomyces pastorianus
atggcaacaatgacgctttttaggcccactcaattacacatgaactccaaaattaccttcaatagacctttcgaactcgtattcaagaaatctaatcaattgaacatgctagcaggcatgggatttggtagactaattcaaacaagatttataacggagaacgcggaatcggcaaaacgaggaaaggataaattacataagataatttctaaatcacgactactaacgaggttgaacaaaaatcccaaattctctcattactttgaccggattagcgaggccggtacggtcccaacaataacgtcatttttcatcttgcatgaattaacagcaatactaccgctttttctactatggtggctattctataatctcgatatctctgatgatctcaagctgcccaacttcttaaacgggttaatggagagttgtcatgctgctatggagagatttgttggtaagagatatcaggaatgtctcaacaaaaacaaactgatcttgtctggcacaatagcttacgttacagttaaattactttatccggtgcgcatttgttttagtatttggggagcaccgtattttggtaaatggttattgcttccttttcaaaagctaaagcaccttattaagaaatag

SEQ ID NO: 2632 - DNA, 948 bp, Saccharomyces pastorianus
atgttaagtgaagaatataagatagacagcgcaaataccatctcatcagcaaagttaacgatggaaaaccagaaaatggtgttgaagaagttcatgataacccaagtgacaaaggggattatgcaacggtatgcgagcctgttagtgactatacatagtgacaacactacgattattgggttaaattatttgaaaacagcggaatttttggaaacagttttgcatagggccaactcatctcatttacagttcaagaaagtctgttgcattgtcataaaatttttagattgctgttcaaaagaaacaaactacatgaggtttttgaaatttaatttgcaaaagctatttgtggctgcctttatattgagcgtgccaaatgttgtgggcgatgatcgtgacaggataactacaagggatgggatttaccaattttactccaagataacagggttgtcgctagaagaggtgacaaattgccgttctatcgtgagacctgtgcttattcggcggagtagacaacaacgcaaacaaatgttgactcgcagtgatcagaattcctatttttccagaggcacttttatgaaccctcattctccagcatctccacctcttcccacaaataggacagccaatgacgcgcttttacatacgcatgcatattcacttcaagaccattccgatggggaggattacgatcggcgggctgaatatagagaaggaaatagcttggaggcagacaccggaacgtatcggcatactacgttcatagcagctataccaaacgttttacattccagatcattgatggaatgcgatattgagcccacacagacaatagattctacagaatcttcaagccaaagcaatggatatgtctcgggaagggaattacaggagtttaacaatatgggcaagaaactggttcaggattcttttagagtagtctag

SEQ ID NO: 2633 - DNA, 528 bp, Saccharomyces pastorianus
atgaaaccggcgcaagacatgaatgcagatgaagtgttcctcaaacaagcggcagaagctatagtggtaacctcatcgagctccaccagttcggaccccataatacaggaactattacagaggatccgacggtccagcccactgaattctgtcatacaagagaatggttcgaacgttgaagcgacagaaaatatggccaagggactcataagagacccagaagcgcagacaaaaatttttggaagcactgaacaacacagagaaggcatgcaactttatagctgtgcgaaatgtcagctaaagttcagcagaagttcggacttgaggaggcatgagaaagtgcattcgctggtactgccgcatatctgctcaaattgtggcaaagggttcgccagaaaagatgctctaaaaaggcattccaatacattgacctgtcaaagaaacagaaagaaactgtgtgaaggctcagatgtcgatgtcgatgaactcattaaggatgcgataaagaacggtacaggcctactgtga

SEQ ID NO: 2634 - DNA, 474 bp, Saccharomyces pastorianus
atgccaattgatcaagaaaaactagccaagctacaaaagttgtccgctaacaataaagtcggtggtaccagaagaaagcttaacaagaagactaactcttctgctggtgccaacaaggacgacaccaagttgcaaagtcaactggccaagttgcacgccgtcactattgacaacgttgccgaagccaacttcttcaaggacgacggcaaggtcatgcacttcaacaaggtcggtgtccaagttgctgcacaacacaacacttccgtcttctacggtctaccacaagaaaagaacttgcaagacttgttcccaggcattatctcccaattgggccctgaagccatccaggccttgtcccaattggcagcccaaatggaaaagcacgaagccaatgctccagctgacgctgaaaagaaggacgaagctattcctgaattagtcgaaggccaaacttttgatgctgacgtcgaataa

SEQ ID NO: 2635 - DNA, 2562 bp, Saccharomyces pastorianus
atgtcgtcttcgtcacttcgagtgttaactgttgggaacaaccctaatattctgttctacacttcaaggttccagttggccaagaacatagaactttatcacgtcaacgattcgaagtcatgccagtttgaaattgaaaccgaatactacggtaaggaccaattcgaattggagaaccatttcacttctctggaacatttgaccgaggctctgaattccgggtcccgtggatccatttttgatatagtcatcatgagcgccccctctctgcaggagctgtcttcactgtcagccaagttggcctccataaccgattcgaactccaagattttcttggagagcagcgggttcattcaattggaaccgtttgttaagttgtcaatggattctccgcatttgaacgtcttcagtatcttgaccgatttggatgttcgtcaaatcggcccaaaccaggtcaaacaattccctagcaatacaaacgaaaataccatttatctgggtgaaagtaaatccaatagtgaaaaatactctgccaatgttgtaacattattgaccacgtttgagaaactattctcgaaattgttctccaacataaaaatcaacttgtgtgggttctcatccattgagtttttatcacaacaatggaaactggccatttccagaatttgttttgacccattactgatcatgtttgaacaagaaaatccaagtgatttagaccaacaaatcattgctaaacctttaatctctggattggttactgaaataattaccgtagcaaagacaatgggtgctaggctgaacagtaattatgataatgagaacaatcttttatccctatggaaaaattcctaccaatcgactaatgaaccgcctgcgctggtttaccatttcgtccatcaaacaacacccttgaatattgatatcctgttgttgcaaacaatcttattagctgacgattttggcattaagacgccatacttggagtttttgtattccgttatgtcccaattcgaaagattaaataatggtaaatctaaatggtttatgagatcaagtgaaaaaaataaaattttacaaaatttacgaaactcacaacaaaatgaattagcttctcaaaatcaaatcactaacctgcaaagccaaattagcaaactgagacaagagatgattatgcaagccaagcaacatgatatggaaaccaacggcctgaaagagaagcaccaagccactttgcaagctcaggctcaggctcaggctcaggctcaggctcaggctcaggctcaggctcaggctcaggctcaggctcaggctcaggctcaggctcaggctcgggaccaaacaccaactgagacagtaaccccaaccgaagctacaaatacatcggccgtcaacgaatatagggcgacaggcactccaaatttgagggatatcgaagatattgcgttatacagtgtcaactatggcgactctccactgaagtccccaccacctactgctggctcgcaacagcaaattagttcaccgcaatccacacactcccaaatatttgaagaggctaatggctccaatgacaaaatactacaagagcgtgaactggaacttcgtaaaaaagagttagagctacaagaacgtgaactggaattccagaaacgggcaattcagcaacaaagattcaacaacaatggtaacaataataatcctataccaaaaaagccttcttaccctcaactacaacagtccgccaacatccgttccagtagtagaggaatgcatggcgctaatgggcctatttcacaacctgcatcggctgggaactttgtggacccagtttctgcaggtatggccacatatgatccacaacaacaaccttcaaccttatctttacagcaacaacagcaacagcagccaccattacagacacaaccttaccacgcacactctatcaaaccaacaagtagaaagaatagaaacagtaatatgcccaatattggtaatccctcctgtatagtaaacatgggtaattttggcaggccaccaaaaaatccaagccaaactcgtttgagctcattgccaacccatagtattgtaaatcaaaacagattgaggtcgcaacagtctaaaagcaaactcaatatgcagcacgctgccaagccaaacaatgtgtttaatcaacctcctgtttctaatttaaacaaccacgtcactactcaaagacaattcagttcgagcaccatgatagaaaccacaaataacaacaatgaaatgaatatcagtagtagtaaccctgatatttctaccaattcagtagttcacaatgcaatgcaatttacaaatacgaacgataacgcaaataacactgtcgacataaacgatcctagcaatatagtggctcctcctacaggctctgtctcagcgccaagtactccaactttatcttcatcaagccaaatggctgatgtaagctctcctagtactgatgatgttaatggtggggaaaatgctggcggtaagaagaaaagatttggcttatttaaaaagaaaaataaatcaaagaaataa

SEQ ID NO: 2636 - DNA, 1704 bp, Saccharomyces pastorianus
atgaccggcaacgatagtgcaactacctcaaataacaaccagaatccacataaagatcacttcaagtttattgtaaatgacaaaaatattttggggcctcaatggttaagtctttaccagacagatggaaaagtagggttcgccaagtctcatttcgagcaggcgatgatgaacgttattagggaaccgaatatcaactccacagttattctgagagcggatattttgaaagagatcaaccatgcctcagaggctggatctgaactgaatccagacgagtctgaattgaaaaagtttgagatcgagaacagtaatgatggcgacgaggaagacgtgaagaagataaacattgaagatttgaacataagatcaaccgaaacctctgaggatttgaaactgtcgccagttcacgaatttgtgaggagaatcatcccaaggaacttttacaaagatgccatcataaaccaaacatgtttgatactaaacagtgaagaccctgaattccaagaatcctcgttgatcatatataccccacacatcgactccgaaacggattgtccgttttatattccaaaaacgcaaaccgtgggcattttattacatcaatcagtcctttctgtacattatatacccttccctgacgacaagacagcctttacagacgaatccgaacgtgttgtaagaaccgcttacagactactgcaaacagccaacaaacactctaaaggtgtcatgcaaggttatgagaagagagtcaatcatgaccaagtggtaaataaagtcaatttccaaaatacatatattgttttgaaaaagaaatactctaaatttttagtggaaaactgggcggaatcgaccgacccaaaaaagcatgtattcgaagatatagccattgccgcattcttgatagaattatggatcaaagtgtatggtccagatttccgttcgaaaatgcaattcagagatttgggttgtggtaacggtgctctttgttatattttgctaagtgaaaatataaaagggctgggtatagatgcgaggaagcgtaagtcttgggccatttatccatccgaagttcggtcatcgttaaaagaacaagttataataccctctattcttttgagacctcaccccgctttaaaaagacaagtgcctcatttggagcataatggaagatttttcccggtcaaagtcacacatgaggtgattgctccagcaactgttgtgtattcgagcaaagacttgctaaaatctccacaggtcaacactgctgagttcccatcagacacttttattatcggtaaccactctgacgaattgacttgctggattccattactgggccatccgtatatggtcataccttgttgttctcacaatttctcaggtcaaagggtgcgtttcaacgtaaggaagcgtgtgccaaaatcagatgaaatcaaaaaccaaaataatagtaagagtacctattctggattagtggatcacgttgaatatatctcctctcgcgtaggctggaaagtggagaaggagatgttgagaatacctagcacaagaaatgcagccattattggtttggagaatgaaactttgaagaacttcccaacgcaagcggtgtacgacatgatttgggaagatggaggagctgaaggctggattcaaaacacaatgactttattgaagaggaatccaaggaatcattga

SEQ ID NO: 2637 - DNA, 1197 bp, Saccharomyces pastorianus
atgtctcagaacgtttacattgtttcgactgccagaaccccaattggttcattccaaggctctctttcttccaagacagccgtagagttgggtgctgctgctttgaagggtgccttggctaaagttccagaattggatgcttccaaggactttgacgaaattatctttggtaatgtcctttccgccaatttgggtcaagccccagctagacaagtcgctttgaccgctgggttaggcaatcacattgttgctacgacagttaacaaagtgtgtgcttctgctatgaaggccatcattttgggtgctcaatccattaagtgtggtaatgctgacgtcgtcgtggccggtggctgtgaatctatgaccaacgctccatactacatgccagctgcccgtggtggtgctaagtttggccaaacggtccttattgacggtgtcgaaagagatgggctaaacgatgcatatgatggcttagccatgggtgttcacgcggaaaagtgtgctcgtgattgggatatcaccagagatcaacaagatagctttgccatcgaatcttaccaaaaatctcaacaatcccaaaaggaaggtaaatttgacaacgaaattgtaccagtaaccatcaagggattcagaggtaagccagatactcaagtgacaaacgacgaagaacctgctagattacacgttgaaaaattaaagtctgcaagaactgttttccaaagagaaaatggtaccgtcactgctgccaacgcttctccaatcaacgatggtgctgcagctatcattttagtctctgaaagagtcttgaaggaaaagaatttaaaacccttggctatcgtcaaaggttggggtgaagcagcccatttaccagcagatttcacatgggccccatctcttgcagttccaaaggctttgaaacatgctggtatcgaagatatcaactctgtagactactttgaattcaacgaggctttctccgtcgttggtttggttaacactaagattttaaagctagacccatctaaagttaatgtatacggtggtgcagtcgctttggggcatccattgggatgttcgggtgccagagtggtcgttactctactatctattctacaacaagagggaggtaagatcggtgttgctgccatttgtaatggtggtggtggtgcttcatctgtcgtcattgaaaagctatga

SEQ ID NO: 2638 - DNA, 1428 bp, Saccharomyces pastorianus
atgctgtcagattgcttgctgaataacttcaggataacgtcgcaaatagggtcgggtgcgtatgggctggtgttccatgtggtggacatactgaccagccgtgagtatgccgtgaagacagttttcaagtcttcctcgatggacgagttttacaacaagaacggcatgaacaacaactcgcaagtggccaggactactcttcttcagacacaactgtatcattttttcaagagtttccaaaagaaactgttcctaccttcagtcgacttagattcgatactgcagttgacagaaaacgaactaaacagattaccacactacagggagattgctttccaactgaaagttcagtctcatgcaaatatcgtgaagatccatcaagtgttagaatcatctatcgccactttcatcgtaatggattattacgatagagatcttttcacttcgatagtagatcataagcatttcatcaacgatggcgttttgatcaaaaaggtctttctacagctttgctccgcattagaccattgccaccgtctcagtatataccattgcgacatcaaaccagaaaacgtattactagatcgtaacgataatgcctacttatgtgattttggtctttccactaaatccaaatatctcgctccaaatgtgtgcgttggcagttcgtactacatggctccagaaagaatattatactgcctgaatactaccaccaacggcatccacgtcgacgaatgctgttcaagcctccccacggacacaggggacatttggtctctaggtatcattctgatcaacctaacctgtatcagaaacccatggttgaaggctcaccaaaaggatgatgacacatttcatcattttgcgaacaataaccacgtcttaaagaaaattcttcctatatcggacgatttgttttcagtgttggcaaaggttttgcaactgaacccatatacaagaatcgatatgaaaactttaatgtctgaagtttcttctttgacttcgttcaccaaagagggccctttgtctcaagttccagccctatcggacgaagtgtatatgacacatatcctaagaaatgaaaacctatattttgacgaaataccacatcttgccgttgaccaagaacaagaccaacaacagccgcaagaacaagaagaagccgagccggaaagtgatattccatcgacttataatagtgatggaagtatggagaaatatgactataccaataataataacaacaacacgtttttaagttcgtcgatggacagtacaccttaccaatccgatatcgatgatattggtgcttccaaagattgtaaattccaacaagatactctgagaaatagactattgtgcctacaaatgaatttttccactttaacggatggtccaaacgagaaatggttaccagaatattga

SEQ ID NO: 2639 - DNA, 735 bp, Saccharomyces pastorianus
atgtcattttcgtccatcttatcgcaagatatcacagacgatatctcggcaccagcaaatgctgctgtgctgggcccaagagaacagcttattttcaaggcttatcagaatgaaccttggttggctggtatagcccagaatcttatcttggacgaaaaactagtcgtagtagacagggaacttttgttccaggtgctgatggtggagaacatctccaagtcgaagctaacgcaaatcgatgatataaaaacgaagctggacccgaaaaaacagaaagtagacagactacgatcgggcgcgcaagtgcacgacgccaagaagtacgaggtcatcactcaagtggatatggaagatgaagggaacctgaatgacaacgacggcgccaactacaaaaataacaacaacaataacaacaatgacaacactgccaagagtaaatctgttttcaagttgacgctgcaaagtaagtcgggtgacatcttcttcgcagtcaactccactccaataccttggaactcctgtatgttgggctcgaaaatcgtcatattgccaggaactgttttcaatagaggcgttttcgtaatgaaggactctcaagtcatttttctcggcggcatcaacagagtttggaacgaaaacaaagatcaaaagttttgcgattatttagaatccaaactacaacgtgacaaacagtttgtgaacggcgcttccaagaaaaggaaagccaatgactaa

SEQ ID NO: 2640 - DNA, 540 bp, Saccharomyces pastorianus
atgttatataacaaagtacaaaaggcaagcagcatcagcggcccgaatcgccgtacgaagcaccatttcgaccggtttgtacagatggtcctattcattgcagcctctcctgaatattgcagtccggtgagtagtatgcaggatactgctgtcaggccaaacttaaaaaaggcagacgttcttgagcagaaaataaaaagcctaaatatcgctctgggcccaaaattggaaaaggcagatcctcttggtgagcctgtacataacccaagtatcctagcaccctcatccagaggaaaggacctttctgcagcacagagacccaaaagcagaaagaagcaaaccattcttcctaatggtcagccgaaagaatgtgccacgtgcggtgacacctggacttcccagtggagaagtggaccggatgggaacgttgaactatgtagccgatgtggcatagcttatagaaagaaaatcgaaaaaaagatacgacaacaacaatgcggtgagaaaggttcgaaaaaatttatatttagtagtcagtaa

SEQ ID NO: 2641 - DNA, 1878 bp, Saccharomyces pastorianus
atgtcaacagaagtggataagcacaggaactcactacagcatcataaaaaaaacacttactctcccttattctctccaatttctacgtataggtactatccagataatcggccatttagaacacaacttgaatccagaagatcggccagttccagcggtgtttataaaaaaagaaccaatacgacaagattcaatcacttgaacgatcgtcgcgttttatcaatggaagaagcaatcaaagatacgcctgagagaactaatcgtggtagctttctagaagggctgaaggattccctttggaattcagggagatatttgtggcacacatttatgaaaaatgaacttcataacgacgatagaaccgaactagatacaaatggtaacgctaatagtgaaagttccagaagcagtagtaggagtagtagtaatagtacgcgatacggtctaagagaggagtctcctctaaatattagaaagcataagtttgatacatcaatatgggtattaccaagtaaaaaaagaagaatcgaatctgaagataaaagcgtgccttcgaactcttcaggtagatcctcagcttatcaagaaggtagcagtgatagatataatactgtaacattctcgaaagatcctttcggttggaataaatggaagacaagtgctattagttctagcccagacactaatattttcgaccaaaatagccatagtagaccacaatatggaaccgcttttattaggagaaataaatttgtgaaacaaaacatcaacgatactaaacttgtctcaagagcacaatctgaagaggtgacgtatttacgacaaatatttaacggcgaatacacggttccaaaaatactaaaggatgaaagagcaagacagctgaaattgatggatatggataaggcgaaagatgccgggctgaaaaattctataatcgatttaactgaaaagattaaagcaattctaatcgaaaataacaacaagaataaattacaagcaaaagataaagatgatgatgatttggtgtttgttaaagagaaaaaagtttcctctttagaaaaaaagcataaagactacctgaatcaaaaaatcaaattcaataagtctatattaaaatttgaaaaagactttaagaagtataatgagattataaatgaaaggaaaaaaattcaagaagatctgaagaaaaagaaagagcaattagttaaaaaggagttagttcctcaactaagcgaaaaagatgatattcaaatcgaaaaggttttggtatcaagagagaatgctcagctaatgaaaagagataacttggagataagcgtgcgtgattttaagactttagcgcccaaaagatggttaaatgacacaattatagaatttttcatgaaatacatcgaaaaatcgaatgctgacacagtagcatttaattcatttttttatactaatttgtcagaaagaggataccaaggcgttcgcaggtggatgaaaaggaagaaaacgcaaattgacaaactagataaaatttttacaccaataaatttaaaccagtcacattgggcattagggataatcgatttgaaaaagaaaaccataggctacgtcgattcattatcaaatgggcccaatgcgatgagttttgctatcttaactgatttacaaaaatacgttatacaagaaagcaaacactcaatgggtgaagactttgatttaattcatctagattgtccacaacaaccaaatggttatgactgtggtatttatgtttgtatgaataccttatatgggagtgcggacgctccattagactttaattataatgacgctattaggatgagaaggtttatcgcacatttaattttaacagatgctttgaaatga

SEQ ID NO: 2642 - DNA, 2514 bp, Saccharomyces pastorianus
atgctgttcggtattaagctagctaacgacgtgtatcctccttggaaggattcctatatcgactatgaacgattgaagaagttgttaagggagagcgtcctacacgacgatcccactgccctcgataactggtctgaaagaaatgaatcggaatttgccgaggccctggacaaagaattagagaaagtttatactttccaaatatccaaatacaatgctgtcttgcagaaattggatggtttggaggaaaacaccaaatcatctgaaaaaatcctgaaactaaacactgagcagttcaaaaacactctagaagagtgtttagatgaggctcagaaattggatgattttgatagattgaatttcaccgggttcatcaagattgtgaagaaacacgacaagttgcatccaaactacccctctgtaaagtctcttttacaagttagattgaaagagctgcccttcaataactcagaagagtattctcccctgttgtataggatctcatatctatacgagtttttaagatcgaattatgaccatccaaatacgatgtccaagtcattggcaagcacttccaagttgtctcatttttccactcttgaaaatactaatttcaaaagctacaagttttgggttcacgaagataatctaatggaggtcaaggcaagaatcctaagacatttaccagctttggtgtatgcgtctattccaagcgaaaatgacgactttgtcgacaatttggaatcagacgtcctgatgcaacctgagagaaggttgaatatagacgtgaagaacaatactctttcgagtgatagtaatagcaatgaagacggtgacgaagggaaaatgaaaaactcgattttcccccagtcatatgatccaacaatcaccacactatattttgacaatgaattattcgatttgtataataatagactattgaagatcagtgctgcacctacattaagattgagatggattggtaaactacaggagaaacctgatatctttctggaaaagagaacttccacagaaaacactcaaactggtaattccagcttcgaggaaatcagattgcaaatgaaagccaaattcatcaataatttcattttcaagaacgatccaaactacaagaattatttgattaatcaattgagagagagaggtactcaaaaggaagatctagaaaaattatccaaagatttcgataacattcaaaaattcattgttaatgaaactttgcaaccggtgttaagagctacgtacaatagaaccgccttccaaattcccggggaccagagtattagaatcaccattgattctaacatcatgtatattagagaagattcctttgaaaaagataggcctattaggaatccaaccaattggcaccgtgaagatattgattctaatgtccccaacccgttgaaatttctgagaaaaggagaatattcgaaattcccatattccgttatggaaataaaaattataaacaacgataattctcaagttcagaactatgaatggatcgacgatttgactacttcacatttggttaacgaagtacccaaattctctttatatttgcaaggtgtggcttcattatttggcgaagacgataaatatatcaatatcttaccattttggttgcccgatttggagacagacattagaaaggatccacaacaggcttatgaagaagagaaaaaaactttacaaaaaaagaaaaacatccatgataaacttgacaacatgagaagattgacaaagatctcacactcggatggagggccctttgaacaaagacaaccagagcaaagagaacaggctgctcgccatctcgttgctgatctagaagatcatgaatcatctgatgaagaaggtgcaggattatccaagagatccaaaacgaaaaaggaaaagaaattcaaaacaaatgcagcctttttgaaaattcttgccggaaaaaacataacattaaattcaactgatccttactctgatgatacggatactgcttctgccttccaactacccgcgggagttaaaagaccagttcatttactaaaaaacgctggtcccgtcaaagtggaagcaaaggtttggcttgccaatgaacgtacattcaacagatggttaagcgttaccactttgttaagtgtgttgacattctccattcataactcagttcagaaatctgaattcccgcgattggctgatttgttagcttatatatatttctctttgacattattttgtggaatatgggcttataggacttatttgaaaagattggccctcattaaagatagaagtggtaagcatctggatgctcctgtggggcctattttggttgcagttgtactgatcgtcactctggttgttaactttagcgtagctttcaaggaagcggctagaaagcaaagagaattaataaatgtttcttcacaatctccattgcccagtgccctgaagccaattcaagatttcatttttcacttggtcggagaatag

SEQ ID NO: 2643 - DNA, 1107 bp, Saccharomyces pastorianus
atggatttcacctctgatacgacaaattcacgggacacttcgaattcccatttaagtctgaacgaggttgtgggcccaaaccaaacgggacaggacgcaaacaccgatgacgaagagaagctgcaactatcgctattagatgacgaggagttacgtgctttgagactgcaggaagagaaggaggctctgttgacgagaaggaatactcttttgcaagagattcaatcataccagaatgttttgatgaaggaaaatgctgcaaaacaaccaagcggtgacattttgcagaacgatatcacgcaagattttcttgacttgatctcgatctcgtcctctaagcccaatcatgtggtgaatgaccgcaaaagagtccaaaatatcaatggtctcaccggtttacaaaaggaactgataacgaaatatgacacactacctttattaaatatgaatctacggttaagttatttaagagaccagacgtacccgcatcttcaggtctctgtcaaatctagaaacagggtgaacaatggcgagattgagattttggtggtcaatttcaaattctgcaggaacacaatgaatccatttgaaatccaattcaaaatgttatataattttggagactccaccttgcagaaatgggaaatcttgcgcatctccacaaacatcaagttgaaaaccaagcaattgttggcaacacgcaacttccagaactgcctactaagtctttacgaattcgacaagatgaagtcgaagaaaatcgagattttccaaaacctaatcaatttgttgaagaagaaaaccaaatgttatctagcgaacaacggagactcgttaatcgtcgagagagtgttcagagaaggacggttaacaacgataaaactacagatcaatttcatcatcgtcatgcccagtgggaggggcaaacctccgaattgtttcctgcccatgagtaaaatatccataaacttgtggaaaggtggtgaaagattcaaccagttaaacttggatgagatctgtcacggattaatcatggagtacggggtgaaagccgggttgaaagaagtttgcaacgtttgcttattcccggacatttatgctcggtaa

SEQ ID NO: 2644 - DNA, 3915 bp, Saccharomyces pastorianus
  modified_base (73)..(122): a, c, g, t, unknown, or other
  modified_base (1668)..(1721): a, c, g, t, unknown, or other
atggacttctttaatttgaataacaatacccgcagcaatagtgacaacagcaacaaccataacaacaacaacnnnnnnnnnnnnnnnnnnnnnnnnnnnnnnnnnnnnnnnnnnnnnnnnnncacgaatgctggtgccaatggtgttgaggacttccaaaatttcttcgacccaaaaacttttgaccatagcctggattctaacaacaacaacgcagctgcagctagcacgaactttacctctccagtgccgatggtaaataacactgccttcactgcaaatgctggtaacttcgttcagaaccaatctccccagtttaactcgccatatgagtcgaacaactcaaacctcaatctgaacagcctgtctccgcaggccatcttggcaaggaattccatcatcgatgcttccaatctgcctctgcaaaatcaacagcaactatatagcggcaatagcaacgcccctgctgccaccacaaacgataatgtcataacgcctcattttattacgaatgttcaatccattagccacgcttcttctgtttctaccccgaatgcgaatgcaaatccaaacgcaaacacaaacgcgaacgtaaaccccacccccaacgctaatcaacaatttttaccttttaataatggagcttccaacaccaacgggatggcggctagccaacttatttccaaccacggtactccgaacttgacgggtagatcgtcttctacaggtaatgaccttgtcccaaacccaaacaacaacaatttgagtagcaacggtaataataacagcaacccagcagcaaccccacttccactccccaatggcaacaatagtacaggaaacaacaacaatgctgctgccgccaataacaacaacgccacttcaaacgccaatacggtattctacgaaagagccgccatgtttgcagctttacaacaaaagcaacagcaacgttctcaagctttgcaacaacaacaacaacaacaacaacaacaacaacaacaacaacaacaacagcagcagcagcaacaacaacaacaacaacagcaacagaatcaacagcaaagtgccaaatatttacaaaatcaacgtcaacaacaacaaagatcaatcttacagagtttgaaccccgtattacaagaaaaaatatccacagaattaaataataaacaatacgaactcttcatgaaatctttgattgaaaactgtaaaacaagaaacacgccgttacaatcgattccagaaatcgctaataggaaaattaatcttttctatctttatatgttaattcaaaaattcggtggtgctgaacaagtaacaagaaaccaacaatggtctctagtggctcaaagactacaaatatcggactaccaacaattagaatccatttattttggaatcttattaccttatgaaaaatacatgatttctcaggaaggtatcaaggaaactcaggcgaaaagaattttcttacaacagtttctgcaagaactactaaagaaagttcaacaacagcaacagcaggccacgttaatcaataataatactaatacctcatcggttcctactcccacagcctccacttccgtccccgctgctgccgttcctgttacgtcaaaaacaagcacaccttcagggacagttccggtttctacaaacatccaaaannnnnnnnnnnnnnnnnnnnnnnnnnnnnnnnnnnnnnnnnnnnnnnnnnnnnncacgcaacaacaatccaaaaaaccaagaaaaccaagagtgaagaaaaaaaccaaaaaggaactggaacaagaacgcaaagaaagggaggaatttcaaataaaacagcaaaaacttttggaaaatcaacaaaggcaacaaaaattgttattagaaacgaaattgcgccaacaatatgaacttgaactaaaaaaattgcctaaagtttacaagagatcaatgatcagaaactacaaaccttcagttaaccccatcaaacactataacggctatgacatcaactatatctccaaaataggtgaaaagatagactccaataaaccaatttttcttttcgcgccagaattgggtgccatcaatttacacgctttatcaatgtctttacagtcgaacaatctgggcgaaatcaatactgctttgaacacgttactagtaacaagtgctgactcgaacctaaaaatatctttgatcaaatatccggaattactagacgctttatcaatactcgggttgaatttgttatccaatctgtcacaagatataaacccgtatcatcaaaagaccccagattatcattatcaagatgttgaatctgatcagtactatgttacccaacatgacaaattagtcgacaaaatctttgaaaaggtcagcaacaatggtgtccctacgccaaacgatcctaatgatgaaaaagttttcactatactagtggactctttgacaggaaatcaattacccactccaacccctattgaagcagagtcagaattcgatccagatctccacgtaaacgaactatcgacctcttcttcggtcaaacagtggaatctcttacctgaaccaataagattcctacctaaccaattccctttgaaaatttatagaactccgtatttacactctctgaaaaaaatcaaagatgaaattgatgatccgttctcaaacataaacaaaagaggagcagaggatcccaagattctaatcaatgatcagttatccaccatttcgatgatcctaaggaatgtttcattctcggacaacaactccaggattatgtcaaggaatttttacttgaaaagatttatatcagatttactttggttgatcttcattcatcctgaaaattttgccagcaacaggaaattattgaacttcaagaaagatttgattattgttttgtcaaacatttcccatttgttggaagtcagttcatccatcgattgctttctgattcttattctagcaacaagttttggtcaaccaaaacagaatccaatgacctcgtcttcatcgtttggctcagactctttgactttcaacgagtttcaattgcagtggggtaaatatcaaactttcggtgtagatattttggctaagttgttctcactggagaaaccaaatttgaaccttttcaaatctattttattaaacaacagcgtcatcacatctaacagtaatcataattgcaacagtaataacaaccataaagacagaaaattattacaaagacttttagatctatacaataacaacaacagaaacaataacaacaagcataatctattaaatgatgtggtttcgtttttgttttcggttataccattccagcaattgttatcacaaccatcagacgcaaattcgttaatcgatcaactttccccagtaatttctcaaagtttaactaccgttttagtcatagtgcaaaaagtgttacttctatccaacgaagcattactgattactgaaagcaatacgagtcataatagtaagaacaaagattccagttttacctttcacaaaaatttaccgtttgtttggttaaattccgaagaaaacattgggtctgggttattgaaattaagtaaattaatattggatatcaacaatagtagtaatgccaccgtcaaaaattctttgctacagcaacaaacccaaccaaagatgcttctgccgtcgattaacatatcctgcattcagttaatcaaatttctgattgaaaaaagtattaattttgaaaactgcttaaacaacgaatcgaacatattaaagaaaatagcatcaattccaaatttgtttcccacggatttagaaattttccagttattcactaatccattaattgatattcaagtgataaatcagtatcagttactttacaacttgaaaaaccaaatcctaactaatttgaaatga

SEQ ID NO: 2645 - DNA, 1143 bp, Saccharomyces pastorianus
atgctgttagaaagactgcacaaaagactacacgctagctcttccaagcgatctcaagagaaaaaggacaaggtccacactccggatggagcgccacccgtgcagccagagcctcagcaccagaagcaggaacctcagccgctgctgaactacgattacgatgatatgatcgtgtttgacagaaacgtgtctactcccgtcttcacccctgtgatgactcctgtgaataataccggctcgaaccaaaccaaacactcggcaaactcttacttcccacctttcctcaataataataggactagacagaatagcgcctcttcgttggcgagttccgtgtccgatttccctcaaagttttaagcaacaagccgttttcaacagtaatccgcaagccacttccttcacacctcagtttgtcggtctgctaatagaagtctaccaagatacttgcagtgatcctacgacaactccctttgacactacgaaccccccctcggggattctcaatagggtggccagggcggccatacagcagtctgaggtccagcaattggacatcggctgtgacagaaatagctggcttttaacgttagtaagacatcgcttactacaagaagtgaggaaagacggttacctatctcgtaacacttccctcacttctctaccaccgccaccgccaccccagttcgctgaaatgctaagagtaccctccccattcgttaacgcagatatcgctgatcctattccgctatcgaacataaactctaatccaaacttaaattcaaactttacgaatacgttaaactggtattcctcgcaaaggtctaccaaccccccaatgaaaagcagaaatggctcatcccagtacatatcagaacttcagccgcaaccgttattggctcgcacaaactcaaacagcagcactaataacagcagcatattctctctacttacaccaactccgaccacagattctccattcaattttaacatagccttactatcaaggcaacgcagtaatattatatcgtctcccttggctagcacccgcctgccaaccacaaacgtgacagccgaagacccctctatattgcctaccgattcactaaggctgaaaagagatttactgcgtcttaagagataa

SEQ ID NO: 2646 - DNA, 366 bp, Saccharomyces pastorianus
atgacctgtggcttagtacgaataaggctagctagattcgggaggaagaatagtccggtctataatattgtagtggctaattcacgtaaggcaagagatgctaaaccgatcgaaatactgggaacttatgtacctatacctaatccattgaccaagagagaggtgaagaggggagttgtacccgtgaaagacatcaaactggattttgatagaacaaagtattggattggggtaggtgcgcaacctagtgagacagtaactaaactgttacagaaagccggtatattagatagcgcctggattaatggcaagaatagaaacatggataggaaagttatatttgaaagaatggaaactttagaatga

SEQ ID NO: 2647 - DNA, 3687 bp, Saccharomyces pastorianus
atggatcaagatcaagtagcttttctattagagctagaagataagctggccaagatccggtttcaagcaacctctaaattagaaaatcaaaaacacgttgctataatattaacggccgtcgaggaaaacattgtgggccaagctaccaatgatatttcgaaaaatatcgtgaactatatcatttccttcatgtccttattggaccaagcagtggacccatctactcatgaaattaaagaccttcagctggcttcttcttccacatatcttttggatctgatatttcgttactctccaaaaccgttgttaagatcaaaattctcggaaatacttaccaagattgcaccatgtattaccgctgaaaaagcaaacgctcctttaattagagccgctattggttgtttagaatctcttctaattgctcaagatgctcaagcctggaacaatacctatgacctaaatgtcactccaaagagaggtttgctaggtatacttgaactttctttggatttgagaccaaaagttagaaagagagcactagatgcggttcatgcagtattatctaatcctcctgcggctccaactgcagagcatgtcgcggctgttttcgtcgctgatttttgtgacaaacagttggcaggtgttctagacgacctgtccaatctatctaataaacaacaaaaggcccaaaatacaaaggaggatatcaacgctagtgtcatgcgttcattgagattagtcacttctgttatctctaccggacaatggccatcctctcaaatcgaacccctttgtgatgtattattaggtgtcactagaagctcagaacagtacctagtctctgcgtcatttgaatgttttgaaagtatgttcaaagctatggcagaaaccaccgtttcttcaggtttagctgaaaacaagtatctgagggttctagataccatcttttcactgaaaccttcaaatgtggacagtctactgaccaaggcttggatcgctgttgtagtcaaaggtatgtctacgtatgcggttcaccaaccattgaaagccttacgtaaggttcctaatgtgtttcgtgttatgtcctcttatttagcaagtgaatctacagaagtatatcaagctgccactcaatgccttatctcaatcctttctgactctattcaagaccatttgttattgtttacaccagatgtagatgacaaggttttcaaaaatgtcgatgacattatatgccaaatttcaaaagcctttatcgacttcttatccattaaatattctcattgttccagagaaattctgaaggtgttggcagcagcctttaacaaattcagatatagatctaaccctcactttttgaaatccttgaaaattgttgatacctggagagtaaacgaagaacagtttatggacttgagaaatgaagttgaattagtaattggtgcctccatttccgctatgggccctgaagttgtccttgcccaagcgccactcaatttggacaacccatccaatgaaagacctggtagagcttggatgttgccacttattagagactataccaaaaatgccaagctctctactttccaaaatgagctggcaccatacatcaaaagttttcaatctaaattcgataaagttccagaagaatctattcaactgaaagttttccaaaccattgtcgatcaaatctggtccacattaccacgtttctgtgagttaccaatggacttgagagaatctttcacagacgactttgcatcagaactatcttcgctgctgtacagtgaagttgaattaagaactacattatgtcatgctcttaaggttttggcagaaagtaatgtcttgtattcagaaggttccctttctgatgatgtcttattgatacaacacttccctatttctgaagcccaaaagaatatagaatacctgtcaaccaaatcgaccaaccttttagcggtcttgtttaatgtttatactcaaaccactccaaacgcaagaagttatattctggaaacgattgatcaatatttgaaaatcacttcaaaagaagatatagaaaagacctttaataatatttgtggtcttttgaagaattctatgaatgaagaaagtagtggaaatggcaacaaagaaaagaaaaaaccccaattgacagccacattattagatttgatcatttgtatgacaacatacttacctgcctcctcttattccgctttattttctatattcggtcttactgtgagttctcccgatgcattaattcaaaagagagcttatagaatcattaccaagctttctgagtttgaatctggttcagcagctgtcgcccagtttatttctgatattgaaaatgttatggtagacaacactactactgttcaaacatcagctaaagctgcgagattggcagcaatcaagactatagtggatttgttacctttggatcatctcggttttattgttagaactgtagccgaggtcatcttaagcactaaggatgtgaacgaaaaatccagagaaacggcttttgacactttgattaatatgggtaaaaaaatgaatgagccaaatggtatcatcaagctatcccaagtacctgggtatgaccctactactccggatcaaccatcatcagtgtcagagttttttaagattatttctgctggtcttattggggaatctcaacatatggttagtagctcgattactggttacgcatgtttagtttttgaattcaaaaatgaaatggattctggtattctaatggacatttacgataccattgaactgtacctgacttccaattccagagaaattgtaaagagtgccatagggttcacaaaggtctgtgtcttgggtcttccagaagaagtgatgaggccaaaggtgccagaattgctattaaagttgttgagatggtcccatgaacatacaggtcacttcaaagccaaggtcaagcatattattgaaagattgataagaagatttggatatgactatattgaagccagcttccctgaggaagacagaaaattattaacaaacataagaaagacgcgtaatagaaacaagcgtaaagatgaggaggttgctcccgcaactgaagctaacgctggaaacaccacaaagggttcaagatttatgtctgcttttgacgaagctgtttatggatctgacaatgaaaatggtaacgagtcagaccaagaggaaaatgcagctggaggcagaagaaagaatgggcaaaagcaatttattgtggaatctggtgaaaatccactggatttgttagattctcaaacattagcacatatttcatctactagaccaaagaaattcaataagaatcaaaataagggtaggtttgaagatgacaccttcaatttcgactcagaaggtaaattggtcgtcaagggacaagctaaaccctctacgaatgctgatgatccactaagcgcagtcacaagcggtatcaatgcgtacctagaagccgtaaagagcggtccagtaagaggtcaaagaaacaaattgaagtttaaaaagaatggaagagattctgacgagttcggtgatgacggtgaaaaggatgataaggtaatgagaagaaaagtagatccaagaaacaagatcggtaaaggtggtaaaagaggccctaaatttaaatccaggaagaagttatag

SEQ ID NO: 2648 - DNA, 570 bp, Saccharomyces pastorianus
atgtcttctttatcgctatataccgttcaggctgttttaatactggatcagcaaggagaaagaatttatgcaaaatattaccaacctcctcatagatccgatgacggacatcaattgctctttcattccgtaaagaaacaaaaggagtttgagaaacaattgcaccgcaaaacccacaagcaggattcggaaattttgatcttcgaagaccgtctggtcctttacaaagaatacattgacgtcacgatctatttagttgcttcgctagaagagaacgaaatagttctgcagcaagggttttcagcgatcaaaggatcactggatttgattctaaattcaggtctagacaaaaaaaatatccaagaaaactacgacatggttttactagccattgacgaaaccattgataacggcgttatcctggaaacagactcaaacaccattgcatccagagtttctaaaccacccacaaatgaacctcaaatgtcattggatttggataaggggttcttaggtgcctggggttttgcaaagagcaagtttcaagaaaggttgcaacaaggcttataa

SEQ ID NO: 2649 - DNA, 1821 bp, Saccharomyces pastorianus
atgaatacattaaggtgtttaacacatgcgctatcgaaaagtggaagagaagctccaatactatatcaaaaggtactattcccagatttgttcaaagagaataagcccgttgcagatgttaaaaaggggaaccaagggaaaatcattaattctaaattggtgtcacgagatgaaggagtaaggaagatgtcaaagtcaggtttcaagtttgaaagggagcaggccagggagtacctttcaaatctcccgactttgacactttccagaaaggaaattagggacgactacaacgagcaccgtgcaaaacaaatgtatgtaatctctaaacaaacaaaatcatcgaacaagcttcagaaacttctaacagcaaagtctcaagaatatacgagagaaatgctggcattactgataggctgtacatcaggcgaagtgagttcacggcctgaacgttttactcgtaagtttctcaaattcagcaaccaggaagtccctcctctccctgatttttcaaagaatcctcagttattcgaaaactatattggaatattaactcatacagagtttcattttcgctcatcttcaaaactaaatggcattgtacgaaaattattgcgacacttacttcatccaaccaaccatactactctaccattacgttccgtccaagtctacaacgacgtgatatacttttttagcgaacacttcgattttgcaacttgtagagagatattcgcacaaatgaaggccgaaggtgcaaaaccaaacacagtcactttcaatattttattgcgaagtataatcaaaaactcacatatcagaaaaaccaaacttcctgacgaggaagtgctgttttatctgaaaaatatgcgagaccacggagtctctgcagatattataacttggacgacgtgctataattttcttcgcgatgaaatttcgaggcaattgtatattgtacaaatgggtgagcatttaggaaatttcaacacaaattttgtctacactgtgctgagaaatggtgattataaagctgaagattgtttgaaagtcttagcaacaaattcgttacccatttcgcgaaatattttttacttatgcatagaaagattattgagcgaggaacagctcaaagccgcgtccaaattacttaattatggctatcaacacttagggaataattttagattaacttcggaagtagttaaccattttatgcgcatattcgccaataagggaaggagtgacttggcgtttctctgttataatacctgttgtaaggtttacaaaattaaaccagattccgaaacatttgaaatgctattcaaagctttagtgagaaacggtaacacgaaaaacttcggtacggttctccggtatattaaagggttaaaggctgctgaaggattcgttctgcgtacaacttattggagtctcaaagcggaatcaatgttcaagattagtagcgctacgcctccgtcagaaagttcactcgaaaaagcaagcaaattgctgggcagtctagtctcttccccaggtggattttcatggaaagtttggaaggaaagcgattctacacaaaagaaaatattccggtttttaggttgtatccccacaactctacgccccacaagtatggtgcagtgccacaataagcccttgggtttaccttcggagctctcccacagaaaaagagagtaccgaaaccgggtcaaagcgatagcaacaagggctgcatttgagaagagattggcatacgtcgaagacaatgaatcagccttcaagaatgagctacttgaaagaaggatattaaaagaggtttga

SEQ ID NO: 2650 - DNA, 1041 bp, Saccharomyces pastorianus
atgcacagaacctactctttaagaaaccaaagagccccaacggctgctgagctccaagctccacctccaccaccatcatccaccaagtccaaatttttcggtaaggcctcaattgcctctagtttcagaaaaaacgcggcaggtaattttggtccagagttggcaagaaagttgtctcaattggttaagactgaaaagggagtcttgagggctatggaagttgtctccagcgagcgtcgtgaagccgctaggcagttgtccctgtggggagctgacaacgatgacgatgtttccgatgtcaccgacaagctgggtgtcttaatatatgaattgggtgaattgcaagaccaatttattgataaatatgatcaatacagagtgactttgaaatcaatcagaaacattgaggcatctgtccaaccttcgagagatcgtaaggataagattaccgatgaaatagctcacttgaagtacaaggatcctcagtcaaccaaaattccagtcttggaacaggaattggttcgtgctgaagcagaatctttagtcgctgaagctcaattatctaacatcacacgtgaaaagttaaaggctgcttatagttatatgtttgactctttgagagaactgtctgaaaaatttgctttgattgctggatacgggaaggctctactagaattgctagacgattctccggtcacaccaggtgaagctagaccagcttatgacggctacgaagcatctcgtcaaatcatcatggatgctgaagcagctttagaatcttggaccctagaaatggctgcagttaagccaactctatcgttccatcaaactgttgatgatgtgtatgaggacgaggatgaagaagaagaagaagaagaagaagaagtagaagtagaagacggagaaagtcaaaatggtgctcttcctgggcaagtggttgaagaggaagaggtcgaatggaccactgaagtccctgccgaaaatggggccgaacatcaggggactcaaaacagtcatactaccggttctgaaaacatctaa

SEQ ID NO: 2651 - DNA, 1389 bp, Saccharomyces pastorianus
atggagagatatgacagacaggtgagactctgggggccatcgggccaagataatttgaatcaagcccgtgtgtgcgtgctaggacctgctacagctttgttgcaggaagtctccaagaatctggtgcttgctgggatatcctccctaacttggctcaaagaaaagagtgcggttcaacctggcccgctgtttttagccaagctcaaaagagaccttgagcctttgacttccaaacagctggaatatgaggaaaaggggctcgaagagatcttaatgcattctcactacgactggtcccaattttcggtgataatcttgacttgtattggtaagcaaacgactctggttgatttaaatgaagtcagagggagaatcgggacaaaatttcctcctgtactgaatacttctgtctctgggttttatgggtatatgaatctggttttgtcagaaccacattttgttttacagtcacatccagataataaaaaatatgatttacggttacagcaaccatggcctgaactaatcgactatgtaaatacatttgatctaagtaaaatggacgttgtagccttctctggtataccttacatcattctgcttattaagtgcatcgctatactccaaaaggacggtagtacgaaagagataacggctggtcgggtgagggaggctttagaccaagtttgcctctccgtaggagaaaacgctctttgcgaatcgaattatgtagaagctagacgctatgcatacttggcttgctctcaagacggttctccaaaggaacaagacgacttgctccgaactgtggaaacaccaaatgatgcgcatgattggcatgatgtctacaactatgaagttctaacattactattggtgttaaaaaacatgtccaggggaaacaagaactctacctttcaacctttaacgagcgctctcccggatatggaatctacgacgggaaactacatcaaactcaaaacactgtatgaagcaaaagctgagcttgacaagtcccgcatacagcaaagtttaatattcagtagaaaaacggtttcgaaagatgtcctaaacgcgttttgctctcactccggagagatcaagatagtactaccgccgaaaggagatctactaggtattttcaatacttcgcattctcttttaagcgcattattgacggtacagttccaaggggaatttatagctacggtagcgttagaggatgagttcaaaggtttacaacttgattgtaactacccagttatggcattttttggaggtgcagtagcccaagaagccattaagctcataacacaccactacgttcctactgatgatttatttctatataacggtataaacaattcttctgtgatgtataaaatataa

SEQ ID NO: 2652 - DNA, 702 bp, Saccharomyces pastorianus
atgaaacagtttgggttagcagcattcgatcaattaaaggatggaaagtacaataatgtgaataaaaccatactagaaaagcaatcaatcgaattaaaggatcagttaaacgtcttccaagaacggctcgtagaatttgcaaaaaaacataataatgagctccaagcgtctccagaatttcgctcaaagtttatgcatatgtgctcatcaattggaattgacccattatctttgtttgatcgagataaacatttatttacagttaatgacttctactatgaaatatgtctaaaagttatagaaatctgtcggcaaactaaagatatgaatggaggcgtcatttcctatgaagaactggaaaaagtgcattttcgaaagctgaaagtaggaattgatgatttggagaagtctatcgatatgctgaaaagcctagaatgttttgagatatttcaaattcgtgggaagaaatttttgcgtagcgttccaaatgagcttacgtctgatcaaactaagatcttggagatctgctctattttaggttactcgagtatttccttgttgagagcaaatttggaatgggaagccgtgaggagcaaatcagctctagatgagatggtcgccaacggtttactgtggatagattaccaaggtggtgtagaggcattatattgggacccctcctggattaccaagcaactgtga

SEQ ID NO: 2653 - DNA, 2127 bp, Saccharomyces pastorianus
atggcttcgaatacttcattattagggcgtagaagaacatcatactcctctaccaacccaacaagagtgaaaaagtcggttgaccagcatgaaattctttttgataatgttgactacaataatgataacctcgatgataacaataggatatttgaaaccgtaccttattacttaccatgcttctcgtggcttccggaatatactttcaataaactatggggagatatcattgcaggtatctccctagcatcatttcagatacccctggcactatcgtacacaacttcgatagcacatgtcccgccattatgtggactatattccctggctattagtccgtttgtgtatggtatcttgggttcagttccccaaatgatcgttggcccggaaagtgcaatttcactggttgtaggacaagcagttgaatctataacactacataaagacaatgtatcactaattgacatttcaatagttattacatttgttagtggtgcaattttactcttttctggcatttccagatttggttttttaggaaatgttcttagtaaagcattactacgaggtttcataagttccgtaggactggttatgataatcaactctttagtttctgagctgaagctagacaaatttttaatgagcttgccccaacattatcatacacctttcgagaaggtacttttccttattgattacgcaccagcgcaataccacaaaccaacggcgatattcagtggatgctgcttcattattctcattgtcatgcgtgtattaaagaggaaattgatgaaacgccacaagggtgcagtattctttccagatatactattggtggtaattgctacaattctcatttccatgaaatggaacttaaagcagaggtatggtatatctatcgtcggcgattttagtatggataacctggataaattaaaaaatcctttgactcactccagacgtaagctaatgccagaattatttagtgcatccttgattgtagcgatgttaggttttttcgaatctactactgcatccaaatctctaggaacaacctacaacctaaccgtttcctccaacagagaactggtcgctttagggtgtataaatatgttcatctcgttatttggtgctcttccctcatttggtggatatgggagatccaaaatcaacgctctgtcaggagcacaaagcgttatgtccggagtctttgtgggtattatcacccttgtcacaatgaacctattgcttcaattcgtgcattatatacccaactgcgttttatctgttattacaactgtgattgggataagtttattagaggaagtgcctggtgatataaaattccatttacattgcggtggctatagtgaattattcgttttcgctgttacgtttggcattacaatattttattcaatcgaatcgggaatatgtataggatgtgtttattctattttgaatataataaagcactcagcaaaatcaaggattcaaatcctggctaggatagcaggaacatcgaaatttacaaaccttgacgattatttaaggaccacaaaaaagaacccactagcagttgagggcagaatcgaagagattgaaggatgtatgattgttagaattccagagcctttgacttttaccaacagcgaagatttaaaacagagacttgataggatagagagatttggttcatctaaaatacaccctggaagaaagtcatttcgatcgaaggactccataaaatatgttatttttgacctaggcggaatgacttcaatagactcctcagccgcccaggtactagatgaaatcatttcctgttacaagaggcgtgacgttttcatttaccttgctaatgtatcgattaatgataagatacggacgcgattgttgaaagcaggcgtaacacctaatgtggaaagggtacaaacaaatgccaatgaaggcaatactagaagtgcatgcgatgatatgcaagagtcatattctccttacttcgacagtattgatgcggctctttatgaggttgaaaaaatgaaaattaaaggaaataatattcaaagcaatgattcggaaagttttatgtctaatactcttttcaactctagtctggtgtag

SEQ ID NO: 2654 - DNA, 2043 bp, Saccharomyces pastorianus
atggcacctctttcgttgaacttcaaagacgataagaaatacaagggcctcacaacggtgtggttactttctacattgggaaattcgattgtgagagaaaataacagcctttattcgaacaaaagcgactcctctgcaaacatttcagcgtctactgttaagaaaaaggatatcgttaatatttccataccaaagacatgtgacgagattcaaaattttgaaaacgatctatcactcagatatatttccaacctcctttatggggtaaccatatgctacaataaaaaaacagagtatgtgttaaatgatctgaatatcctgcttgtccaattacaaaaaaatgaggcgtatgcctttaaggcaaaaaataaatctaccaaaataagtgggctgaataacaacaacagcattattgggagcaaaattaataattatgcttgggaagaaggtctcttttttgatgatgaccccttgtatgatattgctaaagttcccgcattggattttcttgataccactctgcaaaacaacgtatcctttgttgaagaagctaaatcaataagaagacaagactatataaacgaattaagcaattctaacaggtttgaactccatacagacaaaactaattcagacgggcaacgcaaactagggtctaactataaaaattcattttctctggacgagattcctattgatgtggattttaacttagacttggaggatatagtgagtcaccaagggacacccctgggttctcattcaagttcccagaaggaaggtaatgattttaagtttaattatgaaggcgatgagttagtgctaaattttgacaatgatgagaacaatgccaacgaaaatgaacaaacgccaattgaaaacgaaagaaccgtagctaacctcaaaaactacgaactgggtttagaagagcacgaatctgaagatgaaaacaacaacgaaaaaaatgaagcggacattaaagtacaagtgaggcaacgtgccgggaacgtcagctcattgtccaaagtacaatttgatgcgaaaacaagttacccaaatgaaattctcaaatttaaccatgggaattacagtaacttaatggaacaaactaaaaaaagaaaatcgagcgcccaaattacatcccattctaatataactagtttgctaagatcaaacggagaatctgaccttacttcttcaaattggataaatctctttaacgatttttctggtttgaagattggagagttagattcgaatggtcaagattttgccacaatcgagaggggaagaaaaagagcacattctttagtgtcaactcaaagttcgaatagtgtcagaagcaatgagtatggcaggaaaagtttccggaataataagaacgacaattattcttctgatttggagaacgataacatgctattgaatctagaacaaatcaatgaagacctagaagatcgacactacattgaagaaaactctcaagaaaatgtcttagatttcaacttgaacttacctccttcgagttttggaagaagccatacaagaaactcaaccagatctagtggtttcaacgacgacatagttggtgcacttaggcgaagaattgtaccctctgagcagaattttgccgaggaaagcgattccagcgacaaatatcactccgacagcactcagcagaatccacatcacggggagagaaactttcaagatgtaatcctggattatcaaacaaggaagttttatgattatattaaagagaggtcggttgccatcggtagaacaacacattcgaatccaccattcgggaaaaaagtgctattggttgacatcattccaagccgcatgggcgaaacccaacccggatccaactctgataattcggaaaaaggcgtgagcaggcaaatagccgccagcgccttcctatccttgctgaacctagctacaaaaggaatggtcaaattggatgagtatccggcttcggaaacggctgttgaagagtttaagctgagaagagaagacgaaattatcatatatgcctga

SEQ ID NO: 2655 - DNA, 2163 bp, Saccharomyces pastorianus
  modified_base (1041)..(1041): a, c, g, t, unknown, or other
  modified_base (1100)..(1159): a, c, g, t, unknown, or other
atggtcttgataaatggcataaagtacgcctgcgagagatgcataagaggccacagagtaaccacatgcaaccacacagaccaaccgcttatgatgatcaagccaaaaggtagaccttctaccacttgcgatttctgcaaacaacttcgaaaaaacaagaatgcaaatcctgaaggcgtttgtacatgtggccgattggagaagaaaaaactagcacagaaggctaaagaagaagcaagagctaaatcaaaagaaaagcaaaggaaacagtgtacttgcggaaccgaagaaccttgcaaatatcatgcccaaaagagacattcaagaaaatctgcatcaaaccctcaaaagaaaggaaggtccatttcacgttcacagccaatgtttgaaagagtcttatcttctacttcacttgatagcaacatgctatccggccatggggggctatcagatacttccagcatattgacaagcacatttttagacagtgaaccaggtgtgggcaaaatctcaaaagactatcatcacgttccttccttggcttccatttcgtcattacaatcttctcaatccttagatcagaactttagtgtgccacaaagccctccgttatctacaatgtcattcaattttctaacgggaaatattaatgatactaaccaaaatcacaacagtcatcagcattccaatttaaccagcagctggcaagacagctcggcaagcttaccagcgaaaactgattcgcgtttcaatttgatggataaaaatcatataaatcactctgcgggccttgatctattgggccattctaagcgaatatctcccatatcgaacactcgtgtaggcgaggttagcgtcccactagaagaatatatcccctcagatattgatggggtcggaaaagttactgataagagctctttagtctatgattggccctttgatgaaagcatggagagaaattttagtacaactgcaactgcagcgacggattcaagtaagcttggcataaatgaccatactagtaacactaataatatnttttatgcgcataataacaacttgattgataacactatcaacaatggccactgtatcgnnnnnnnnnnnnnnnnnnnnnnnnnnnnnnnnnnnnnnnnnnnnnnnnnnnnnnnnnnnnacattgacggtaacaataagaataacaataacaacattcctaaacaagaacaccaaagtaatggtctattcgatatgtttaccgattcttcatcaatttcaacactatctcgagcaaatttactcttacaagaaaaaataggttcgcaggaaagcccaagaaaagtagaacactattcaaaggtcccacaattccgtcaccagttgaactccagaagtaaatcattcattcataaccctggaaacgagtatttgaaaaccggctttggcaatacaagtaacaatgacatcggaaaaggcgttgaagtactgtcactgacgccaagctttatggacatccctgagaaagaaagagatagggaaagggaaagggaaagatcaccatcatcaaattatatcactgatatgccttttactcgaaaacctaggtcgtccagcattgatgtaaaccataggtacccacccatgggacctgtgaacatagcaacctctcctagtgcgttaaacaatgcggtaacaagtaatcttgatgatcaactcagtctaacctctcttaattcgcagccatcatcaattgcaaatatgatgatagatccttcaaacctggtcgaacagagttccgttcattcaatccctcaaccaatcaactctccaagaatgtctaagaccggaaatcgtcaagaaaaaagtctccaaatgaaaaaggaagaaagaaacccactaaattgcatacaggatttttcgcaactggatagttcgtcaagcgacatgaatcaaatgttttctcctccactgaaaagtgtgaacagaccacccaccatgagggaaaattcgtccagtagtaattttatatttcaaggaaatagcattatttctacgccttctgcaaggaacgaccttccggatacttccccaatgagtagtattcaaacagcatctccaccaagccaattacttaccgatcaagggttcgcagacttggataactttatgtcttcgttatga

SEQ ID NO: 2656 - DNA, 807 bp, Saccharomyces pastorianus
atgaggccaaatatccgaacttgtgatgtaattaataacaaagacgaatcactacctgcacttttattaccggccctgagaagttatacatgtggcgacttactgcaaaaagaacagatttcgactaatgtcaactatcatctgttcgattcatcagaccgttcgttactcccaaaatattctaaattacatcaagatcaaagttcggttccagtttcatcggttcaatacttcgatcacagttttaataaatggcaaaaagaattagaaaataccaagcttcccaaacttggttgcttaacagattgcaaggaattgtacaaaactatttcttccggtgaaacgaccgattcagctgctatttcatcaataacgaccaacagtctgaaaaggaaacgccaaagagacggtccaagttgcgattcatgtaggacaaaaaaaataaaatgcaatgcaacgattattgtctttttacaagatagagaccttatatcatcaatctcttcaagcttgcattacactctttcccaagaggatattgaaaggtttcgagctaagtttttcaaaaaactgcctgagttgatgaattcttacgaggtcatcaaacatctggataagatagtgcttttcaagccctgtacttcttgcagcaggaaaagcaaaaaaaatgggaattgtacattttcaagaggatttacaaaatctgatatgaacgtcttttctaaaataaatagtaaacttgagagaaaaaatatctttgagatgactgtcgctgattatatagccgctggcttccaaaccctttag

SEQ ID NO: 2657 - DNA, 981 bp, Saccharomyces pastorianus
atgtcggaagtactggccgtcttcgaacagccgaactcaattaagaattttctcaagagagattcaaatattgcatttctagctggtggtgtggctggtgcagtttcccgaaccgttgtttcgccttttgaaagggtaaaaatattgttgcaagttcagagttccacgaattcgtataatcaaggtatattccagtccatacgacaagtttatcgtgaagagggaactaaaggtcttttcagaggaaacggtttgaattgtataagaatctttccttatagtgcagtccaatttgtagtttatgaggcctgtaaaaagaaactgtttcatgtagatggttatgatagacaagagcaactcacaaatactcagagactatttagtggtgcattatgtggtggttgtagtgtggtagccacttatccgttggacttgatcaaaacaagactaacaatccaaacagcaaatttaagtactctgaaccggtcgaaggcaaagaacatagcaaagcctccagggatttggaaattgctgaccgaagcttacaaatcagaaggcggcctcaagggattatataggggtgtctggccaacaagtcttggagttgttccatatgtggccttaaactttgcagtttatgaacagttaagagaaataggtatcgatagttcagactcacgacctccctggaagagtaacctttacaaactaacaatgggtgccgtaagtggcggtgttgcgcaaacaatgacttacccttttgatctgctgagaagacgattccaagttcttgcgatgggtggaaatgaactgggattcaaatattcgagtgtctgggatgcgctggtgacaattggtaaaacagaaggtttcagtggttactacaagggtcttactgcaaatcttttcaaagttgtcccttccactgctgtaagttggctagtttacgaaattgtgtgtgactcgatgagaaattggtaa

SEQ ID NO: 2658 - DNA, 954 bp, Saccharomyces pastorianus
atgaattttccgctttcaaggcaaagttcagagaggcggacaacatatacagacaaatcagaatctcctaatatcggaatgtgtacgatcaactataaatcaaaccttcccctacaagtgcaaacagctgaacatctaacccctagtataaataatcaattgtacggccaaaatagctacaaaaacgaacaagaatgttacaacaatgctaaaataaacttaccgccaatttcgtctcttttacccaattttgaaagtggctcacgtgccaatgccgacacaaggcttcagctccctccacagcaggtctaccatggtatgaatatagtgcctatggttaacgaggtttacacgccgatttctatgaatgtaacacctgatcaatatcctatatatttttctgataaccagcaacaaataccacataaccaaccggctcatataacgtcatcagctccccttatgatgccagtcatcgtaccaactctctataagccgatgggaccatatgaaaaagagccgataacagtagctcctgaaccaaattttgctgcattatcaatggttgctccctcgaataccactatagatgtatgtcagagtaggccaaaatcagtcccgcctaaatacagcataatcccaggtatacatgaggacggtaatagtagaactaaaagcgaacctggtacttcttcaaattcttcagcagcattctccgattggaaaaacggtagtcgaataacatctgcaaaactaagaaagcagtgccctgtatgtggcaaaatttgctcgaggccctcaacgttaaagacacattatttaatacatacaggggatacccctttcaagtgcacttgggaaggttgctcaaaatcttttaatgtaaagagtaatatgctgagacatttgaagagccacgaaaggaaaagaaacaaggtcttaaacacaacttaa

SEQ ID NO: 2659 - DNA, 744 bp, Saccharomyces pastorianus
atgtggaaaacaaaaacactagaacccatgctttgtagccctgtaaaacgctcttcgcctaacatagggacaccatatgcccaatcttcgaagagagtctcagatacggttaaagaggatgtgcatcttcctccctgttcgtcgatcatgcgcgcctcaattacttctgaagtaaatcaggctcaattaccacccccagcctaccattacgctccctctcctctgcaccagacagaagaccctgtttggagatcgggttccaactctgttattttctcgccagttgtagcatcaccacagccttttcccttaacgttcattgaacgccaatcttactgctctgtttattcaacagcaacacctccatatagtccccagtctgtgaccccacctatgcaacattttcaaaatgaaagtcgtaggtcggcgagcgatggacaatactctctcacgaatgttcatacggggcaaaatcctgggacactgctatcccaaacacaaacagacttggatcttatacaaaagcaattacgtgccgtggtgaagctacggaagcaatgtcctatctgtgggaaggtttgttcaaggccttcgacgttaagaacgcattatttaatacatacaggagatacacccttcaaatgcacttgggaacactgtaataaatctttcaatgttaaaagcaacatgttaaggcacttgaggacacaccaaaagaaaatagcaaagaaaaaacatcagtga

SEQ ID NO: 2660 - DNA, 738 bp, Saccharomyces pastorianus
atggcttccagaactcaatttgaaaattctaatgaaatcggtgtcttctccaagttgactaacacctactgtctagtagctgtcggtggttccgaaaacttctactctgcatttgaagctgaattgggagacgctattcctatcgttcacaccaccattgctggtacccgtatcatcggtagaatgaccgctggtaaccgtagaggtttgctggttcccacacaaaccacagatcaagaattacaacatctaagaaactgtttgccagattcagttaagatccaaagagtagaggaaagactatctgccttgggtaacgtcatctgttgcaatgactacgttgccttagtacatccagacatcgacagggaaactgaagaattgataagtgatgtgttaggtgtggaagtcttccgtcaaaccatatcaggtaacattctagtcgggtcatattgttctttgagtaatcaaggtgggttagtgcatccacaaacaagcgttcaagatcaagaagaattgtcctctttactacaagtgcctttggtggctggtaccgttaaccgcggtagtgctgttgtcggtgccggtatggtcgtcaacgactatttggccgtcacaggtctagataccacagccccagaattgagtgttattgaaagtatcttccgtttgcaagatgctcaaccagaatccatttcaggtaatctacgtgatactttgattgaaacctactcatag

SEQ ID NO: 2661 - DNA, 432 bp, Saccharomyces pastorianus
atgagcagggccacgtgtttgtttgacggctgtcacagcgccgtcatcgtgattgatgaagacaatatagtgagtttgccggaaggggcgtatagtcaatttaagctgctggaaaacagagcggaggggtacgcgcccactagcgacaacaattttttggttgtccctgatgtatgggacttcgacaacattggcgtatctagagacattccctcttctctcttgggggacctaggcgataaggacgagttcacctttgattacggagattccagctggaaaatcaagaagtgtctaaagtacttaatatgcgcagactgtgacaagggccctattggtcttatatgccaggtacaagaccaagacaacgacgaagaaaaagtgatccatttactgagcctgcgcagtcttcaggtcgtgggaaaaaactag

SEQ ID NO: 2662 - DNA, 2802 bp, Saccharomyces pastorianus
atgtctcaacaacctagctcgccagtgagagaggacagcaattccagttccccaatgattccaaatcccgattcagttccaccacagccttcttctccagccttgttttatagctcatcatcatcacaagctgatacctatggtcgcaacaatagccagaaccaaagtcaaggggacggtaacattagagctgctataggttcttcaccactaaactttccatcctcttcccaacgacaaacctccgatatcttcctatctcagagaagacagggcagaaatggctcttccgctaatacccctggaagatcgagataccatactgatttgagaagtgatagagcgttacctagttcttcatcttcgttaggcggtaatagtcagaaccgtctacacatgagaagaaatgatattcatacatccgatctatcttctccacggagaattgttgattttgacgctagatctggtgccaataccatggcgtcttcgtcttcttctgctcctccatccgaaatcagtgaaccgttgagaataatttggggtactaacgtcagcattcaggagtgtacaaccaactttcgtaattttttgatgtcttttaaatataagtttcgtaaagttttggatgaaagggaagatttcattaacagcaccaccgacgaggatctatactacatcaaacaacttaatgaaatgagagaacttggtacctctaatttaaacttagatgcaagaaacctactcgcttacaagcaaacagaagagctatatcatcagttactaaattaccctcaagaagttatttccattatggatcaaacaataaaggattgcatggtttctttggtagtggacaaccatttagactatgatctggatgaaattgaaactaaattttataaagtgagaccttataatgtaggttcctgtaaaggtatgcgagaacttaatccaaacgatatagataaactaataaatttgaaaggccttgttctaagatcaactccagtcatccccgatatgaaagtagcgtttttcaaatgtaatgtttgcgaccacacaatggctgtggaaattgacagaggtgttatccaagaacctgctagatgtgaacgtattgattgtaacgagcctaattccatgtcattgatacataacaggtgttcatttgcagataaacaagtcatcaaactacaggaaacaccagattttgtcccagatgggcagacacctcactctatttcattatgtgtgtacgatgagttagtcgattcttgtagagcgggtgatcgtatcgaggtaaccggtacatttagatctattcctattagagccaattctagacaacgtgtcttaaaatcgttgtacaaaacatatgtcgatgtggttcacgtaaaaaaagtctcagataaaaggttagacgtcgacacttccaccattgagcaagaactaatgcaaaacaagctagatcataatgaagttgaagaagtaaggcgaattactgaccacgacctggcgaaaattcgtgaagtcgcatctagagaaaacttgtatagtttgttggcacgctctattgctccgagtatttatgaactagaagatgtcaagaaaggtattcttcttcaactttttggcggtacgaataagacttttacgaagggtggtcgttatagaggtgatataaatattttgctttgcggggatccatctacttccaaatcacaaattttgcaatatgttcacaaaattactcctcgtggtgtgtatacttcggggaaagggtcatctgctgttggtttaactgcttacataacaagggatgttgatacgaaacagcttgttttagaaagtggtgcgttagtactgtctgatggtggtgtgtgttgtattgatgaatttgataagatgagtgactctacaagatctgttttacatgaagttatggaacaacaaactatttctatcgcgaaagcagggattatcacaacgttgaacgccagaagttccattctggctagtgctaacccaatcggttcacgttacaatccaaacttacctgtgacacaaaacattgacttacctcctccattactttcgagatttgatctggtttatctggttctggacaaagttgatgaaaaaaatgacagagagctagccaagcacttaacaaatctttatttagaagataaacccgaacatgtgtctcaagatgatgtcctaccagttgaatttttaacgatgtatattagttatgcaaaggagcacataaacccagtgatcaccgaagccgccaaaacagagcttgttcgagcatatgtagggatgaggaaaatgggtgatgactcgagatctgatgagaaaagaatcacagctacaacaagacaattagagagtatgattcgtttagctgaagcacatgctaagatgaaattaaaaagcgctgtagaattggaagatgttcaagaggctgtgagattaatcagatctgctatcaaagattatgcgacagatccaaagactggtaaaatcgacatgaatttagttcagacaggtaaatctgtggttcaaagaaaattgcaggaagatttatcaagggaaatcgtaaacgttttgaaagatcaggtatctgactcaatgtcattcaatgagcttatcaagcaaataaatgagcactcgcaagatagggttgactcttctgatatccaagaggccttgtcgaggttgcaacaagaagataaggttattgttcttggcgaaggtgtaaggagatctgttcgcttaaacaaccgtgtctga

SEQ ID NO: 2663 - DNA, 348 bp, Saccharomyces pastorianus
atgctaggcagaattcaaaattacacaagtggattagtttctaaagcaaatcttttatcaacaaaggctttgtactatggtaaagttggtgccgagatttcaaaacagatttatgtaaaggaaggtctccaaccaccaactgcggcccaattcaaatcagtatatctaaatctctacaaacagagccttaactttgtgttgaagcctacggaagttttatcgtttttgaaaaacattcaaaagaacgaattattaaaatatggtgcatacggtgttcaaatagtggggttttattcagtaggtgaagtaattggaaggagaaagttggtaggctataagcatcattag

SEQ ID NO: 2664 - DNA, 3660 bp, Saccharomyces pastorianus
atgcatagtaaagaatttgctaatagaatcaagaaaagggaaaacgagaatgacttatcaccgaattcaagctcgtcttcatccgctgacagattcaggtgtccacatcctgagtgcaacaaaaccttttcacgacaagagcatctgtcaagacataaactgaatcactggccgaaagaaatatacgtctgttctttcgtacttcctaccacaaattcgccttgtaataagacatttgtgaggaaagacttactgatcaggcatgaaaagagacactcgaagatgaaaaataggttaactaaaccaaatagagattttatctccccagtagacaacgatttctctaaacagttgccatataattccagtgaaacgctagtttctgggcaacccagtgcttcggtggtaaacccatcaaaaaactctgttgatccaccttcagtcgctcccggatcaaaatttcgtcccttccttcagcagccccaacaagtacaacaaatacaacaacagcaagtccaacaacagcttccggctccgctgcagcaacctatgtttcagcagcaaatgcatacacagccggcaagccctgcgtttccttatgaccctcgaatgagaaataacggtcaaagtgttaaccaatttttcaattggatattcgataaccgtgcagggactagtgcattcgatatcgaaggagctaatagtactagcaatagcaatgaccagaatgttaatatcaacatagctgctcaacaacgatatcaggacagaactgttccgaatactgtatatcaacagccatttcagccactttctcaagatcgacaacaggaacaatatcttcaacagcagaaagatgcacaacaacaacagcagaaagatgcacaacaacaacagcaacagcagcagcaacagcaacaacaacaacaacaacaacaacaacaacaacaacaacaacaacaacaacaacaacaacaacaacaacaacaacaacaacaacaacaacaacaacaacaacaacaacaacaacaacaacaacaacaacaacaacaacaagtacaagtacaacaacaacaagtacaacaacaacaagtacaacaacaacaagcacaacaacaacaagcacaacaacaacaaatactacagcagcagcaacaacaacaacatcagcagcagcagcagcagtcgccacaacagaatctatttgcggatcaattaacttcgtctgctagctgcgctaacctgacaatgatgcaggaccttttctccacaaatttcttgaacagcgatcctttacaatctttcatgcaagagctttctgaagccccacaagtaaatatcgaagacacattctctgataagaccataatccctaacaatgaaaaacgcccacaaaatgataaatttgaaggatttcaaaattctccagttacatttgacctgcaacaggctaacatcgaaactcccaagactcaatccaaatttactaacaaccctagtactctcggtaaagataatgtttccactgagaaactggatatgaatgaactaaaacggcagccttctaaagacttagagatgacaagcaactcttccttaaactataaggagcaattgcgccattctatgaagagcgttccgtcatttttccatccacatcccacgacaaaatacaaggtatcaaaagagaaatgtcaagagatgtttgcacttgttccagaattacgttacgtttctataaacgctatacacaaatcactgaagtcattctggttcaattttcatccacaatatggtctacttcacaaaccttctttccacgtggacaagcagcctggaattttaaacttggcgttaatcatgactggtgcaagtttcctaggaagtgaatatcgtgaacaaatcagtgacccaatttgtggtcccctacgttggataattttttcccatgccgatttccaaccgccctccaaaacatacatcattcaaagcttactattactcgaaggatacgaaaagacaagtacgaatagacatttccacgaaagatcttttttgcaccatgggacgaccattcaattattgaggcgaacgccttccttaggtggccatccattaatggtcaaaaccgggaaaacttccggggaaaattcaattaaagatccacaagaagtttataaaagatggattgattttgaaatgttgaaaagaatcgcattctacgcattttacatggacaccacacatgctgtagtgtttgggtattggaatttattcatcaacagcaatcaaattcagctaacattaccttgcccagaccaagtttgggaatcttatgatttgagctacgaaactctaatggaacatggatatggcagtaccaaaagggatgaaaataatacattcctgtcagcattgatgcaattaatgaaaaacgtcgttcaaattttacaaaacaacaatatacaaagaaacaaggtcaataatgacgccaaagagagcagcccagtaggcctggaaaacactgaagactggaatatccaaagtctttttggtaaaaagatccttctttcaggaataatttctatcctattccagtgccaagaggaagtaaatggtgagtatttcatgacaaattttcgaagcggtattacagatcatctaggtctttcatggaaagatattctatcatttgcaatgaattattggcttcgtgaagttcaaataagttgcactaatccgaaagcatgcaggataaacacgccgagtgattttgaaggggtctcaacggatggagaaggtgaccaacctcatgtgaactacgaagacaaggcaaatgatagcagcttagatttactttcttcagataattcttcaagttgtaaaatgcctgcaattcatatttctcaaatcgtcttacgtattctccatcacgattattacatatacgcaggggcgccttggagaatgaatgtcccaattgggtttgaggaatatgacatgatcagtcgaaggatactccagtttgcaaaagatccctataatggtggtgtagccgtcgtttacgctttccaatttttgtttgaaatgttcattgttaaggacaataatcgtctaaccgttgtggaagactacgcggtgaattctgatcctatatttactaggccatatgctattgcattgacgtcgcttttgatctggtcttgtaattttgcactacacggctgtgaagttagcatatggaataatgttgacgcctcgaaagaagaaagttttaagtcaagtgacaccaatggtgaatgtactactagccccgagggcgataaggaatcaaaactttcgagtagcaatctaaaagaaaagaacaattacattccaaaggagagcttccaagtatacttgttaagaatgtatccgattctgtacgtagatggttcacttgacttagttagcttccagaatgaaatttgggcaaaagcaaatatgctacaacacatttctaatactcatcatttgtgcgggatgatgcaatttatgaaggacatttttagcaaaagctactgggatttagggcgcgaattcggaaggctttttgacaattgtttagagagaagtatggggaaagcatcgcctacatgtcatgacatgttcgatgtttag

SEQ ID NO: 2665 - DNA, 2244 bp, Saccharomyces pastorianus
atgaacgtttccaaaatactggcgtcgcccacaatcacatcaaatgttttgcgcatactagctcccaggttgcctcagattggcgcctctttgctagttcaaagagggtggattttaagatcgagacaatcccatcgtttctactcggaaaaggccaacgacgaaccaccttcgaaaaagggaggtgaaagcaccaggaaggcgtctggcaaagctacggcatcttcaaacgacaatgctgcaccaccaccgccatccaacactaatgataaaattaaacagccgaatgtagctgtatcgcatgctatgctagccacaagggagcaggaggccaacaaagatttaacgagccctgatgcacaagcggctttttataagcttcttctacaatcaaactatccccaatatgtggtatccagatttgagacccccggtattgcttcatcgcccgagtgtatggaattgtacatggaggcattgcaaagaataggcagacactcggaagcggatgctgttaggcagaacctattgacagccagttctgctggtgcagtcaatccatctttggcgtcatcttcgtcgaaccagtcgggttatcatggaaacttcccatctatgtactctccattttacgggtctcgcaaagaaccgctgcatgttgtcgtttcagagtcaacctttactgttgtgtcgagatgggttaaatggctacttgtgtttggtgtattgacctattctttctcagaaggtttcaaatatatcacagaaaacacaacattactcaaatcatcagaagtagcagataaatcggtcgatgttgctaaaacgaatgtcaagtttgatgatgtatgcggttgtgatgaagctcgtgcagaattggaggagattgttgacttcttaaaggatcctaccaagtatgaatctttgggtggtaaactacctaaaggtgtattattgactggtcctcccggtacgggtaaaaccttattggccagagctacagccggggaggctggtgtagacttttttttcatgtccggttctgagttcgatgaagtttacgttggtgttggtgctaaacgtatccgtgatttgtttgctcaagcacgttctcgcgcccctgctatcatttttatagatgaactagatgctattggcggtaaacgtaatccaaaggaccaagcgtacgccaagcagaccctaaatcaattattggtcgaattagacggtttctcgcaaacaagtggaattatcattatcggtgccactaatttcccagaagctttagacaaagcgttaaccagaccaggtagattcgataaagttgtgaatgttgatttacccgatgttcgtggtcgcgctgacattttgaaacaccacatgaaaaaaataacattagcagataatgtcgatccaacaattattgctcgtggtactccaggcttatcgggtgctgagctggccaacctggtcaatcaagcagcagtgtatgcctgtcaaaagaacgcaatatctgtcaacatgtcacatttcgaatgggctaaggacaaaattttgatgggtgccgaaaggaaaactatggttttaacagatgcggctaggaaagccaccgcttaccacgaggctggtcatgcgattatggccaaatacaccaacggtgctacccctctatacaaggctactattttacccaggggcagagcattaggtattacttttcaactaccagaaatggataaggttgatattacgaaaagagagtgtcatgcccggttggatgtgtgcatgggaggaaaaattgctgaggagttaatttatggcaaagacaacaccacaagtggttgtgggtctgatctacagagcgcaaccggtacagcaagagctatggtgacgcagtatggtatgagtgatgatgtgggccctgtaaatttgtcagagaattgggaaacttggtcgaataaaatacgcgatatcgccgacaatgaggtgattgagcttttgaaagattcagaggaaaggagtagaagattactgaccaagaagaatgttgagctccacagacttgctcaaggtcttattgagtacgagacacttgatgcgcatgaaattgaacaagtttgcaaaggtgaaaaattgaataagctcaaaacatctacaaatactgttgtggaaggtccagacagtgacgaacgtaaggatataggaggtgacaaaccaaaaattccgacgatgttaaatgcatga

SEQ ID NO: 2666 - DNA, 2514 bp, Saccharomyces pastorianus
atgggttcttcgctgagaagctttattaaagatgttcgcggagctaaaactctggctgatgaaagagctaccataacaaaacagtctgccaaaataagaacaaagttaagagacgatcatctgccacatgagaaaaggcgagtaaatattcagaaactgttgtatctatacattcttggagaaaaaacacattttggccaagtggaatctattaatttgattgcttctgatgatttcgtcgataaaaggttaggctatctagctgccactttgttgctggatgaatcggaagacttgttgactctattgacaaacatgctgaacaacgatttgcatcacccaaacaagtacgccgtgtcactagcattgacttcattgggctttttaagttcccctgaattggctagagatttatacccagacgtggaaaacatcatcaaaaattcgaaagaccctttcctcttgaaaaaagctcttcaatgtgctgccaaactaatctccaaagatacctctctcctagaaatcttcaatattgaagacatcaccaaaatactatccaatcattcaatttgtacccatggtgtcttgctaggtatcaccaaaattttacaatccgttttatcaattggtttacaccctgagaatgacgacgatgacgacgggatcgattacgccaacgatgtcctatctccattatctctactcttgcgtgattttttcactcgtttggagaatttaaattctaaaaacatcgaacctggatacgatgttcaaggtatttgtgacccatttttgcagtgtgaaatgatttacactctaaaactctacttccaaaatggagaattattgaattcgaatcacgtactggactacaaggataatttctgtgatctattaacccgtatagccaccaacacagactcgacaaaaaatagtggacaagccattctttacgaaactgcaaaggcaattttttctttgaatttgaaccaaccactacgtgtccttggtgtcagtattttggcaaagttccttgtaggaaaagacaacaacacaaaatacgtttcgctaaacactttattaaaagtcgtccctcaagaacctactgcagtgcaaagacacagaaaattcatttctcactgtttgcaggacaacgatatttcgatccgaatgagagcgttggagctaagtttcgccatcttggatagttcaaatttagtagagctgattaacgaactaatgaaatttttggccaaacaagatgaggattcaaaagatttaatcatttacaccattgaccacctaatcgatacttttgatactcacactgtcaaggatgaaaactggaaactagatgtattcttaaacgttttaaaattagtggggccatttatcaattatgaaaagattaatgatatcctaatcataataaataacaccactcaattatctgataaatacaattttttgcggaaactactaatcatttcgttagacgaaaaatcaatagaaatttctgacgaaaaatcaatagaaatttctgacgaaaatattggctggaaattagtattaatttggtgtattggcgaatattgcgatttgctattaaacgatgatgatgaaagcaacgcgaaaataatcaatgaatcgtctataacgaattacttgttgaacttacaagagtgctacaccacaacaaaccacaagattattaattatatcctaacaacggcattaaagttatcaataaaattccaggaccccaaaaatattgaaaagttaagacagttaatattgagctatgcagactccactgatctattactccaaatgaaaagcaaccaatacgaaatattattcaatcagccagtatctgttaagagaatcgttttagaaacgatgcctaagtttgaaaaggtcgccgagaaacaagataaagtaaagaagacatcgaaaaatcttgtatctaacgaacccgctgatttactatctgattttttgagtgacgataataaaacggatgccatagctgccacagataacaacgttgaaccaacggacatattagaggagattttcggaggaaagaaagatacaaaacgaccattgaagaatggtaaggaagagtcaattgaccaaccgttaccagtgactgccgattcaaacgtcacactaccttcaagtgctacaaagatccatgacagtgcttcattgaatgtatacgctactttactctcagcaaattctggattagcatatatagagttattttttcaagcaaagtctatgctatctgatctgcaaactttctgtgccgttcctaaagctcaaaaactcacactaggtcaattacatccgtcttcaacaataagggccaaccaaatctgcaaacaatccctaaagatttccggatccgggaagttgaaattaagagttaagttgggttttcatttagatggttccccatcagctaccaatgaacagtttgatcacaaattcgatacaactttataa

SEQ ID NO: 2667 - DNA, 3102 bp, Saccharomyces pastorianus
atgttcaaaagcagacgtttaaagaacgtcaaagaagttttcaaatctataaaaggtcagggttcagagacatccattgaggtttcatcacctaaatctgcagattctgagccatcccataaatcccaaaattcgaaatcttccacctcatttaaacttcctacgggctcaagtaacaagaataagatattttcattaaaagaagcaaacagatatggtatgagtagtaaaccaacctctgctgcattcgacttcacgcaaaatttattggctattgctacagctacaggagaagttcatatttatggccagcagcaagtggaagtacttataaacctggaggataggtcacccgttaaggagatgagatttgtaaaaggtatctatctggttgtcatcaactcaaaagatgtcatgtttgtcctatctttatattctcaaaaagtacttgcaacagtgtttgctccggggaaaataacgtcgattgatacagacgcatccttaaattggatgctgattggtcttcagagcggttcaatgacagtttatgacattgatagggaccaactttccacgttcaagttaggcaacttacaaaaaaactcattttttccggatgcaaggctgtcacccatggtgtcgattcaatggaaccctagggatattggcactgtgctaatatcatacgagtacgtaactctgacatactgtttaattgataacgaaattaagcaatcatttatatacgagttgccgccttttgctccgggaggtgacttttcaaagacaactagtgaaaagaggacacccaaagtaatccaatccttatatcatcccaattccctacacatcctaaccgttcatgaagataattctttagttttctgggatgctaatacaggacatatggtaatggcaaggacaatattcgagactgaaattaatattccgcagcctgattacatacgggactctagtacaggtgcggcggcaatttcaaaagtgttttggatgtgtgaaaacaatccagaatatacgtcactacttatctctcacaaaccagtcggtcaagatggcaaccaaagtctcaccatggtggaccttggttacacaccgagatattcaataacatcatatgacggtatgaaaaattactacgcgaatccgaaacagatgaagatatttccgttaacaaccaacatgccgatagtaaaggtactgccgattccaagacaatccccatatttttcaggatgccataatccaggattaattctattgattcttggaaatggtgaaatagaaacaatgctatatccttctggaatatttactcataaagcctctttgttccctcaaaatctttgttggcttagaccaacagctacagtttctgtggccacttctgtacccaacaaactatggctaggagtgctatccgcagctcaaagtaaggattgcgtattgaaggggggtgttcgaacaaaaaggcaaaaatccccagcagaatacggtacagctctcattactggccactcaaatggctcagttagaatatgcgatgcttctcatggggatatacaagacaatgccagctttgagatgaacctatcaagaacattaaatagagcgaataaattagccgtcgacaaactatcctttgctgcagaaactcttgagctcacggtatcgattgaaacaggtgatgttgttttattcaagtacgaagtaaaccagttttatagtgccgaaaagaggccagacagcggtgacctaaatatggactttaggcggttctcattgaacaatacgaaagatgttctcgttgatgtaaaggacagagcacccaccaatattaaacagggatttatgccatcgacagctgtacatgccgataacggaaaaacttctgccttaaataacagtaacatcgggtttgttggcattgcgtatgctgtcggaagccttatgctgatcgatagaagagggccagcaatcatttacatggaaaatattaaagaattaccaggggttaagagtacatgcgtttcctgcattgaatttgtaattatggaatatggagatgacggttactcaagcatattaatgctttgtggcactgatatgggcgaactgatcacctacaagatccttcctgcacctggtggaagatttaatgttcagtttatggacatcaccaatgttaatagtaaagggccagtacgtaaaatcgatgctttcacaaaggaaacgaaatctagttgcttggcaactattccaaaaatgcagagtttaagcaagggactttgtattcctggatttgtattgacaactgcatttgatgatataagaatgataactttaggcaagtctaaagatatacacaagagtttcaaatatccactggccactacaggtatatcgtatattcctactttagaagggaataacagccgaaaaatattagcggttatagtcacgttagaaatcaacggccatgtcaaagttttttcagttccagattttaaggagcagatgtctgaacatattccatttccaatagctgcgaaatacataacagaatcttccgtcctaaggaatggtgatttagcgattagagtgggtgaatttcaagcatcgttattttctaccgtcaaggaacagagtacagcaccaccagcacaagtttccgacgtactgtatattaatggagttcgaatcccgtataggccacaagtaaattcattacaatgggtgagaggtaccgtgtattgcacacctgcccaattgaatgagttacttggaggtaaaaatagacccgattccaaatacaaggagagtgttattgctcaaggaactttttcggaacgtccttcggataataatcatgaagagggttcggagtaccagtacaataaaccctcacggaaaggtaggaatagtaactatggtgtactgagaaatgtttcccgtgttgttgaaaccagatgggatgccgttgaagataggcttaacgattatgctactgccgtgggcgaaacaatgaacgaggccgttgagcagactgggaaagatgtaatgaagggtgccttaggattttga

SEQ ID NO: 2668 - DNA, 1641 bp, Saccharomyces pastorianus
atgcttagtagaactataaatagagtagtttcatctataaagccatcttcaatagtcagaatgtcttctactactgttcctgctgctcctactcctactgctgatgctgctaaggctccaaaggctccaaaggcttcgaaaaaaagcaagttgcaagtctctttgaagacacctaaaggtaccaaggactgggctgacactgatatggttatcagagaggctgtctttaacactttgtccaatatattcaaaaagcatggtggtgtcactatcgacacgcctgtctttgaattaagagaaattttggcaggtaaatacggtgaagactcaaaattgatttacaacttggaggaccaaggtggtgaattatgctctttgcgttatgacttgacggttccatttgctagatacgtagcaatgaacaatattcaaaacatcaagagataccacatcgcaaaagtctacagaagagatcagccggctatgaccaagggtcgtatgagagagttttaccaatgtgactttgatgtcgcaggtagtttcgaatcaatggtgccagatgctgagtgtttgtccatcttagtggaaggtttaaccagtctgggtattaaagatttcaaaatcaaactaaaccatagaaagattcttgatggtattttccagatctctggtgtcaaagacgaagatgtcagaaaaatctcatctgctgtcgataaattagacaaatccccatgggaggccgttaagaaggaaatgacagaagagaaaggtcaatctgaagaaaccgccgacaaaatcggtgaatacgttaagttaaacggttctcttgaggaagttcacaccatcttatcccaagatgcaagcattacctcaaacgaactggccaaacaaggtttagatgagattgccactttgatgaaatacgccgacgcattcggtatcgattcatatatttcatttgatctttccttggccagaggtttggactactacacaggtttgatctacgaagccgttacatccgcttccgctccaccaaaaaatgcttcagaattgaagaagaaggctaaatctgtggaagatgcctctgaatatgttggtgttggttctattgcagccggtggccgttatgataacttagtcaacatgtttgctgaagcctctggtaagaagtctactaaaatcccatgcgttggtatttcctttggtgtcgaaagattattctctttgatcaaacaaagaattcaaacctctacagacatcaaaccaactgcgacacaagtctttgtcatggcctttggtggtggtaaagactggactggttacttgcctgaaagaatgaaggtcactaaacaattatgggacgccggtattgaagcagaatacgtttacaaagccaaggctaaccctagaaagcaattcgatgccgctgaaaaagctggttgtcatatcgctgtgattcttggtaaggaggaatacttagacgggaaactacgtgtcaagagattaggtcaagaatttgcggatgatgatggtgaattggttaatgcagccgatatcgtcgccattgtccaagaaagattatctcaagttcacgaagacggtcttgatgaagttactcgtttaattaaaggattataa

SEQ ID NO: 2669 - DNA, 1113 bp, Saccharomyces pastorianus
atggctgaaacgagtattgaaaaaacccaaattttacaaaaatatctagaactagaccaaagaggcagaatcattgccgaatatgtctggatcgacggtaccggtaacttgcgttccaaaggtagaactttgaagaagaaggtcacctctatcgaccaactaccagaatggaactttgacggttcctctaccaaccaagctccaggtcacgactccgacatctacttgaagcctgtcgctttctacccagaccctttcagaagaggtgacaacattgtcgtcttggccgcttgttacaacaacgacggtactccaaacaagttcaaccacagacacgaagccgctaagttgtttgctgcccacaaagacgaagagatctggttcggtctagaacaagaatacactctattggacatgtacgacaacgtctacggatggccaaagggtgggttcccagccccacaagatccatactactgtggtgtcggtgccggcaaggtgtacgccagagatcttatcgaagcccactacagagcctgtctgtatgccggtttggaactttccggtatcaacgccgaagtcatgccatctcaatgggaattccaagttggcccatgcaccggtattgaattgggtgaccaattgtggatggcgagatacctcttgcacagagtggctgaagaattcggcattaagatttccttccatccaaagccattgaagggtgactggaacggtgccggttgtcacaccaacgtctccaccaaggaaatgagactaccaggcggtatgaaatacattgaacaagccatcgaaaagttgtccaagagacacgccgaacacatcaagttgtacggtagcgataacgagatgagattgaccggtagacatgaaactgcttccatgaccgccttctcttctggtgtcgccaacagaggtagttccatcagaattccaagatccgtcgccaaggaaggatgtggttacttcgaagatcgtagaccagcttccaacattgacccatacttagtcaccggtatcatgtgtgaaaccgtttgcggtgccattgacagcgccaacatgactaaagaattcgaaagagaattctcataa

SEQ ID NO: 2670 - DNA, 1080 bp, Saccharomyces pastorianus
atgtccaagagaaataccgcccccctcagatccccagggataaacactgtccagataaacgctgccagagagatgcatgcgcagaccgtacgcgctcgaagaatgcccatcccagccggcagcatcaccgcatcctcgatgaccgcccccgtagcagcaacggcagtgccaccacgacatatctgcaataacccgaacaacccgccctgcgtgagctgtggctcggtcatcatcccatcgcccagagccacgctgcccttggaggacaatccttccatctccataaacgactggaccatctcttccaggaagaagcccattttgaactcacaagaactggacgtctgggaaaccgagaagctcaaggggctgaccttgcccgagatgatcttcggcaacaactacatccgaatcgagaacccgcgtctagactggtctatagagttcaacgccctggacgccctgaagaacgtgcaactgcaggattcgggcatccgcgtggcgtactcgaacgattggataaactccaagaggaaacagaacacatcgggcacgggcactgcgcagcggttttccaacgatgtgagcgcagattcccttaacattatacacaagtacgactggacctacaccacaagctataggggcacggagaactcccccgagtcgaggttcaaactggacaatgaccaaacgctaccacttgacaagttagccgtgcacgacaaaatcctattctacgacgacatgattctcttcgaagacgagctcgcagacaacggtatatccatactcaacgtgaaaataagggtcatgaacgaacgcctgctgctgctgagcaggttcttcctgagagtggacgacgtgcttgtgcgggtctacgacacgaggctatacgtggagttcgacgagaacagagtgatcagagagtccaaggagtacgagggtaaataccacgacgtactggccaagcataggctgtcccaatcgcatgaccccaaggccgccctgagagatagcaactgggttgctcagaacacacccatgatcaaaagagagtgcgaaacgatccagttctag

SEQ ID NO: 2671 - DNA, 3213 bp, Saccharomyces pastorianus
  modified_base (3058)..(3148): a, c, g, t, unknown, or other
atggacaacaaaagactgtataacggcaacctatccaacatcccggaagtcatagatcccgggatcacgattccaatttatgaagaggacatcagaagagatgtgcttttgaacgtaagccctcgttcggcgggcgtgtctgacaagcgggaccgttcgaattgcgcttccccacagaaaattggctcgtatcgtactcgcgctggcaggttttcagatactataaccaacctgttaccttccattagtgcaaaactgcaccattcaaagaaggccgctacagcagtcgttgctcctcctgctagtagcactccggagagcttgaatacgaccacatatgctccaagattgtctaatgattcttttacaagaggtacgccactgtcactgcagtctactacaagccggacccgaacaagaaacaacacagtatcctcgcaaatgacagcgaattcttcatctaccagcggtgcgggtgcggccaataccacgaatacaaacatttggagtacaaatacagaaactaacacgtcatccagccctttgtttgattatccccatgctacttcctattttgagccattgaccagatttaagtccaccgaaaattatgccttgcctcaaacagctcagttgaacagttttttggaaaagaatgggaattcgaacatatggtcgaatacaggcaataacacagactacctcaatactcccatagttaatagacagcgttcgcagtctcaatcaactataaacagggtatacacagatgctccttactatcaacaacccgcgcaaaatcaccaggttcaagtgcctaccatgatccaaaatagcacccctcaatcgcttgttattcttgacggtgttgatccagcctcaatcaactggattaccacaaaccaaaacgttccattgatcaatcaaatatctacgcttttgcccactaatacaatatctatttcgaatgtatatccattgcaacccactcaacaacaacaaaatactgtaaaccttacaagtacttccctagcgacattgtgttcgcaatatggcaaagtcctctcggcaagaacgctacgtggcctaaatatggctttggtggaattttctactatagaaagtgcaatttgtgccttggaagccttgcaaggtaaagagctttcaaaagtaggtgcttctagcactgtgtcctttgcacgggttcttcctatgtatgaacaacccccaaacgccagtgcttatagtagcaaaccaaagcagcctttattgcaggaacaactgaataacggagtgcttaattaccagcagcaacagtcaacctcatttaatcaacccaatttttcatacagcaaccccacccaaaatatgagccatttgcaattgtcttcgaatgaaagtgaaccatacccctttccattgcctccaccatcattatctgataatgaggtcaatctattaaataccataaaatcatttccattaggatatgaccaattagagttgaatcatctgttaaaaaatgcgttgaaaaataagggagtttctaatacaaacgattttggtccactacctgaacacaactctaaactttctaaaaagaagagctttttcgatccgccaaaactgcgtgagttaaggaaacaatttgattcaaattcattatctaatatagaaatcgaacagcttgccatcgtcattttagatcaattaccagaattgagttcagactatttgggcaataccgttgttcaaaagttatttgagaattcttcagatataataagagatattatgcttagaaaatgtaacaaatacttaacatctatgggtgtccacaagaatggaacctgggtttgtcaaaagattatcaaaatggcgaagacaccaaggcaaatcaatcttgtgactttaggtgtcaaagactattgcatctcactttttaatgatcagttcggcaattacgttattcaaggtatcttaaagttcggttttccctggaatagttttatttttgaaagcgttctgtctcatttttggacaatagtgcaaaacagatacggttctcgtgctgtaagggcttgtctcgaggcagattctaccatcactcaaagccaactgttgacgataagttcgctgataattgtactctccccttatttggccacagataataacggtactttattgattacttggttgttggatacctgtacattacccaataaaaacataatcctttgtgatgaactggttaaaagtaatttggttaaactatgttgtcataaattaggttcattgacaatcttgaagattctaaatttaagaggtggtgaagaagaattattatccaagaataagatcatccgtgcagtttttgatggcccagtctctaatgattctatcttattccaaatactggatgaaggcaactatggcccaacattcatttacaaagttttaacctcaagaatccttgacaataatgtaagagatgaagttatgactaaaatccgtcagctaattttgaactctactatcaatttacaaagccgtcaactgctggaagaaattggattatcatcatctggaatatcccccaagcaatcctccaaaagtcaccgtaaacaacattctcaagggttccattctcctaggcgtgcaagaggagtctcggtttccagcgtgagaagttcaaattcaagacaaaatagtatcataccaatcaatgctgctagtccagctccaattttgaactttaacccggttccgatgagtgaaataaattcatactttaataatcaacagttaatgtaccctgggaatggaaattcaaacgcaaatactatgtctaatgggtacgaggacttaacaccacactttgactcactcgcaatcgctaatggaacaaatttgtctttaccgataatcaacctaccaaatggtgcacagcaaccaaataacaacgacagtaatatcagcaataatactaataatagtacttgttactcaatgaacatgaatcctttaagtcgctcagtgagccacaataataatnnnnnnnnnnnnnnnnnnnnnnnnnnnnnnnnnnnnnnnnnnnnnnnnnnnnnnnnnnnnnnnnnnnnnnnnnnnnnnnnnnnnnnnnnnnaacaaggcaatgttaacgataataatgatacaaatttgtcccgatacaggtcatacggatattaa

SEQ ID NO: 2672 - DNA, 1413 bp, Saccharomyces pastorianus
atgcaaaatccttacggccattttactaacgataccacgggggacagaaagacatcgtctcaaaccgggctatttggacaaagtctgaatagtcctttgggttacgccagatcttttccttctttgacttctaataatgataactttaaagccaaccagcaatcatcgataccgttgccagaaccacgtttgccttggaataacattaatcaggtgtccaatcctttgatggtaacaccgcttcctggattacataaaaatatgcctaaaaatactaaaaagaaactaccaaaggtatccaaaaagattccgaactcttctaacaccataccaaataaactagtgagtaatagtactacagtggggaaaagtacttttggttcgacatcgggaaggaaagctggaacggatgacagtgctgaattagaaagaagaaagagaagggctgaaagatttagtaagggcccatcagcaacgacgaatagtaacgacaacttgaatgaagattttgcgaatttgaacgcaatcagcagcaagtctcataagtatgataaaaaaatacatgtggtggggcgttgtcaaactcttgaaaaatcatatttgagactgacatcggagcccaatccagatttgattaggcctccaaacattttgcaaaaaacgtattgtttattgatggagaagtaccaatcgaaagcggccacgtatacttacctttgcgaccaattcaaatcaatgagacaagatttaagggtgcagatgattgagaattcatttactattaaagtttaccaaacgcacgcacgaattgccctggagaacggagaccttggcgaattcaaccaatgccagaatagaatcatggcgttgtttgaaaactctacgataccgaaaaaatcatactcggaatttatatgttattctattttgtattcaatgttaactgaggattatccagcgatttctcagttgaaactgaagttgatggacgataacgcgtcggaaatcttgggggatgagcatgtcaagataattttcgagttgagtaacatgaaactagtcgggaattatcattattttatgaaaagttatacgaagctgcacaaattcgaaaaatgcctgatcaactcatttttaaatctggaaaaattgaaatttttgaccgtgatttgcaagagttataatcaaatcaatttagattttatcaaaagtgagtttagtttcaccagtatagatgaaacaataaatttcttgagtgagcaaaacttgatcgacttcatagtaactaaacagattagtgacactaatggtaaaatgaaagatatcaaaattttaaatacgaagggttgtagggtacagttgatacagaatttcatgaaattcaagaagattgatataaagggacaaaaatag

SEQ ID NO: 2673 - DNA, 546 bp, Saccharomyces pastorianus
atgaccagtggtactgaagagcaatggcaaaggatccagcatttggaaaaggagcatgtggaagtatataaagaactactaactgcgttagataaactgtacctgatcaggaaacacaatcatgcagtagtattgaactccagccagaaacgtctcttggaaatcagacaccaacttcaaattaatcttgaaaaaaccggccttctcataaggcttctagaaaaaccagataatagtaatatattatttgtgaaactacaaaacctattagaggaaagcaattctctggacaacgagctcttgcaatcattgggtacccaatcttcattcaacaaacaattgatcgaatcaagactggagcgagatcagttgatggcaaaactggtagaggtatcctcgaggtttccaaatgaaactttacgtgcagacgatgatgaaattgccgaaaaccaggttgagttggaaagggagaatgaaactatacaggaattacttattgctttacaaatacattctgggtatacagatatatcttacgcaatttag

SEQ ID NO: 2674 - DNA, 1872 bp, Saccharomyces pastorianus
atgccatcgagcaagaagatcgtcatcctttatggatcagagacaggtaatgcgcatgattttgctacgatcttgtcccatcgactacatcgctggcacttcccacatacattctgttccattggtgattatgacgcacaggatatcttaaagtgcaagtacctttttatcatatgctccaccacaggtcagggtgaactgccaaggaatgctacatcaaaacgtgaaacaccagtaacactttggtcttttttgaaaaagaaaaacctaccgccgaacttcttaaaccatattcaaaccgccatgttcggactaggtgattcatcttatcccaaattcaattatgccattagaaaattacaccaacgaattgtaacgcaattgggtgcaaatgagttattcgataggttagaggctgacgatcaagccatggctggtagcaataaaggaactggtcttggcgttgaatcagtatattttgaatacgaaaggaaagcattggaatttctattaaagaagttccccaatagaaggttgggcaataagataattaaacgggaagagctggatccagaaatttacttagagccaatatcttatttacaaattgcagacgagaatgcgaatgaagatctcaatgaaactaaaatcgaatttcaaggtgatgaatcggtgaagattggtaaagttaacattaacaaaagaatcacatctcatgatcatttccaagacataagacagtttacgtttagtagtattgaaaatatagaagaagaaaagtatgatcctggggatacagcagctatttatccctgtaatacagatgaagatgtgtcgaactttttagaaaatcaaagccactggttagaggttgccgacaaaccattggattttatcaacggagttccaaaagatctcaaagatggtgggttaatcaaaccgctgactttgagaaacttactaaaatatcattgtgatttcatgagcattcccagaacaagtttctttttgaagacttggacttttgcaacagatataactaaaatggaacgtggcaaagaacagctaaatgatcaaaaggaaaaattacgtcaatttgctaccgatcaagatatgcaggatttgtatgactactgtaatagacctagaagatcaattcttgaggtattggaagactttctttctgtaaagttgccctggaaatatgtgttggattatttgcctatcattaagccaaggtattactctatttctagtggtcctagagatccaaacatcgaactaacagtagcggtagtgaaatataaaactattttaagaagaattaggaagggaatatgtactaattacattgcgctcttgcaagagggggaacaagtgaggtacaaattacaaaataatcacataatcaagcaagagtttttaaatagaccaattattcttgttggaccaggtgttggtttagccccattgctatccgtgattaaaggagaagtatccgacaacatgagactatttttcggctgtaggtataaagacaaagactatatatatagagatacattggaagattggtcccgtaaagataagatttctttgtctacatccttttctagagatagtgaaaactcaccaggtgtcaagtatgttcaggataatttgtggagattgggcgaagaaattactgaactggtgatcaacaaagatgctattttctttttatgtggctcatcaggtaagatgcctattcagattagattgacatttgttgagatgttgaagaaatggggtggattcaaaaatgaggaggctgccaaaaaatacctgaaagacatggaaaaatgcgatagatatattcaggaaacttggtga

SEQ ID NO: 2675 - DNA, 3525 bp, Saccharomyces pastorianus
atggcagattctggtggtaaaaacactgcatctgcagagcagacaacaatgccgcttcaaactactgctactatcattaatgcaatatctggggaatctattacaactaatgtgaacttctttgtttccctggacgagtttaaacagttcatgactagaaaatggaatataccccctgatcggttgctgattttgttgccttacggtaataaactaaaaccgtccatgtttaaagagttgctaataaatagatccttcacgttaaatgagttttatgtgtatgatagaagactgttttcacttgttcataaacctacaccagtgaatgccgccacttcgcaggacattagctttgaaaatacccttaattctaaagatttaacccagactttggaatatttaatcaaaaatagtcacgtaggtgaaggtagcgacactatcatgatcaagcctatgccctcacccttagaagatgcagatgtgactgttccgcgcttagattaccacaccgtaactagcttactaaccacgaatctgggttggttaagcgctctggaaatagacgtccattatttcagaagtctcataccagacatcatagcccagattacccacatatttaacagtttgacggtttgctcacaatacctaaaattgtactgctttgatgtcgaaaccttgtataattcaaacgttcaattcttaaatcaattgatagacaatggcatgacctcaaaatgggaaaaatgtttcaaagacactctgagtaaattgactggtttagagggtgactctttacaaaagtttactaatgtcgaatctctcctggaaaatgaaaaatctgtaaagtttttgaatcattccattaataataagctgaacaagatcaagagagaaattgacgaaaattcgaatttcagagacaccatcacaaaaaacattgaccaactgcggcaacagttcactcccaatgaatctaaatatgaactagaagacaaaatggctgcaagcttcaaggatttggtatcagatttgcgatcaagaagcagagatgttcttgataaagaaccagaagaattcaacgatcaagcatttctaaaaagtatgaatgagacgttggaaaaggataagaaaaattctataaagtccttatttactatctcccaagccctatactgtcaaactgaagaactcatgaatttgaagaaaagattgcaaatgcatgccattgtcacgttggggaacatagcattcactcaaatggaaattttaggcataaagaagttgttgttaaatgactgtaataaggatttagaactatacaagaaatatgaagtggaattcgcccaagtggaggatttacccctaatatatgggctctatctaatggaaaaataccgtaggctatcatggtttcaacaaatcgtgtcatttgtttcgagttttgatcaagatttagagttgtttaaacaaaacgaactgcacacaagaagtagatggattaaaaattttggttccattgcaaccgttttctgtgaagatttattatcctcttcagattttgataaattgaatgaatatcattccattcctcctccacctaatgataaagaaaaacataaggacaagaatgcaatcactcaatatcacaaaggtctacaggaactatctcaggtcattgacaattacatggtacaaattaaagaaacaaacgtcccagaaccaatcatcgatttgctatcgaaaacactcaccgaagccaaaagatttcatataatttactctaatttcaaaactcataacaacaatagttttaacagtagtaataattctctcgaagaatctgtcatgttgagaagcgatgaactagttaaagggtataaaacaagaataaaaaaactagaatcacttttgcatgagcttcagtattctgacgtaaaccactggcccctgggtattttgaacactcatatcaaaccgttccatagtatcattccaagtgtaaataaaagaaagtttttaagcgcatctgtgttgttagaaccttctgacttaaacaacagtagtataccacaaattaacggtcatcgagttgaagagttggagagtaatttgcaagatttattgcaacaaattcaatcattgaaggatgaaaacattcaaaaatcgaaggaaatctctgatatgaggagaaatttgagcgatgcggaagtggaaaagacagcatatcgcgaaacgttaactaacttaaatcaggaactggcacggttaactaacgaagaacagtcgcataaaaccgaaatctttgcacttaatgtctcatttaaaaagcacttgaacgatatagttgaccatgataatgagaaattgataaacatcaataaactaaaaagcgactatgatgatgtgtttaaatccagggaacgcttacaagttgagatgagtgaaattcgtaaaacgcataaagaagagattgattcattaaagaatgctatcgaaagattaaatggacaaattacaactttggaaaaaagtgaaagtgaggccaaatcaagttcgatcgaaaaaatcgaaaatatcgataccatttcctttcgcaatgacgggaatatgaacgatatggtttccacacaagctttgcaagataagatgtttgatattatctcaacaaatgttttcatcttggagaatattgggctattgctaaccttcgataataacaataacattcaaatcaggcgtgtcaaagggttgaaaaagggtgtcactcaaagcaatattttggatgaaagtactcaaatgttggacactgctgataactcggtaataaagagtccagtttttcaaaaattaaaggacgaatataacttgataaagtcgagcgtcaatggagttgataaagatgcccagcaaagcatatttgtggaaaatattgcacaattatatgacaataaactgtacgaagttgcagtcattagaagattcaaagacattgaaactttggcaaaaaaattaaccaaagagaataaaattaagagaacagtattggaaaggtgtcaaagggaaaaggttaccttgagaaattttcaaattggcgatttagcgttatttttaccaacaagagaaaacgttaactccgttgggtctatgtcatcgtcgacttcatcgctcagctcatcattttcgtccgttgacttatcaacaccgccacctttagatgccatgtctatacaatcctccccctcgataatacacagcaatattgtctcccaaggaaatactgctagcaaggaaaagagcaagcaaatgagaccttgggctgcatttacagcgtttgaggaaaacacaagatatttcttaaaagacgagaagggattgacaaaagggaaggaatggtttgtaggaagaatcatcacattggaacattttgtagcggatagctcctctaataacccgctccgattacccaagggtgccgtttggtttcaagtcactgctgttgtagtctcctaccaaggaatttga

SEQ ID NO: 2676 - DNA, 282 bp, Saccharomyces pastorianus
atggctgccccaagagaacctaagaagagaaccactagaaagaagaaggacccaaacgcccccaaaagggctttgtccgcctatatgtttttcgctaacgaaaacagagacattgttcgttctgaaaatccagatatcacgtttggacaggtcggtaagaagcttggtgagaagtggaaggccttgaccccagaggaaaagcaaccttatgaggccaaggcgcaggccgacaagaagagatacgagtccgaaaaggagttgtataatgccactttggcttag

SEQ ID NO: 2677 - DNA, 1026 bp, Saccharomyces pastorianus
atggatgctatatctgatccaacgtttaaacacactaggtcaagaaatcaagtaaccgaagaatctccatcattacttaccgttattatagagattgcaccaaagttatggacgactttcgatgaagaaggaaatgaaaagggtagtataataaaggtactagaggccttgattgtatttctcaatgcgcacctagcttttaatagtgccaacaaagtagcagtcattgccgcatattcccaaggaatcaaatatctataccctgaaagcacttctagcacaactacctcgaaagctcctaggtctgataataggaaccgtagtgatctcaagattatcaattccgatatgtataggcgattcagaaacgttgatgagacactggtggaagaagtctacaaactatttgaactagagaaaaatcaaattgaagaaaatagccaaaggagcacattagctggtgccatgtcagccggattgacatatgtgaacagaatttccaaagagtcagtaactacttcgttaaaatcaaggctaatggtccttacatgcggtagtggcagtagtaaagatgaaattttccaatacatccctataatgaactgtatcttctctgcaacgaaaatgaaatgtcctatagatgtagtgaaaatcggtggttcaaaggagagtacctttttacagcaaactacggatgcaacaaatggtgtttacttgcatgtaaattctacgcagggcttgattcaatatttagcgacagcaatgtttattgacccatcactaagacctataattgtcaaaccaaatcatggatctgtggatttcagaacttcgtgctacttaacgggaagagtcgttgccattgggtttatctgttcggtatgcttatgtgttctgtcaatcataccgcctgggaataaatgtcctgcatgcgactctgaattcgacgagcacgtaattgccaagctaaagaggaagtccgtcgttccaaggttaaagcctaagaagaaggtagcgaaaccgtga

SEQ ID NO: 2678 - DNA, 924 bp, Saccharomyces pastorianus
atgtctgaagaattcccaactcctcaattaatcgatgatttggagcaacatccacagcatgataatgctcgtgtcgtgaaagatttgcttgcaggtacagcaggtggtattgcacaagtgctagtgggccagccctttgacaccaccaaagttagattgcaaacatctagcactccgacgacagctatggaagttgtcaaaaaattgcttgccaatgagggccctcgtgggttttacaaagggactttaacgccgttaatcggtgttggtgcatgtgtttcattacagtttggtgtcaatgaagctatgaaaagattttttcatcagcgtaatgataataagtcatcaattctatcattaccacaatactatacatgtggtgtcacaggtggcctagtgaactcatttttggcttctcccattgagcatgtcagaattcgtttacaaacccaaactggttcaggcagcaacgtagaatttaagggtccattggagtgtattaaaaagttaaaaaataataaagggttgatgcgtggtttgtcacctacaatgttaagggaagctcacggatgtggtacatattttttggtgtatgaagcattgattgctaatcaaataagcaataatcatggcctggaaagaagggacattcctacatggaaactatgcatttttggtgcattatccggtaccgccttatggttgatggtatatccattggatgtcattaaatctgtcatgcaaactgacaatttacaaaagcccaaattcggtaattctatttctagtgtagcaaagaccttatatgctaaagaaggtattagtgcgtttttcaaagggttcggtcctaccatgttaagagctgccccagcgaatggtgccacttttgccacttttgaattagcaatgaggctgttgggctag

SEQ ID NO: 2679 - DNA, 771 bp, Saccharomyces pastorianus
atgtatttcactagaccagaaacagttttaaatctacaaaatattagaaatgaattagtgagaatggaagatacaattatcttcaaattcatcgaaagatcacattttgcaacgtgtccttcagtctacaaagaacaacatccaggtttaacaataccaaactttgaaggctccttcttgaattgggtccttttgaatcttgaaattacacaatctcggataagaagattcgaatcgcctgatgaaacacccttcttccctgacaaaattcagaaatcattcttaccaagcgttaattacccacaaattttggcaccttatgctccagaagtcaattataacgataaaatcaaagatgtttacattgaaaaaattattccattaatttcgaggaaggatggtgatgatagtaataattttggttccgtcgccactagcgacatcgagtgccttcaaagtttgagtagaagaatccattttggaaaatttgttgccgaagccaagtttcaatcggacattcccctatacacgaaattaatcaaagacaaagatgttgaaaggataatggaaaatatcaccaattctgctgttgaagaaaaaattttagaaagactaaccaaaaaggctgaagtttacggtgtggaccccactaacaaaaaaggtgagaaaagaattacacctgaatatttagtgaagatttacaaagaaatcgttattcccattacaaaagaagtagaggtggaatacctgttgaggagattggaagattag

SEQ ID NO: 2680 - DNA, 903 bp, Saccharomyces pastorianus
atgctgcaccataagctcgtatacccagttatattcaagtggcggataccatgtttagggtcttccccacaaatcaccttcaccgccaactatgctacagtggatggccaaaatggtaataagatgcttcccataagagacgatcaatggcctcagttgcaagaaccttccccctacgatatctttggaatttcaaaaacgggctcagaaagtgctacactggatagaaaatcactgaagaagaagtatcatcgctacgtcaaattgtaccatcctgatcattcagataacattatgatcttcagcacagataaagtttccgattgtagcagcaaatcgccactactgttaacatcgagtgaaaaactgcataggtttaaagtgatctctcaggcgtatgatatccttcgcgacccgaagaagaaaattatttacgacacaacaagacaaggctggagcaccccattttcgtcatctaccaacgtcaaaactgaaaattatcactatgcaggctcttatgggtaccactccagctcgcaatacaagtattggaatgctggaacctgggaagatgcaaatagtatgagaaatgaaagaataaaggaaaactttaatccatggaccctaattgccatagtctgcggcctggctatatgtatcgaaggtaccgcgctgttgaccaaaatccaggagtccctaagcaaggctgagtttactcatgaagaaagtgaaatacacttaattcaatcatacacaaattatgggctggatactgataaatattccagattaaggcggttcttatggtttagaacttggggcctttacaaatcaaaggaggatttggatagagaagccaagattaatgaagatatgatacggaaactgcaaacaactaagtga

SEQ ID NO: 2681 - DNA, 1149 bp, Saccharomyces pastorianus
atgaatcctaaatcgtccactccgaagattcctagacctaagaacgccttcatcctgttcagacagcactaccatagagttctgattgacgaatggactactcaaggcgtggaaataccccataactcgaacatctcgaagatcatcggtaccaaatggaagggtttgcagccccaagagaagtctcactgggagactttggccaagaaggaaaagttagaacacgagagaaaatacccagaatacaagtacaagccaataagaaagtctaagaagagacagctgctgttaaaagagatggagcaacagcagcagcagcagcagcagcaaccacaacagaaaccacaacagaaacagcaaccacaacaacagcagcagcagcagcagcagcagcagcaaccacaaccacaacaacctcttaacagcaataacatcattctcatgaaaaaagcacattctctttccccatcttcttcggtctcgagctcaaacagctaccagtaccagatcaacaacgatttcagaaggctgcccaccccttcaatcaactcccctgctggtaactacatggtttccaggccttcaaccggacttcctccagcaagagacctgccacaaatatcctcacaactgcatcctatgccgtactacccatccacgtacgactctactacgagaaaccacttcctcaacattgctcaagctcaaccaagagccaactcgactcctcaactgcctttgatatcatcaatcatcaacaacaacaacaaccaaacatcagtcactaccaccaccacaaccgcgacatcttcacctggtaagttcacctcctctcctaactcttctgtttccgaaaacaacagacttaacagcattaacaactcgaaccaatacctaccgccacctctgctgccctctttacaggactttcaactagaccagtatcaccaactaaaacaactaggcccaacttatattgtcaagccattatctcataccagaaacaatctactgtccacggccgcccccgcccccgcccaccatcaccatatccctcacattccaaaccaaaacattccgttacatcaaataatgaatgcaactaataatgaagtcactgccaaaactggtttggtttctccaaaatga

SEQ ID NO: 2682 - DNA, 1419 bp, Saccharomyces pastorianus
atgtcaaaactggtcatatcaacatcagtctttcagtcccaagtagcagacttactaccatgcaacaaccaccaaaaatcgcaattgacacattcgctattaaacgcgtatagtcttcttccacactttgatgaagtattaacattcccatacgttaaaaagaatgaactacttgagttccattccaaagcgtatatcaatttattaattaatgagaaactcaatagaatattgcctcaagatatcgacgatcccgtagtggagtctaaatggtgtgagttggttgaattgacaacgaattggaaggaaaaagtcaatcggaacttagtagaagggtttcagaggttcacttcaagagaggatctctatggttattacaagagtcagttaaaagcttttaatgacgacgaagacgacattagttttaatgagatggattcagatgaagaagggagcacaaaagaccattatttcctcgagcttgaaaaaagagagtacaacctggagggtgattgcccaattttctcttaccttcccatgtactgccaggtcataacaggagccactttaaatttgctggatcatctttcgctcacagaacgccttattggtataaattgggatggtggaagacaccatgcctttaaacagaaagcaaacggattttgttatataaatgacgtggtattgctaattcaacggttgaggaaactgaaattgagcaaaatcacatatcttgatttcgatctacatcatggggatggcgtagaaaaggcttttcaatattcaaaacaaatacagacaatttctgtacatctttacgagcctggattttttcctggaactggctctttgaatgattcactaaacggtaagaatactgttaacattccattgaagcatggttgcgatgacagttatttgaacttggtcgcatccaaaatcatacatcctctaatagaaaggcatgatcctaaggtaataataattgaatgtggcggtgatgggcttttaggtgataaattcaatgaatggcaactaacgatacgaggtctttctcagacaatcgtaaatataatgaaatcgtatccgcaagcgcacatgtttctacttggaggaggtggatacaacgatttattaatgagtaggttctacacgtacttgacttggtgcgttaccaaggaattttccattgcaagagaaggtgaggaggacaaaagccaagataatccattcactactcgttatgatgatgattcagaacaattcataagggagcatgaactggttgagatgtacaatgaagagaactatcagtactggatatatgagatggaaggtagttcgcgtatgaaaacgttaagaaatgacaacaaggttgaacatatagttgaactaatggatttttataaattgtga

SEQ ID NO: 2683 - DNA, 882 bp, Saccharomyces pastorianus
atggcacaagaaattacacacccaactattgtagacggctggttcagagaaatctctgataccatgtggccaggtcaagctatgaccttgaaagttgaaaaagtgctacaccatgaaaagtccaagtatcaagacgttttgatcttcaagtccactacttacggtaatgttttagttttagacaatgtcatccaagccaccgagcgtgatgaatttgcctaccaagagatgattgcccatcttgcgttgaactcccatccaaaccctaagaaggttcttgttatcggtggtggtgacggtggtgtcttgagggaagttgtcaagcacgaatctgtcgaggaagcttggttgtgtgacattgacgaggctgttatcagattatcaaaggaatacctaccagaaatggctgcttcttactctcacccaaaagttaagacacacattggagatggtttccaatttttgagggactatcaaaatacttttgatgtaatcatcaccgattcctctgatccagaaggtccagctgaaagtttgttccaaaaggaatacttcgaactattgaacagtgctttgacagaaaagggtgtgattaccactcaagctgagagtatgtggatccacctgccaattattaaggacttgaaaaaagcttgttcagaagttttcccagttgctgaatattctttcgttactattccaacttacccaactggtactattggcttcatggtttgttccaaggacaagacttgcaatgttaagaaaccactacgtgaaatctccgatgagaaggaagaagaactatacagatactataataagagaattcatgaagcttccttcgttctgccaacttgggccggcaaggaattgaattag

SEQ ID NO: 2684 - DNA, 1719 bp, Saccharomyces pastorianus
atggtcgaagcagactcctatatggagactttgaactccatgattgaattatttaaagattataagcctgggtccataaccttggaaaacattacgagactttgtcagaccttgggcctagagtccttcactgaggaattgagcaacgaactttcaaggttatccactgcatccaaaatcattgtgattgacgtagattacaataagaaacaagacagaatacaagacgtcaaattagtgctagcttctaatttcgataacttcgattatttcaacgtaaaagacggcgaacaagaaagaagcaatattcttttaaattccttaaccaagtaccccgatttgaaggctttccataataatttgaaattcttatatcttttagatgcatattcccatatcgaatcagattcaagctctcataataacacttcttctgacaaaagcttagattccagtaacacatctcttaataatcaaggaaagctggacctgtttaaatattttactgaactatcacactacattcgacaatattttcaagacaactctttgaatttcaaagtcagaaccaacttaaatgacaaatttggaatatacatctcaactcaggacgagaataaccaggaggtacctttagttaagatctacctagatgaaaacaaaagcgattcacagtaccgattctatgaatatatatactcacaagagactaaatcctggataaatgaatctgccgagaatttctctaacggcatttctttagtaatggaaataacagcaaacacaaataaagatgattttacagagttcatctggtttcctgaagattttataccatcagaattggttatagataagctttcgaatttgtcgaattttccttcttcaccttcgacgccgcctattattgatttattttctagcaacaactataacagtaagatacatttgatgaatgattttaccacgaaactgatcaatattacaaaattcgacataagcaacgataatctggatctaatatctgaaatattgaagtggatacaatggtcaaggatagttcttcagaaagttttcaaactagtttccacgcccaattcaaatttaaattcgccaaaatttgaaccggaccaaacagcttcattccccaaattaactaaagatataaattccttgacgagtaacgccgacccgacgccaagaactaatcggcatggaagtgtggtagaagcgtccagaaggaggcgttcttcggcgaacaagggcaagcgtcctagcataaccgaggcgatgatgttgaaagaagaaggccttcagcaatttaatttgcacgaaattttatctgagcccgttattgaggaagaaaaagatgaagaagataccaaggagcaacctgtagtggcagatagtacgaatgacctcggatttaatcgcaccatttctaatcaagcaaataccgagactagtattgttatggaaagccaaagtgtaccaccagatgttaataacggcattccgggatacagaattgctggagcagaggatgacatagaaatgaaggacgttagcgataatgccaatgagaatgactcaacagtcttacagttgatcgtaagtgaggaccaggtaattctggacactatttctgaatgtaacctgtacgatgacatagaaagctggagaacctttatcaatcagttccaagatattgttagttga

SEQ ID NO: 2685 - DNA, 1698 bp, Saccharomyces pastorianus
atgtctcagagaaaactacaacaggatattgataagcttttgaagaaagtgaaagaaggtgttgaagatttcgacgacatatatgaaaaatttcaatctacagacccctcaaactcatcgcatagagaaaagctagaatcagacctgaaaagagagataaaaaaactacaaaaacatagggatcaaataaaaacatggctaagcaaagaggacgtaaaggataagcagaacgtgctgatgacaaatagaaggctcatcgaaaatggcatggaaagattcaagtccgtggagaaattgatgaaaacgaaacaattttccaaagaagccttgacgaatccagatataatcaaggatcctaaagaacttaaaaagagagaccaagttgtgttcattcatgagtgtttagacgagctacaaaagcaactagagcagttcgaggctcacgagaatgaggaacagacagaaagacacgaatttcatatcgccaatttagaaaatatcttgaagaaacttcaaaataatgaaatggagccagaacctgtgcaagaattccaagacgatattaaatactatgttgaaaataacgatgatccggatttcatcgagtatgatacaatttacgaagacatgggttgcgaaatccaaccttcattagttaataatagtgaggctcctaaagaagctcccaaagaagcaaacaatcaatcttctgtatccagtattcgttcaacaaaaaaacaagagcgttctcccaagaaaaaagtcccactaaagcagacttccacgctggatacggtggaaaattcatcggcacaagctgctgaatcggtttctcaatcggcgtctccttctcctacgcctgtatcaatcgacacgccattgaatacagtcaaagatgatacaatgaagctggatgattccttccacagtccaccagctaccaatgtatccatgaaaaagaaagaatccgaaaacgattctgaggaacaattgagttttccgcaagatagaacggaagaaatccaaaaaattattcaaaacgatatagaaacgaacccagcctttcaaaatccgttatttagcgacgaattaaaatactggttagactcgaaaaagtacctgatgcaacctcttcaagaaatgtcgccaaaaatggtatcacaactagaatcctctcttttaaattgtcctgattcattagatgctgattcgccatgtctttatacaaaaccgttatctttacctcatccaacgtcaatatttttccccagtgagccaatccgatttgtctatccctatgatgtgcccttaaatttaacaaatagcgaaaacgacacaaccgataagttcgataaggacggtaaaataaaatcgaaaaagcatgacgatatctattctagaacttctttagcaagaatattcatgaaattcgaccttgatactttgtttttcatattctatcattaccaaggttcctatgaacaatttttagccgctagagagctttacaaaaatagaaactggttatttaacagagtcgaccgttgttggtactataaagagatcgaaaaattgccaccaggaatgggcaaatctgaagaagaatcttggagatatttcgattataaaaagagttggttagcgagacgctgcggaaatgattttgtatataatgaagatgattttgaaaagctgtaa

SEQ ID NO: 2686 - DNA, 486 bp, Saccharomyces pastorianus
atgacagttggaaaaccaaaaatttcagttgcgttcatatgtttgggtaacttttgtagatcgccaatggctgaagctattttcaaacatgaagtggaagaagccaatctagaaaatcgttttgataagatcgattccttcggcacttctaattaccacgcaggagaaacccctgatcatcgtacagtatctatttgtaagcaacatggtgttaagatcaaccacaggggtaagcaaataaagaccaaatgtttcgatgaatttgactacataattggtatggatgaatctaacatcagaaatctgaaaaaaatacaaccaaaggattctaaagctaaaatatgtctcttcggtgactggaacactaatgatggtaccgttcaaactattatagaagatccttggtatggggacattcaagatttcgaacacaatttcaaacaaatcacgtatttctcgaaacagtttctggaaaaggagttatag

SEQ ID NO: 2687 - DNA, 2043 bp, Saccharomyces pastorianus
atgactcaattcactgacatcgataaactagctgtctccaccatcagaattttggctgtggacactgtctccaaggccaactctggtcacccaggtgctccattgggtatggctcctgctgcccacgtgttgtggagccaaatgcgcatgaaccccaccaatccagactggatcaacagagacagatttgtcttgtcgaacggtcacgccgttgccctgttgtactccatgctacacttgaccggttacgacttgtccattgaagatttgaagcaattcagacaactgggctctagaactccaggtcatcctgaattcgagttgcctggtgttgaagtcaccaccggcccattgggtcaaggtatctctaacgccgtcggtatggccatggctcaagctaacttggctgctacttacaacaagccagagttcactttgtccgacaactacacctacgctttcctaggtgacggttgtttgcaagaaggtatctcttccgaggcatcttctttggctggtcatttgaaattgggtaacttgattgccctctacgacgacaacaagatcaccatcgatggtgccaccagcatctccttcgacgaagacgtcgcaaagagatacgaagcctacggctgggaagttttgtacgttgaaaacggtaacgaggatctagccggtattgccaaggccattgcccaagctaagctatccaaggaaaagccaactttaatcaagatgaccaccaccatcgggtacggttccttgcacgccggctcccactccgttcacggttctccattgcaaccagatgacgttaaacaactaaagaccaagttcggtttcaacccagacaagtcctttgttgtcccacaagaagtttacgaccactaccaaaagaccatcctaaaaccaggtgtcgaagcaaacaacaaatgggataagctgttcagcgagtaccaaaagaaatacccagaattaggtgccgaattggccagaagattgagcggtcaactacctgccaaccgggaatctaaactaccaacctacaccaccaaggactccgctgtcgccaccagaaaactgtcggaaattgttcttgaagacgtttacaacaatttgccagaattgatcggtggttctgccgatttgacaccttctaacttgaccagatggaaggaagcgctagatttccagccaccttcttccggtctaggtgactactccggtagatacatcagatacggtatcagagaacacgctatgggtgccatcatgaatggtatctccgccttcggtgccaactacaagccatacggtggtactttcttgaactttgtttcctacgccgccggtgccgttagactgtctgccctatccggtcacccagtcatctgggtcgctacacatgactccattggtgtcggtgaagatggtccaacacatcaacctatcgaaactttggcacacttcagatcccttccaaacattcaagtttggagaccagctgatggtaacgaagtttccgccgcctacaagaactctttagaatctaagcacactccaagtatcattgctttgtccagacaaaacttaccacaattggaaggtagttccatcgaaaaggccgccaagggtggttacgtactacaagatgtcgctaacccagatattattttggtcgccaccggttccgaagtctcattgagtgttgaagctgccaaaactttggccgctagtaacgtcaaggcccgtgttgtctctctaccagacttcttcactttcgacaaacaatctctagaatacagactatccgtcttgccagacaacgttccaatcatgtccgttgaagtcctagctaccacatgttggggcaaatacgctcaccaatctttcggtattgatagattcggtgcttccggtaaggcaccagaggtcttcaagtacttcggtttcaccccagaaggtgttgctgaaagagctcaaaagactgttgcattctataagggtgacaagctcgtttctcctttgaagaaagctttctaa

SEQ ID NO: 2688 - DNA, 1377 bp, Saccharomyces pastorianus
atgggtaaagagaagtctcatattaacgttgtcgttatcggtcatgtcgattctggtaagtctaccactaccggtcatttgatttacaagtgtggtggtattgacaagagaaccatcgaaaagtttgaaaaggaagccgccgaattaggtaagggttctttcaagtacgcttgggttttggacaagttaaaggctgaaagagaaagaggtatcaccattgatatcgctttgtggaagttcgaaactccaaagtaccaagttaccgttattgatgctccaggtcacagagatttcatcaagaacatgattactggtacttctcaagctgattgtgctatcttgattattgctggtggtgtcggtgaattcgaagccggtatttctaaggatggtcaaaccagagaacacgctttgttggctttcaccctaggtgttagacaactgattgtcgctgtcaacaagatggactccgtcaactgggacgaatccagattccaagaaattatcaaggaaaccgctaacttcatcaagaaggttggttacaacccaaagactgttccattcgtcccaatctctggttggaacggtgacaacatgattgaagtcaccactaacgcttcttggtacaagggttgggaaaaggaaaccaaggccggtgtcgtcaagggtaagactttgttggaagccattgatgccattgaaatgccatccagaccaactgacaagccattgagattgccattgcaagatgtttacaagatcggtggtatcggaactgtgccagtcggtagagttgaaaccggtgttatcaagccaggtatggttgttactttcgccccagccggtgttaccactgaagtcaagtccgttgaaatgcatcacgaacaattggaacaaggtgttccaggtgacaacgttggtttcaacgtcaagaatgtttccgtcaaggaaatcagaagaggtaacgtctgtggtgactctaagaacgatccaccaaaggctgctgcttctttcaacgctaccgtcattgttttgaaccatccaggtcaaatctcttccggttactctccagttttggattgtcacactgcccacattgcttgtaaattcgatgaattgttggaaaagaacgacagaagatctggtaagaagttggaagaccatccaaaattcttgaagtccggtgacgctgctttggttaaattcattccatctaagccaatgtgtgttgaagctttcagtgaatacccaccattaggtagattcgctgtcagagacatgagacaaaccgtcgctgtcggtgttatcaagtctgttgacaagaccgaaaaggccgctaaggttaccaaggctgcccaaaaggctgttaagaaataa

SEQ ID NO: 2689 - DNA, 432 bp, Saccharomyces pastorianus
atggcttctgtgttactgccccaattgcgtacaggatggcacgtagaccaggctattgtcacggagaatgaacggctcgtggtcatccgttttggtaggaaagatgatagacagtgcatgatcatggacgaactattatcttcgatcgctgaaagagtgaggaacttcgcagccatctacttatgtgacattgacaaagtcccggactttaatgagatgtacgatctcacagaccccatgactgtaatgtttttttaccagaacaagcatatgatgtgcgattttggtacggggaacaacaataagttgaactttacggtggatgacaaacaagaaatgatcgacattctagaaactatatttagaggagccaggaagaacaaaggactggttatctctccgtttgattacaatcacaagcgtgtttcatga

SEQ ID NO: 2690 - DNA, 1740 bp, Saccharomyces pastorianus
atgaatggaaaccgcatagtggagccagactatgacctgaagggactcaattcgggaaattcaagatcaaaaatggacgaagatcccattattagcaaatttcatagggctggtctcaatggtacagaggacgatgaagacagtagagccaatagcaaccgtaatactggctggatctcttcgatgataaacgacgaaaaacgaaaggtggaagggaaaataaagctgaatgacgaggaggatttacatttatccaaggccaccttgaataattgtgacgctttagtgaagattctaacggacataattaagctagagtttgttatccatcaatcatggtacattaggtccctttataagagtgttttgattcaatttgaagtcgaaacgaccaggagtaataaagaaagcgctgacaatagcgatgatgatagcgataaaaataacggtaacgaggacgatagtttttacaaggatttgagcctgaaatgcatcaaaaagtgtgaaaaatcgtcccttgcgcttgagtcgttatctaaagacattgacaagatgagagatttcataatgtctaggacgatagagaataatagagttgacatactattgcagaactcgatgacattattactagagtgttggatatacaccatgaagaggctgcgccatttgagaatgaaaatcgcaggcatttttgttagatccaagcttttgcttattgatcatgagctggtgaccatatggcattttctacaggaacaaagcaacgaacacgaaatggtaaataatgagaatgaactgaaactaagagaaacgataaaatcgtacagagcgttcattaagatatttattcagcagctagaagattctgaagtgggatctccgtcttcctccttatttgaagagtgtttacacgtcttcctggatatagaatcgatgtacaattcattaaacctgaattggttattgaatgagaataaggcattacaagaacgactgctgtcatcgtccccttcaccggaaaacggtcgtttcaagggtcttcccgttatcgatgaaagaaaggaaattgaagatattagctcatttgtcaatagtattgtcgatgcatccatgttaacgcatgatctgacaccaattaattcatcggacagtgatgacctatctaacggagtactcgatcgtctggatgaaagaagactatcttcgtctacctcagatatgtcattgatgatgcaaagaacatcactacagaaacaacttcccaccttattgaccgcttttagtaatgctagaaggctggaacaagaattgcaaaatgcatgcaagatggaagatgataagcatagcgctagcgatattaattccaacatacgacaaaacgaaagtggtatgtcttcgagtatctcctcactcatctctcaaacctcaacattggcatccccgtctcctccattgtcgtcatcctttctatccacagcaccttcgcaatcaagtccgcgcatggccacactaccattttcatcctcttcttccctactggaaacacaatcacaaacactaaaaaacaacatgtctcaatggctaaaccaaccgcgatctggcctcaatggcgcaaaacctatcccgacaaaccatatcggattccacagtaatgtcttaaatacgctttacggcatcggcggcggccccacaacaagagcttataagtctaatcaatctccatcacaaaacacatga

SEQ ID NO: 2691 - DNA, 1368 bp, Saccharomyces pastorianus
atgtcagaaaagatatctgaagaaagaccgatacggctggccgttctggggggaacatctaccggtaagacatcgctgatatctaggctgacagtcaatatagttcatgaggttcactacccaacaagaaaccaaactaactggctttttgactttgttcctacatcgatcttggctagaactatattagacgaacaagctcatgaaagactttcccttcgctccccaagcagccaaactctagagcctattttcccatccccagaagtctctagaaatgtattactgtcaccattagtatttcaagcatccaccgataattttcaagcagtgagattacagaataaaagccattctaagaggtctttgtcattagataagtccgattcgccgttctaccagactttttctaatgaaaatcaagaaacagatgtcctcaagaataacaaaacagataagtttaatattgctaaccattttaaattgcctctgaattacattcctcctgaatacacacctatccaaattgatattattgatacacctggtttcagtcctgatagcgtagtgccattcttggaagtatcacttttcagggatctaggaagatccattttgcatgggttagcagacgagccaagacagcctgtatccaccacttcattgttggttgcctctggtgcttctgagttaaatggtaaaattgacggctatgtttttatctatagtgcggtccctgaactaaaccatgctggaggccccccagaatatggagatgatgtactgagaacagatgcggagagagttgatgatggtggatttgagttattaaaagtaatcagaaattgcattttggatgcttggactgaattccgaaattatgagaaaagatgggaagaaggcaaagaagacgacatatattcattggtttacagtttgaaacatctttggagcaaaaataacaaagaaaagaccgccaagatagagcaattaagatcttataatactaaactgaaatccattgaactagacccttcgtctcctgattcaccgccaccatgtataattgtttgctctcatgttaatcatgagttggcgagtccaatgctaattgagatggggagacagctggcaccgaaatggaagtatgggtttgtgggtatagatagcatggatgatctcaatgttgatgtggccattagtctgctcatcaaggaactatcggaaaagatgaaactactaatcgcaaaccctgctggaagtggcagctgtttaaattcaacctacaaccctcatttgataaacgacaagaagaaaaacagcacatctggtttaaactcaagtatgtttaaaaaagttattaaatga

SEQ ID NO: 2692 - DNA, 1038 bp, Saccharomyces pastorianus
atgatgtctagggagagtgtagatagaagagcaggaagaaggggtcctaatcttaatatcgtcttaacgtgcccggaatgtaaggtctatccaccaaagatcgtagaaagatttagtgagggggatgtcgtatgtgctctttgcggccttgtactatctgataagctggtggacaccagatctgagtggagaacgttttccaacgatgaccataacggtgatgacccaagtcgtgttggtgaagcatcaaatccattattagatgggaataatctatcgacaaggatcggtaagggtgaaaccacagatatgagatttaccaaggaactgaataaggcgcaggggaaaaacgtcatggataaaaaggataacgaagtacaggccgcgtttgccaagatcaccatgctgtgtgatgctgctgaattacccaagattgtaaaggattgtgccaaagaagcctataagctttgtcatgatgaaaagctattgaaggggaaatcgatggagagtgttatggctgcgtccatattgattggttgcagacgtgctaaagtggcaagaacttttaaagaaattcaatcattgatccatgtcaagaccaaagaatttgggaagacattacaaatagtgaaaaacattttaagaggcaagagtgaggacggtttcttaaagatcgataccgacaatatgagtggtgcgcaaaatcttacttacatccctagattttgttcccatttgggtttaccaatgcaagtcaccacctctgctgaatacactgcaaagaaatgtaaagaaatcaaagaaattgcaggtaaatctcccattactattgctgttgtctccatttatttaaacgtcctgctatttaggatccctatcactgcagcaaaagttggccagaccttgcaggttactgaaggtaccattaaatccggttataaaatactgtacgaacacagggacaaacttgtggacccacaacttatcgccaacggtgttgtgtccttggacagcttgccgggagtagaaaagaaatga

SEQ ID NO: 2693 - DNA, 1620 bp, Saccharomyces pastorianus
atggttttggctgatttggggaagcggattaactctgctgtgaacagtgcgatctccaacacacaggatgatttttccacatccgtggatgttatgttaaagggcatcgtgactgcgctgctggagtcggatgtcaacattgctctggtttccaagttacgaaataatataaggtcccagctgctgagtgagaaccgtaacgagaaggccacaacaaatgcacaaacgaagaagctgattcagaaaactgtgtttgatgaactgtgtaagctggtcacttgtgagggtagtgaagagaaggcctttgtgcccaaaaagagaaaaacgaacatcattatgtttgtcgggctgcaaggttctggtaagactacctcttgtaccaagctagcggtctattactcgaagagaggtttcaaggttggtttagtgtgtgcggatactttccgtgctggtgcgtttgatcaattgaagcaaaatgctataaaagcaagaattccattttatgggtcatataccgaaacagatcctgccaaagttgcggaagaaggtattaacaagttcaagaaggaaaaatttgacataatcatagttgatacttctggtagacatcgtcaagaggaagaattatttcaagaaatgattgaaatatccaatgttatcaagcccaaccaaaccatcatggttttggatgcatccatcggtcaagccgcagagcagcaatccaaggctttcaaagactcatctgactttggtgctattatattaaccaagatggatggtgatgctagaggtggtggtgccatttctgccgtagcagccactaacactccgattatctttatcggtacgggtgagcatatccacgacttggaaaaattctcacccaaatcattcatatccaaattactaggtatcggtgatattgaaagtcttttcgagcaattgcaaaccgtttccaataaggaggatgcaaaggctactatggaaaacattcaaaagggtaagttcacattgttagattttaagaagcaaatgcagaccataatgaaaatgggtccattatcaaacatagcacaaatgattccaggaatgagtaatatgatgaaccaggtaggagaagaagaaacctcccaaaagatgaaaaaaatggtttacgttttggattccatgacgagggaagaactagagtccgacggtagaatgtttatcgaagagcctaccagaatggttcgtgtggccaaaggttcaggtacatccgtatttgaagtggaaatgatattaatgcaacagcaaatgatggcgagaatggcacaaactgcaacacaacaacaaccgggtgcacccggagccaatgccaggatgcctggaatgccaaatatgccaggtatgccaggtatgcccaatatgccaggtatgccaaaagtatcgccacaaatgatgcaacaagcacaacaaaaactgaaacaaaatcccggtctaatgcaaaacatgatgaatatgcttggaggtagcggaatgggcggtggaatgggtggaggaatgcctgatatgaatgaaatgatgaaaatgatgcaagatcctcaaatgcgacaaatggcaaagcaattcggtatgggttaa

SEQ ID NO: 2694 - DNA, 3687 bp, Saccharomyces pastorianus
atgagtcaatctatttcatcactgatcaaacttaagttccttcaatcacataacagtgataagaatagcgacagaaaagataggaccaacggtccaaggaacaaagacaaaaacagagaagatgaaggctataggagacctttcattcaattggcagaaatacaggagcatgcatcgaatgatgaagataaagcaaaccttagggaattcaagcctaccaaaaaacacagcaaactaagcagaatacgacataagatgagtaggctagatttgaattttaggtcaactagtgagagaggctccgaagaggatgagaatgcggatgctcaacacaatagcaaaggacaagattccaaggaaaagcatctcatatccgaatatgatacaaattcaatagagagagagcccaatcttaaccccgagaaaacgtcaattgtcaattttgggtctgataacatgaggaagaattcaaaacatatttctctttcgcttagtcctaccaaatccaccacggaaaaatttcctacctctaatagatcttctaaggaatatagaatgtcacaggactgctccttgtttaatggtgaaagattagctccgacgctccctacgatgagtagaatatctacaacttcttctattggttcgtctacagcggcttcaaggtacttcaacccatcaaaaagaaatgttgtagcatcatcatcgtcttcatcgtcagtgaagttcaatcctttacaccctataccaattgacacaacgcctcaaatagagttggccaaacaacaagacgaattatttaagaagagatttggaagaaggcgtagtaggaccgttgatgtatttgactatataaagaagaataacgcagctagaaacaagaccccattatctccaccaccttttattaggaccatcgatgagacgaatgcgagtattatgagaccggaaattattaggtctcacagtcctcttttgtccgatgataataacatttcaagctgtagtacaaacgagatagacacgagtcatttagatcatcaaaaaccatcaagatctagatcccagagtacatcttttgtacaaaataagagcggaaagagcaagtccaccgataacgaaaactataacggaaaattaggcttgcctcatgggtcgggtcctgcttcggtctacaataatacaagcaatgctaactcgactattatagggacgtcgagaagaagtagttcgatagtcaatgctttgagcagttttgttaatcttcgctcccccagtttatcatcatctaaacaacagcatcttcaacaacaacatcaactccaacaaaaattggacatctcgttgaatgatctaccaccgattccaacaccggaattcggtgattcatgcaaagattttttaattaaattggcgccatatgggaagttcattggggtcattctaactgagaaggaagatgatttcaacaaaaattgcttaagttatttattaacgaaccatttcgaatttaaaaacgatcccttggacattgccctccgaaaacttttaatgtttttagagcttccaaaggagtcccaacaaattgatagattgataatggaattcagtacagcatattataaatcacagaaaagtttctgtaagaagacgggaattgaatgcacctggttaaactcggatcaagtttatttcataacgttttccttattaatgctgcatacggattattttaatcctaacaacaaatgtaagatgacgaagcacgattttgtggatttggttcataatgataaatattcaaatggtagcgaggttcctattgatatactgtcatacttctatgaaaatgtcacagcaaaagagtcccctaagttcaattatttcgtgatgtcaccaatggccttggacgatagtgtctttgataaagatacatttgatacaaattttgctatttcactttcatccaactccatgtattctcctatagatatgataaaaaagggtagcatattatctaaggaatcctctatttcaccgaactattacccgttaacaacttcaaccagtggttcaaatatactcccatcgacaacagtttcttcaggtccatccaatacttctgccggtaacgggactaacctcggagtcaacaataataataatactagaccggcttcaaactcaatatcatcttatttttcacataacccaagttccggctctagcggatatgctacattatgtcaagatgatataaacatttattcgcatattttaaatgattcgttatgtgacgtaaatttgttttcagaggtttcgaaatactggaaaaaaaattccatgaaaatggatatgttaggaaaagaggaacatagatacgagaagtgtttcagtattatgagtggtaccaagggtggatacctacgtttccacagaagccaattaaataagttgcatttaccaaattttgaaatattaaatgatgatagccaagctggtttcaagaattcggaatataaatatagcaaaatccttcaaatgggagggataatgaacttgggtatgcccactaaaaagttttctattgtaaattcaggtaaaatacactggaaaaaggaatttgccatattaacgtcatttgggcttttgatctgcgataaaatggattggataaacccgcaaatgatgaacgatccaaaatcaggaacatcgaattatataattgatttcaaatccggcttttcctttgttccaggaaatatgatagatgtttttaacggattgtttgctgatagtgaacgagattcattggggaagtcgcattttgcaagtttgattcttgcgtattcagatcattattcggcaggaaatcataccaataatgtcacggcatcaagttgtaatatcaaacatggtgaaagaaattctgactcatcttcagatgatgaagaaaacgacagcgggcatatagatagcagcagcagtaggagtgacaacgaaagtggaactgatagtgtttccagtgcagacgccgcatcaaatgcaaatgtggacgaatataaagagggtggctctggcgaggatgacttttcgattcttcaggatgaagatggcgattgcctattatatctacacacatgtcatcgaaatttcatctggaaatgtgccaacaagtatgaaagagacaactggattgattccattaatttgttttcagcctacgacggatgctacgtggaaattggtagtatagcaaacacaatttgtaacaagcggaaaatcactgtttcacaacgattagaaagcctaaactcaatgagatcagaaaaacgggagaaactgaaaaaatgtgaacgaatcttgatgttattggggaaatgtgtacctattagtacgaagaccaggatggatatgatcaatgttataaggcagctggctgtcagaatggattggttagtttacgaaatcaaaagaaatgaattgtttataggtgtcataaagtatgtgacgtataaattgcaggtggggaaagatgaattgcataatggtaaaggggataagaaagaccagcatgggggtcatgataacgatgatattgatatcgacaaaagctttctgttcaacgaagatagtctacaagaatgtctggatgacagcggtggtgatgagtacaataacgagtaa

SEQ ID NO: 2695 - DNA, 3210 bp, Saccharomyces pastorianus
atggccggtcaagacgaacaggttttgaacccaactgaagaacactacttaaaaagagagctgcttcgatttcaactggaatatgaaatggaagggctaaatgatcagtttgccttgagaaagtttgggtatcctttttcgccaaacgatccaaaagcttcagagtccgttttcgatcacaattcatcatcacttcccagtggcaaaggcagttttagcgcaaattatcccatgttgagttatgttctacaagaattcatatctacttttcctttactttcaaccaatctatccgttgacgaaaagttttggcaaagcaaagtccaagtattttttgagcattttatgagtcttggttttagtgaaagttatgacagagaagaagcttcaaaaaggagaaaaatttccaaaaagttatcaaaggttatattgttgcttttcaattctggggtaggatcctctcaagagaaggcatattataatgaggacaagtttgttttacaatcgggccaagctaggaaaaggtccaatattgaaaaattcgcgatgccaactagagaaaatttggagaatttgttaactaacgaatctatttttatcaatggttgggatatcaatatcatatccgtgttcaacaagaatacgcggaaatctcatgataaggcagataatgagaggcctcccaaaaataaaccgatttcaacttctaagagctatggcatgaagtcgctggcatccacttccaaatggatgaagaacacgttcaacagcactatcaacagtacgataaacagtatgccagaatcttccgcatctttattttctaaattatctcttggcgtgccttcatccaaaggcaatagatctagaaagcatcattcttttttgataaaaattaaaaagcaagaaaacgatgatggcaacagcacagtaaacaacgaaaatggaaccttttctgaatatggctatatttctaaaacctacagtgatttcaaaaaattatctcatgatttgaagtctgaatttccaggtaagaaatgtcctcgcttacctcataaaaacaagaaagtcacatcgatggtgactaaaactgaagtgctgcgtaatagccgatctaaggccacaacgcgagaaaggattgttaatacctacgacaccgatattcaatccgcatcggattcggaaacgtcctcgttcttacaaacaactactgaaccatctgttaccgaagcaactcttactgaaaaggatactgaaactttgaagaaaaatatcttaaaagaaattaaagaagaagaaaacgctgaggaagaagacgaagacgaagaaggtgaggaaagtgattttgacgaatacaaagatgcgtcggattcgaaagtcaatactttggttggcgaaaaaatgagaacttcattaaggcaatacctgagaaatttgtgtaaagacttggaagtttctcaaagtgtctctcttcatcggttcttcttgagcggacccaaactagatgcgaaaaatttagaaccaaaaatagttgaggatatcaaaaacagagctctaattgatgttagtaatttggaaaatcaagtacgttttcaacaaatggcattggagaaatctttaaaattacaagattcaatgaaagatttcaaaacctccctattaaaagatgagaaatacttattaagtctattaggagaaatcaagaataatacgaaagttgagaatctctcaccacttttacaggactttgttgaatggtgtaaaatttatatttcctcgatgatctatcagatgtttctgggcaatgataacagttatgagctgtatactcaaatcaggcggttacataagctcatgccgtacacggtaatgggacaaatcatgaaattcactaatccaattgccgtcatgaggggaatgattgagttattcatggctcaaccctttggtggtcattcccttctacaaacgatgttctctacaattttaacagatgatttgaaaactcaaaaagtagctataaaagaattagaaaataaaatttctgagatggacccaggagcgccaaatgtggttaagtgtttgaaagattttattttttgtaatgataccaaggataaagacgacgccagacactttactatggatgcagtcaacgcggaggcagaatccatgaacatgcctgtaccattgatcatattgatgaagagtgcatccgcaaacttaatttcagatggcgttgtcgcaggactgattgaatcctattcttcgtggaaactacaaagagaagatatgggcacggtagttgagactgacgaagatcacacaggtgtctattttgctcatgttaaggatttattgcaattatatataaaagagcatgacaagcgattgatgaggcaattatggcaagatcctgaattaactcaaatgctgaaggcgatagtaacaatgatttatgagccaatggtcaagattttcaaaatcgcaagaatggatgttgcattaaagaattttgaaaaatttatgagtgatttgatcaagctagttgatgatgttatcaatggacaattgggcgtttctactcaattcaatatcgttgaaggaatccataacttagtgactaaacatcaagacgccttttttgagtttatacacgatgtgtatttaaacgattcggaaggtatttttgaaggttttattacctggattactacgatcgtgaaatttttgcaaaagagcaaatttgggcagcctggtgaaagaatcgatctgaacaatttgatttctagagatgacatcgatatcgatgttaaactactgaagattcaagtcaatgatgttcttaacaagaaaataaatgcaagaaaaatgtacaagaaactgctagatttaaaagttaaacaaggggccaagcagaataataagcatgcaacaagtatgctccaaaaaaattgggacgatattaactcattagtaatgccatcaagttctggatcatttggactcggggatggtgatttggttgacttggatcttgacacacacgattatgattttctgcataaagagaatgaaattgaactggagaaagaatatcaggatttgttgaatcatgttattgatgaaagtgaaattgataaattgagatcacaagttttcgcacaaaaattgaaggagtatctagaagcacaagtagctaaaaagtaa

SEQ ID NO: 2696 - DNA, 327 bp, Saccharomyces pastorianus
atgcaagctgcctcacctgtcatcctggctctcaccgctccgattgctctaactgctgcgccattaacctctttggtggtggcttctgttagtggattaactaatctattctggctattaccctggacccatagagtcaaggaacttagaaaagatgtcgctaaaaaatacagtggcgatgaattggaagcaaaggactctgtactacgcaaagaattcggcaaatctcacgggttgagtcttttatttaaccttttaaacgtgtgcggcatgcttgcatacggtgtctgtttgtcaagggggttattaagaaaaattccaaaatag

SEQ ID NO: 2697 - DNA, 423 bp, Saccharomyces pastorianus
atggttgttaaagctattgctcgaaattccataggacgtaacggggtgggagcatttgtgtttccatgcaaaaaggttactttgcagtactgcaactggggaggatcttcagaaggcatgaggaagtttttgacttcaaagaggctagacaaatggggccaggaatttccatggatacagtttgaagtgttgagaaagtctggacacccgctactgagggcggagtatacgaatggacgtgaaaaagttgtatgtgtgaggaacttgaacattgataatctagaaaacaagctaaaactattgaaagattccagtggagacattctgcgtagaagaacaaagaatgataacgtggaaagtttgaatagtagtgtaagaggtatatggtcccctctacatgctgcacagaagcatagggtttag

SEQ ID NO: 2698 - DNA, 525 bp, Saccharomyces pastorianus
atgtctgctaaagctcaaaacactatgcgtgacttgaagatcgagaaattggtcttgaacatttccgtcggtgaatctggtgacagattgaccagagcctccaaggttctagagcaattgtctggtcaaaccccagttcaatccaaggctagatacaccgttagaactttcggtatcagaagaaacgaaaagatcgccgttcacgtcaccgttagaggtccaaaggctgaagaaatcttggaaagaggtttgaaggtcaaggaataccaattgagagacagaaacttctctgctactggtaacttcggtttcggtattgacgaacatatcgatttgggtattaagtacgatccatccattggtattttcggtatggacttctatgttgtcatcaacagaccaggtgccagagtcgccagaagaaagagatgtaagggtaccgttggtaactctcaccaaaccactaaggaagacactgtctcttggttcaagcaaaagtacgatgctgatgttttggacaaataa

SEQ ID NO: 2699 - DNA, 864 bp, Saccharomyces pastorianus
atgcaagctattgccgatagttttagcacaccaaacactttggtaaaggaacttcagtacgacgatgaacagaatttagaaaacgatttcgtaacaggtgcatccaaatttcaacatttggcgccaacactcacggttccaccaattgcgtctccacaacagtttttgagggcacatacggacgattcgcgaaacccagactgtaagatcaagatcgctcatggtaccactactctagcattcagatttcaagccggtattgttgtggcagtagattctcgtgctaccgctgggaattgggttgcttcccaaacagtgaagaaggttattgagattaacccattcctattgggtacaatggctggtggtgcggcagactgtcaattttgggaaacttggttaggttctcaatgtaggctacacgaattaagagaaaaagaacgtatatccgttgctgctgcatccaagattttaagcaatttagtataccaatataaaggcgctggtttatccatgggtacgatggtttgcggttacactaagaaggaaggtccaaccatttattatgtcgattcagacggtacgagattaaaaggtgacatattctgtgtcggttcaggtcagacattcgcatatggtgtcctggactccaactacaaatgggatctatccgttgaggatgctttatatttaggtaagagatcgattttagctgctgctcatagagatgccttttctggtggttccataaatttataccacgttaccgaagatggttggatatatcacggtaatcacgatattggtgaagtattttgggaaatcaaagaaaaggaagggtctttcaataatgtcattggctaa

SEQ ID NO: 2700 - DNA, 2604 bp, Saccharomyces pastorianus
atgaaagaacaggtatcgagcacgtcatgggagggctcggtcattgaaggccgattgtctcggaatctagcgagatatactttgttgttagacaaaatagcgacattgtctcaagtcgacaaactatctgaggttatagctaatgactatgcagaacagtccaaacaattgagtacattcgtgcaagagtcgcagtcatcgcttaacaaacaatccaggaaactggaattacaaagaactgatcttacgactactttgactcactttcatgaaacagtgagcactatatcttcctcgaatacaagagcaaaggccatccacgatgatatcgagacagtggatcaagagcgtgcgctagtcgacaaaacactgcagtttgtgagagacgttagaacgctgaaaaataatatttcattggcacattcagctttggaaactaaagattatctagtcgctgcgacagcaatcaatgaaattagaaacttgccagacaaaaaattgattgtttctgagtttgccaagaaagtggtaccttcgagtgaaatccctgaagaaccgtctatactaataaaaaactggtgcaaagaattaacaggtttgttccaggagcacttcatgaaagcaacaagaacccagaatattaaagaattaacattgatgttcaagatgttccccatgattgggcaagacgtgctagggttagacttgtattccaagtacgtttgtgatattattgctgatgaaagtaggaaaattatgtctaattcaatggaaaacagtaccaagtttcagggatttttttcccaagtactattgcatcttttcaaaattgtatctactatcataaacgaccactcgaaagttattgccacatgttacggaaaacagcacatggtgcacgttatggaaaaagtagaaaaggaagctgatctccaggccagtttagttcttgacattttcatcgaaacacgaaaactagatagaactataagcgatatcaatgaatgggaacgtttacaaaagaataacgatcggaacaaaggtagtaatcagtcagattctgaaacagatgaggaggctcagcaaggctcagtcacatccatccatgacctggcggttttgatcgtagaattctcccagatattacaaaactggtccatgtatgctcgattctattcagttaaatggaatgaatttactgacttgcatccggatatcttgcaaccgcctccgcctatagctgacggtaaatttgcattgaaattgaaacaagatggaatcttggacgatttccaggttcttgtgttgagtcatcttcacaggtcattcaaaaacagtatcccattagaagaattaccttcactaaatgaccttattaccacagttccactcagtgacaacgatagaaactcatatcctgtgacatctgttttggatgatctaatattattagttcggaaaaacctgatatcagcggttaatactggtcaatttgaacttttatcaagttttctaaatgaagtagtcaagttctttcaaaatgaatttctggtcagattcatgcaaaataagttcaagtcgttacagtcaaaactaacaccaaacatatctttgaaaagatacatcccaaaaggagaagagcaatcttcagcatctaatgcatacgcatcatccagatcagtgtctccacctgcgaataaattctccccattaagcagattcacttttagaggtgcagctgcaagtgcattaacaaacatccaatcaaatttacaagctgttgtcgctgacgatgaggattccatcctggcactacatcactatttgatttatttgaacacgctgtatttgaacaagatgtatgtccacagactcttgtccatagaaatattagaagacgattcacaaaaaatcttaaaggacaacttccccttcaacaacgatgcagcgcagctacaaacgctgatagtaaattcagaaaaattagtgttggaacaaactgacaagctcagcaaatgggccgtcaaatacctgtttcaaaatattctacaaaacaaggtccgaaatttattagccgcagtttttgttaacattaatccatccaattcttcgacatcgaaccaaaaaaatatgtctcgtgataactctgcaggcgtaaaccaaaaaaattacatcacaagcatagaagatttcgaagatctgtcacaaataaacagctttaataacaaatggaaccaattaattactccttacagaaacattcttcacaaggaagcatatgtggagttattgtctaatatagttggttacattgttggaacactggaacaaaggatatggactctagagttcaatgaacttggcgttacaaaactagatagagaactaagcctgtttattggtaatatctgtggtctccactacaatctaagagaaatgtttttgaaattgacgcagattgtgttacttctcggcttagatgatgatagttttgatttgactacaggtgacatcaaggatgatttcgatggtacttttgattgggtgataacttcccagaaaagaatcaaagctaggagcatgaagattgatagaagacagtag

SEQ ID NO: 2701 - DNA, 1323 bp, Saccharomyces pastorianus
atgaacagcacaccccccacgcctccctttactggcccctccgatggcgtctttccgtctacaagtaagaacattgcttatcatcaaccgcaaaaacgtaatgctacctctacgtactcgcacctggtctcaccagtagaggaatcaactgcgaaatttagcgaagctttccaaatcacttattctgataaagattcagaagcggcctcagaaacgtaccttaagagcgatttggatatgttatttgcaacccctcggttctattccacagaaaatttagctgaaatgttccatctctctaagactgttccttcctcagaatttctaaacgaatttttgatgagtatgctactcgccccacagatggattttttatcgaacccagattatattcttccgtccaataaactggtcggccagggtagttactcgtatgtgtacacaatatcatcaaccatatcgtcggcgtcgagcaaggatctgccctttgttttaaagttcgccaaatcacaacacaagagcaaactggttttgcaggaagctctgacacttgcgtatcttcaatatgtgagtccgtcaactagtgacagccatatcattcctttttatggactgacgtacattaacaagtcacattttagaaggttgagatctaatgagcgtgtcccaggtattattcttccgaaatgcgaaatgaacttgtatgatttcaattcaacggtgtcagacaaactatctcccataggaaagaaagaaatatggcagaagttgctgatacagatggtgaatgcattaagaactttgaaaaggaacggtataatacatggcgacataaaaacagcaaatattcttttaacaacaaaaccaacccttaatgaaggttactccaacaattttgacttttatttggcagatttcacttcagcattccacatcaaccagctgcctactgacctgaacactacagtagagtactgtgctccagagcttattgatagctctttcgaccacgtttcaacttttgagacggacttgtatgctgtgggactttgtcttctgtcattcatctcccaacatgaaccctataacgaaattcaatcattagtgtcgcacggatcctcccctggtattggcagctcatccatacagcagtcccaatggttaataaatgcccttttgaaaagagatcccataaatttaaatgtgttgagaaacgacttgtttcaagactggagattggagttagcactcctgtccaaaattttggttgagagaatttcattggagaatctcataactatacttgaaaaggactatgtatga

SEQ ID NO: 2702 - DNA, 1290 bp, Saccharomyces pastorianus
atggtagatatggaagagaaaaaccaggaagttgaatatgtcgacccatccgtaaatagagtgcccaattatgaggtttccgagaaagcttttcttttaacacaaccaagggtgagtgtcgaacaacgtaaagaagcagcggattttgttttggcaaagatcaaagaagaggaaatggccccttattataaatacctttgtgaggaataccttgccaagagtggagaatcggatttggaacatgatggaaagtcaggatctcccaaagaatggatccaatttgaccaaaagctatacgatgatttgtgtgcaaagaatgaaaacaaaatcaatgaattgcacgagaagatccagaaattggaagaggacgatgaaggtgcattggagcaagcgcaagcatggatcaacttaggagaatactatgcacaaattggtgacaaaaacaatgctgaaaagactttagagaaatctctgtcaaaagctatttctactggagctaagattgacgtcatgttaacaattgctagattagggttcttttataatgatcagctttatgtcaaagagaagctggaagcagtaaactcgatgatcgaaaagggtggtgattgggagagaagaaacagatataaaacgtattacggtattcactgtttggctgtaagaaactttaaggaggcagcaaagttattagtcgattctttagccacttttacatccatagaattaacatcctatgagagcattgctacgtatgcgtccgtcactggtttgtttacccttgaaaggacagacctaaaatctaaagtaattgattctccagaactattatctttagtgtctacaactgctgctcttcaatctatctcgtcattaacaatctcactttatgcttccgattatgcgagctacttcccatatcttttggagacttacgcgaatgttttgatcccatgtaaatacttgaataagcatgctgacttctttgtcagagaaatgagaagaaaagtttatgcacagttattggattcatacaagacattatcattaaaatccatggcaagtgcatttggtgtttctgttggatttttggacaacgatctcggtaagttcattcccaacaagcaactaaattgcgttattgatagagttaacggaattgtagagactaacagacccgataacaaaaatgctcaatatcatctgctaataaaacaaggtgacggtctattgacaaaattacaaaaatatggtgcagctgtaagattaacaggatcggatcgtgtttga

SEQ ID NO: 2703 - DNA, 1695 bp, Saccharomyces pastorianus
atgtttcctcaaagtgatcaagaagtggacgatttgactgggaatatgagccatttggggtttcatgatttaaatacccccaagcttacttccctaaatatgcattatggatccgctaaaaactgtgaaaatgaaaaaccttctcccaaggccctaatggcacacaaatcaggtgatccgaatggtaaagatgccttgaaaggccgcatctctttgaaccaatcgccgaagaagctacctaaggatttttacgaacgtgcttctaagagtcagacccagagggtcattactgtatgccagctgtatttccttgattattattgtgatatgtttgattacgtcatcagtagaagacagcgtacgaaacaagtgctaaaatatctcgagcagcagagaaacataaaaaatgtgccaagtaagaccttaaatgaagaatggacatcatacttgcaaaaagaacatgaagtactgagaaaaaggagactgaagcctaagcacaaagactttcagatactaacacaagttgggcagggcgggtatggtcaagtgtatcttgcaaagaaaaaagacagtaatgaaatttgtgctttgaaaatacttaacaaaaaattattattcaagctaaacgaaacaaaccatgttcttactgaaagagacatactgaccacaactagatcagcttggctggtaaagctactttatgcattccaagatgcagaaagtctatatttagcaatggaatttgtgcctggtggcgattttcgtactttgttaatcaatacacgaattttgaaaagtggccacgcaaggttttatatcagcgaaatgttttgcgctgtgaacgctctgcatgaattgggctatactcatcgggatttaaaaccggagaattttttggttgatgctacaggacatattaaactgacggactttggtttagctgcaggaactgtatcgaacgaaagaatcgaaagtatgaagatacgcttagaggaagtaaaaaatttagagtttccagcctttacagaaaggtctattgaggatagaagaaaaatgtaccataacatgaggaaaaccgaaattaattatgctaattcgatggttggttcgcctgattatatggccttggaagttcttgaaggtaaaaaatacgacttcacagtggactattggtcgctaggatgcatgctttttgaaagtttggttggatacacaccatttagtggttcttccaccaacgaaacttacgaaaacttaagatattggaagaaaactttaagaaggcctcgtactgaagatggacgggcagcattctctgatagaacttggaacttggtcacgagactaatagcagaccctatcaatagagtgcgatcttttgaacaggttcgcaaaatgccgtacttcactgagattaatttcgaaacattaagaagaagctcaccaccatttattcctcaattagataacgaaacggatgcaggctattttgacgattttactaacgaagaagacatggctaaatacacagatgttttcaaaagacaagataaattatcttccatgatcgataactcttctgtgaattccaaattagttggttttacctttagacatagggacgggaaacaaggttcgagtggaattctatacaatggttcggaacattcagatcctttttcaaccttttattag

SEQ ID NO: 2704 - DNA, 663 bp, Saccharomyces pastorianus
atgagttcgcatactacaccagaaaaggtcactacagagcatgttctgtggtacatccccaaccagatcggctatgttcgcattatcactgcagcccttgcttttttcgtcatgaagaaccacccaatgatgtttacatggctgtacactacgtcgtgtatgctggacgcactagacggcaccatggccagaaagtacaaccaggtgtccagtctgggggccgtgttggacatggtcacagacagatcaagcactgctggtctgatgtgtttcctatgtgtgcaataccctcaatggtgtgtttttttccaattgatgttgggcttggacatcaccagtcattacatgcacatgtacgccagtttaagtgctggtaaggcttcccacaaaagcgttggcgagggcgagtccaaactgctacatctatactacaccagaagagacgtattgttcactgtttgtttcttcaacgaactattctacgcagggttgtacatgcacatcttccctcaatacgccaactttgggaaatggacctctctaataagtttccccggctatgttttcaagcagatcgcaaatgttgtgcaattgaaaagggccgctttgattctagccgacaacgatgccaagaatgccaatgagaagaacaagacttactga

SEQ ID NO: 2705 - DNA, 948 bp, Saccharomyces pastorianus
atgaatgtcctattgacgcttcctcagccggaattatttaagacgacggtgattccgtgtttggtgaaacacaatctgatcaagtcggaagcaattctctccaacttacattcggttttttacgtcgctatattttaccatatctggttcctttttggtaagtggatcctattcccaccgctggttagatggaaactgaactacgatcaagtgcatggcgaaaagaaagatgagaaggttagtcctgaacgtcaagctcaacattacaagaagaaaagcacctctttgatcaaccaaagttccgttcacttgatatctcttctacaaagcatagtggttttatactactcattgaagttcttactagatccaaaggcgtcagccgagccctatcaaacttcacattctcgagtatttgcagaaaccagagacacccaagtcatctgtattttcgccattggttacttcgtttgggacatttacatctccaccatgtattccacctttccctttgttgtccacggaatcatctccacagtcgtgttctgcatcggattgaaaccgtacatccagtactatgctcctgtgtttttgatgttcgaattgtcgaacccctccttgaacttcagatggttcggtatcaaattcttaccccacaaaagtaaattctgctccttaatgctgctgctgaacaatatggccctcatggtcatcttcttcgtggccagaatcgcctgggggtggtaccaaattgggaagctatcctacgacttctaccaggtgcgcaacgaacccggatttgctgtcttcgacaccatcgtcatcctcgcaggtaattttgtcctggacgtcttaaacgtaatctggttctctaccatggtctctgtagctgcaaaggtctttaagaaggggaaagccgaagacaaagtcactaagactgagaaatga

SEQ ID NO: 2706 - DNA, 1473 bp, Saccharomyces pastorianus
atgtccaaccaaacagaagatacagaaaactcacagaataccagctcatctagatttttgaggaatgtacaacggttggctctaaacaacgtaacgaacacaacttttcaaaagagcaatgtcaataactcatctctgacgaatttcaaatcctcattgaactctgcaaaaaaggaagggagccggattccacaatttagtgtaccaaggccaacagccccattggaggagaaaaaaattattctgacagataacaagacaaattcactccccatcaacaaatcttcagatgacaaagagaaccaagatccaagcagtaaaaaattcggcagcttggcttctataaaagagggaagcaatgaattgcctgctattaaaagtatacaaaaattcacttctactgaggaggtgatccaacacaatcccttaaaaagcataggctctggaactgatactgttaagaaaccagttgaaaatgaaaaatttcatccagctagaaatcagcttgaaatcagaaacaaagaagttgaaaatgatagtggcaagaaaagaccaatttctacgattgtcgaacaagaattacctaaaaaatttaaagtgtgtgatgaaaatgggaaagaggaatacgagtgggaagatttggatgcagaggacgtcaatgaccccttcatggttagcgaatacgtcaccggtatattcgaatatcttcaccaactcgaagtcatcactttacctaagaaagaagatctttaccagcacagaaatatccatcaaaaccgagatattctggtcaactggttagtcaaaattcataacaagttcggcttgttgccagagacattatatcttgccattaacatcatggacaggtttttatgcagagagctagttcaattagacaaattacaactggtgggtacgtcatgtctgttcatcgcctcgaaatacgaagaagtatattctccaagtataaaacattttgcctcagagacagatggggcatgcacggaagacgaaattaaggaaggcgaaaaattcattctaaagacgttgaagtttaacttgaattatcctaatccgatgaattttctaagaagaatttccaaggcagacgactacgatatacagtctcgaacgctcgccaagttcttactagagatatcattagtggattttagattcattggaatattaccttcattatgcgccgctgctgcaatgtttatgtcaagaaaaatgttgggcaagggcaaatgggatggcaatctgatacattatagcggcggatataccaaagaggaacttgccccagtatgccacatgataatggactacttggtcagtccgatagttcacgacgaattccatagaaaatatcaatcaagaagatttatgaaagcgtctataatttccgttcaatgggctttgaaggttaggaaaaacggctatgatataatgactttgcatgaataa

SEQ ID NO: 2707 - DNA, 3627 bp, Saccharomyces pastorianus
atgtccttgagagaggtatccaattatgagattcctttttacatcccactgtcttacggaaacaggacccataaaatttgcaaactcccgaatggaatcttggccttaataatatcagatccaacagatagctcaagctcatgctcgctgtcagtttgcacaggctctcacaatgatccaaaagatattccgggcttggcacatctttgtgaacacatgattcttgctgcaggttctaaaaaataccctgacccaggtttatttcatacactagtcgccaaaaataatggctcgcaaaatgcttttacaaccggagagcagaccactttctactttgaattacccaatacccaaagtaacggcgaacttgcattcgaatcaactttagatgtgttcgcctcatttttcaaagaaccgctctttaaccctttgttgataggaaaagaaatatatgctatacagagtgagcatgagggaaacatgtcatcaacgacaaaaatattctatcatgcaacgaggatgttggccaatgcagaccacccttttagccagttctccactggaaacatacactcattgtcaagtattccacatttggagaaaataaatctgaaaaactctctgaacacatatttcaagaataatttttatggggaaaatatgacgctctgcatgagaggttcacaatccgtaaatattcttacgaaattagccatttccaagtttggtgatataagccttaaaaataacataagagggagcaacttttcgattaaggcagggtcatttcgaagatcgcgatcatttcgaagatctcaggacgtctctcgaattggttcctggaatttagaaaactctaaaatatcagacaccgtatgggaggagaaatatgggaatattagttgttttgaagatgcttcaagatataattcaatattcatcaattcaagcaaagctccaattatgaggtttttatttccagtctctgacaaaaataccagattcacgaagaaagacattaaaatatacagtcatttatggcgcgaactctttggtgatgagtctccaggatctttgagccattacctagtgtcaaaaggctgggctaccagttctttcgcctttacctcagaatttgctgtcggtagtataggattagtgttagagttagaacttacaaaatccggctggaaaaacgtggagagcgttgcaaccacgatattttctgagctactgccttccttttgcgcaaaaaacgttgaccatttaatcagttttttaagagaacagaatttaattgacatagctcgttttttgtatcagaattcacaggatttgcctatggaagaatgttcacagttaagtggcgttctccaagaaaatttagagtgcctgaccccctgcaatatttttaaaggtttcaaatctctcatagaaatcaatgatcctaacattgaaaaatatgaagacagtaagcccaacgttcaatggtggacaggtcaggcaattaagtttcaaaacttcttgaaatcatttatgaatcatgagaatacgcgacttttattgttaggagatataaaatcttgcaatctgtttgataaaatcgaagataagagcgaaatacacactgagtttttctatgagtttgaatattatatggggaaagttcacttgtcagaagatcacgatcctcactcacaaagcgcatatgaatttaatttcccgacaaataatccatttttaccagattttgttaatgatcctttaaggctgcagcagctttacttagagtgttcactaaaatcaaaatttgctacgctaaggccccaaattcaaagtgaacccatcaaaatactacctcagttagtcagcaaaaatttgaattatgaaatgtgggtcttgaaagaagatccaaatttcacttcagacaatgtatcagtagtatcttttgaagtaataggactgggcattaaacctagcccagaagcgacgattcatttggaagttttggcacaaatattgtttattaccacctcttcagacctctatccagctctaagggctggttatacttacgagatcgcgtcctctagtaagggcaatgtcacactccgatttaccatttctgggttttcagagggtgttttcaagataacaaaagcattcgtagatacgttaaaactaattgcaacagatcccacgttcccttcaaaagacgctttgagaaaagcaagaattctggttagaagcaaatacgagagtgcatcatcggataactgcgtgaaactggctagcattggtttgttgatcgtcttggaggaatacatgtggaccctacaggatagaattgatgcattagagcttacggacatggagtctctaaaaaattttagttcttcattttggaacaatccaaaacagttggccttgctcattcaaggaaatcttgaatatgcagacgaaatcaaccactacctgaataataattttacgcagcacctaaaagtgtccaatgaaaggaacaagccgactatacgcctttatccttcgcccaatactaaagatatagatccgggcacaaatgccttcatatcttgcaacggtcatcaagatgaccccaacaatagtcttgcatattttattcaaactgcacaaagagacgatatcgaaaacctgacattaacgttcctcacggaatatatattttcactaacattagtacctgatttaaggaataagaagcaaatagggtacatcgtcttaagcggactcagaatcttgacagacaccataggaattcatataactgtgatgtctggaagctcggcgcatagccttgaaactaagatcaatgagtacttatcttatttggagctccaggtccttaataatttcaccgaatccagttttcgaaggatacttctggaacccttcctagccttactagagaagaacaatttcaacaaacttaaaacactgtccggtcctgcaaaccttttaaatgaaatagtggccaatgttcaaaacggcgacaattatattctcaataataggcaaatgaaacatcaccgaaaagtaagaaatagcattagcgagaaacgactccatttccaagaggataatgaaatggttgacatcctattcttgcaaaaattaactttaaaagaatatttggaatttttcagatcaaaaatttctatatattccaggcaaaggagtaagctatcaataatgattacgagcccaatggcagaggaagagattgcaagtagaaaaatgtttctgcaattagaagcctttctgaaaatgaaagggtttgcgataaaaagtagagacttggaaaaaattgttgaggactcaaaaggtagtcctgttcttcttctcaagaacctcttcactttttttcgtaaaagaagtgaagcttttaaacttggtactgttgtattgaaggagatatcgaagatcatcgccattaatttcaagcagacgtacggctctgtactaggcttttcttctcaagacagcgaactgcaaggcatagacaagtactggaatgcagatgtagaaccgattgttcctcttcgagagcttccttgcccaaacgttttccggaaatacgcattttaa

SEQ ID NO: 2708 - DNA, 1359 bp, Saccharomyces pastorianus
atgctcagatatagctctttgccaatcaagagagtaatccctcatccggtcccaagaaccgcgctcactgcatctcgtcttgcgttgtcaagatcaagcataataccgctttacaatccaagtttccaccgttggaactcttcgacgtctaaagacccaaaagacgattcgaagacagtgaatgaaaagcaggaaaagttaacagaggttcttccagtaaaaaagaagctaccattgaaggtcaagatccaaaacgctcttcgtcattattgggacggttccaaacttttagggttggaaataaaaatctcttctaaattgttgatgaaaagtgccgcaggttacccactaacaagaagagaaaacctacaattgaaaagaactactcaggatatcatcagactggttccgtttgccgcgttccttattatcccatttgccgagctacttctaccgtttgcattaaaactattccccaatttacttccatctacttacgaatcgagcaaaaaacgtgagaacaaactggaaaatttaaggaacacgagaaagttaatgtcccaaattattaaaaataacaagccccatttcaagcccaacaacatctctgaggaacaaaaggctttattcaacagattttacactcatgttcgtgctactggggtgcccgaatctcgtcaacagttgattgaggtagccagactatttactgacgataccgtgctagacaacgtcacaaggccttacctaattgcattggccaaatacatgaacttgcaaccgtttggcacagacgtgatgttacgttaccgtatcagatacagtatgcttgaattgaaaaaagacgatttgtccatttactatgaagatgcggaacaactttccctgcccgaattgaaaaccgcatgcgcttctaggggtattagaagtgtggatgtggatgctagcgtattatattcgaatttgagattatggctgaatatgaggctcaaggacaagatcccagcaacattgctgatcatggctactgcttacaactacggtaacgtacaatcgaaggagtccttgtacgattcattatgcgatgtcctcatcggtattccagatgagctataccacgaagttaaagtgaatgttgtcaaggaagacgaagcgtccgccaagcagaaattgagacaattgagagaacaggaagaaatcatgaaggaagaagaacaacaagaagaaaatgccattgtgagcgtgaaggacgagctgagcttagacgaccaagaaaagaacttggacgcagccgtcccagaagtccaactaaaagaaaccaaaactgctggagaggctgactccaccttaaagaagtag

SEQ ID NO: 2709 - DNA, 1053 bp, Saccharomyces pastorianus
atgtcacagtacatcggcaagaccatctctttagtctctgtgactgacaacagatatgtggggcttttagaagatatcgattctgaaaagggtaccgttactttgagggaggttcgctgctttggtaccgaaggtcgtaagaactggggtccggaagaaatctatccaaaccctaccgtatacaactcggtgaaattcaatggtagtgaagtcaaagacttgagtattttggatgccaacatcaatgacattcagcctgttgttcctcagatgatgccacctgcatcacagccctctccttcccagcaagatcagtcgccacgccaagcccaagctcaagcccatgcccagccacaagctcaagcccaagcccaagcgcatccacaggccgtaaagcccgaatccaatgtacctgctgcggttgctggatatggtgtttatacaccatcttccacagaggccactactgccaggaaagataatgtgaacccaccgaatagggatgaacgtaaagacggtgattttgagcaaagatatcaaaggaacaaaccaactaaccgggctcctcaatcgaaccgcagccacaaggtcgaaattccaaatgaagactttgactttcaatccaataacgcaaaattcactaaagaagattccactgatttggaaaaggaacaggaattggaatctgctgctgaaaaagaggacgaatccgatgaggcgttctataacaaaaaatcgtcattttttgacactatttcaacctccacggaaaccaataccaacatgagatggcaagaagaaaaagtcttgaatgttgacacattcgggcaagcttctgccagaccaagattcaactcaagaggtcgtggtcgtggccgtggcggcaattacagaggtaataggggaaacagaggaagaggtggccaacgaagtggctaccaaaacagaaataactaccaaaacaacagaggtggctatcaaaactatcaaaatgattctcaagataggtcctccaaccaattctctcaacctccttccaatgtcgaattttag

SEQ ID NO: 2710 - DNA, 588 bp, Saccharomyces pastorianus
atgacgacaattcagccttttgagcctgttgacttgttcaaggctaataatgtcaacctcgatattctgacagagaatttccctttagaattttattttgagtacatgatactatggccagatctctttttcaaaagtctagaaatgacagttgatcctgatttcaagcacaatatttctggttacatgatggcgaaaacagaaggtaagacaacggaatggcacactcatataaccgcagtgacggtcgctccaaggttccgtcgaatatcgctggcttcaaaattatgcaccactctagagaccatgacggatgttatgccccacgaagtcaactttatcgatctttttgttaaatgcaacaaccaattggccataaaactttacgaaaaattagggtacagtgtctacagaagggtagttgggtattataactcaagcgaagatgggtatccagacacattgaaaaaagtagatgacaacaaggacgcctttgatatgagaaaggctatggctagagataaggccaaaagtgtacggccagatggaagaaaccataagtgttatccgcatgatgtaaggttttag

SEQ ID NO: 2711 - DNA, 153 bp, Saccharomyces pastorianus
atgtttggtctacctcagcaagaagtctccgaagaagagaaaagagttcatcaagaacaaaccgagaaaacattgaagcaggctgcttacgtggctgtgttcctctgggtttccccaatggtttggcatttggtgaaaaagcaatggaagtaa

SEQ ID NO: 2712 - DNA, 1722 bp, Saccharomyces pastorianus
atgtcagacgccacccaacaaagaaagaagaagagatccagagaagaggttgatcgttcaagacctgcagtagatgaagaaattacggatccatcctcgaatgaagatgaacagccagaaattactgacgaagaagatgaattggagtctgaagaagaatttgagggggaaaatcctgctgataaaagaagaagactagcaaaacaatatttagataatctgaaaactgaagccaatgatattttaaccgaaaacggaaatgatacagaagaggctcagaagcatatgacggagaaatccgttgataattacaataactttgatgctggtgatttggataaggatatcattgcatcgagattgaaagaagatgttgctgaacaacaaggacgagtctttagacattttgctgataaacttctaatttccgaagcaaagaaaacctttaccagagtaggagaaaaaaatcctacctgcattagttgtttccaaccagtcttgaacaagtttacttttgaagaatcatccaatggtgataagaacaagggcagactatttgcctacacagttagtaaagacttacaactcacgaaatatgatattaccgatttcaaccaaaggcctaaaaagttaaagtatgccaaaggtggagctaaatacatacctacaaataagcaagaatatgagaataccgcagaaggtcactatgatgaaattttaaccgtagcagcttcgccagatggaaaatatgttgttacaggtggaagagatagaaagttaattgtttggagtacagaatctttatcacccgttaaagtgattcccacaaaggaccgccgaggagaagttttatccttagcttttagaaaaaattctgatcaattgtatgcatcctgcgctgatttcaagataagaacatactcaataaatcaattttcccagttggaaatcctttacggacatcatgacatggtagaagacatatctgctttggcaatggaaagatgcgttactgttggtgctcgtgacagaactgccatgctttggaaaattccagatgaaaccaggttgacatttaaaggtggcgatgaacctcaaaaattactaagaagatggatgaaagagaaagctaaggagggagaagatgggaaagttgaatatcctgatgagtcagaagcacctttgttcttctgtgaaggaagtatcgacgttgtgagtatggtggatgactctcattttttaacaggctctgacaacggtagtatatgcctatggtctctggcgaaaaagaaaccaatttttactgaaagaattgcccatggcattttacccgaaccctctctaaatgacatctctggtgaaactgacgaaggattaagaaaaagacaggtgcaaggtaagaagttgctgcaaccattttgggttacatctctgtacgctataccatattcgaacgtatttgtctcagggtcttggaacggaactttgaaagtttggaagattagtgataatctaagatcatttgagttactgggtgacctatctggttgtaaaggtgtagtgagcaagattcaggttgtagagagcggtaaacacggtaaagaaaagttccgtattttggctagtgtagctaaagagcataggcttggtagatgggttgcaaatgttccaggtgcaagaaatggtatatattctgctgttattgatcaaacaagtttttaa

SEQ ID NO: 2713 - DNA, 1470 bp, Saccharomyces pastorianus
atggctcgtcaagacggacatttatggacagaaacatatgatagttccacggttgctttcatgattttaggggcagccctggtcttcttcatggtgccagggttaggttttctttattccggtttggcaagaagaaaatccgccctggctttgatttgggtggtgatgatggctaccttggtgggtatattacaatggtatttttggggctactcactagcgttctccaagactgcaccaaataataaatttatcgggaatttggattctttcgggtttagaaacgtttatggtaaaatctcagatgactctacatatccagaattgatttatgcagttttccagatgatgttcatgtgtgtggcattgagtattatagccggtgccactgcggaaagaggtaagcttttcccacatatggttttcctctttgtttttgccactttggtttattgccctatcacttattgggtttgggctcccggtgggtgggccttccaatggggggttttagattgggctggtggtggaaatattgagattttgagcgccgtggccggtttcatttattcctatttcttaggaagaagaaaagaaaatctcttaatcaattttagaccacataacgtctccatggttactttgggtacttgtgttctctggttcggttggttgcttttcaatgcagcaagctcattgtcgccaaatatgagatctgtctatgcctttttcaacacaaatattagcgcgaccacaggtggaatgacatggtgtctattagattatcgttcagaaaaaaaatggtctactgtcggactgtgttcaggtattatttgcggtttggttgcggccactccaagctccggctgtatcactctctatggctccttaattcaaggtatagtggccggcgttgtctgtaatttcgccacgaaaataaagtattatctgaaagtagacgattccctggatttactggcagagcatggtattgccggtatagtgggtctgattttcaatgcgctatttgcggctgattgggttattgggatggacggtaccaccgagcatagaggtggctggttaactcataactggaaacaaatgtacatccaaatcgcatacatcgctgctgtggccggatattgtactgttgttacagcgtttatctgctttgtgttaggtaaaatccctggtatgaacctaagagtcacggaggaagctgaagctttgggtttggacgaagatcaaatcggcgagttcgcttacgattacgtggaagttagaagggattactatcaatggggcgtggacactgatgccctccataccacttgtaatggcggaaaagctgcgcctgagacaaattctactgaagacagccaaaactcttcactatcttcagccaccgtaagtggccaaaatgaaaaaactaaccatcttaaaccacagcactcaaaagaagcatag

SEQ ID NO: 2714 - DNA, 1155 bp, Saccharomyces pastorianus
atgtcctttaaagatgttttagatagaggggatgaatttttagaagcatatcccagaagaaaccccttttggaggttcatgtcatatagcacatcgttgttaaccttcggcgtctcaaaactgcttatatttacatgctataaagtcaaattgaacaattatgaaaagctagaatctgttttggaacgctccaagaatgaaaacagaggtcttatgacagtgatgaatcatatgagtatggttgatgatccgttggtttgggcaacactgccgtatagtctatttacttcgttagataatataagatggtgtttaggcgcacacaacgtttgtttccagaataagtttttggccaattatttttcactgggccaggtactgtctacagaaaggttcggggtgggaccgtttcaaggatctatagacgcctcgataagattgttaagtcctgatgacactttagacttacaaaggtcttctcattcggagagttctgtttcgtctcgaaaaatgcaggaaacctacactccacccattataaggtcaaagccatcttgggttcatgtttacccagaaggatttgttttgcaattatatccgccttttgagaactcaatgaggtatttcaaatggggtatcacaaggatgattttagaagcaacgaaaccacccattgtggtacctatattcgcaacagggtttgaaaaaatagcttccgaagcagctaaagattcaatgctaaagcaaatcctgccgaggaatttcggaactgaactgaacgtaacaattggagatccgttggatgacgatttgattgaccgatataggaacgagtggaagcatttggtcgaaaagcattacgatcccaaaaatccaaacgatctctctgacgaattgaaatatggcgaagaagcgcaagatttaagaagtagattagccgctgagctaagatgccatgttgctgaaattagaaatgatattcgcaaattgccacgtgaagacccaagattcaaatctccttcatggtggaaacgatttaatacaacggaagggaaatcagatccagatgttaaagtaatcggtgaaaactgggccataaggagattgcaaaagtttttgccctcaaaagatgatcccaattgcaaagacgattag

SEQ ID NO: 2715 - DNA, 720 bp, Saccharomyces pastorianus
atgggacctaagaatacagtaaaagctacacagaaaaagagaactagaagagacgcagaggatgggcacaaaaaaaataaggtagagttgaaaaaaaaactggaaaaagaggctgcatcggaagaagaagaggaagcaagtgaacaagacaattcggatgacaaatcatctggagatgacaatgaggacggcgctgaagtagaagaagatgaagatttcccaagaaaaaggaaatcgaagaaaagtaagcatgacgatggttctgctgacttctctactgccgtcaatgctattctgtcatcgcacttgaaggcatatgacagaaaggaccctatcatggccagaaataaaaaagtgctgaaacaaactgaaacagaaaagctagaatacaaggccaaaaaggaaatgctagccgaaaaaaagaagctgttaggaaaagctagaaaacgggatattattcccattacggcgggagaaggaaaatctggaaatgtcagaaaagtacttgaaaaagaaacaacgcttagaaagattgcccagaagggtgccgtgaaattattcaatgccattctagccactcaagtaaaaacagaaaaggaagtcactgagaacttgagtggaataaagaataaagaagaaaaaagagaactaatcactgaagtttctaaagaaaagtttttggatttggttaaagccgccgcagtaaacgacaatgaatag

SEQ ID NO: 2716 - DNA, 1719 bp, Saccharomyces pastorianus
atgtgtggtatttttgctgctttcaagcacgaagacgtgcacagatacaaaccaaaggctctacaactatcaaagagaattagacaccgtggtccagattggtccggtaatgcggtcaagaactccactattttcgttcatgaaagacttgccattgttggtttagactctggtgctcaaccaatcacctctccagatgaaaactacatgctatgtgttaacggtgaaatttacaaccacattcagctaagagaagaatgtccagactaccagttcaagacgctaagtgactgtgaacccatcatcccaatgtacttgaagcatgacatcgatgctcctaagtacttggacggtatgttcgcttggactctatacgatgccaagcaagatcgtatcgtagcagccagagacccaatcggtatcaccactttatacatgggccgctcttctgcttccccaaagaccgtttattttgcatctgaactaaaatgtctcaccgacgattgtgacaccatcactgcattcccaccgggccatgtatatgactctaagaccgacaagatcacacgttacttcaccccagactggttagatgaaaaacgtattccaaccacaccaatagactacttggctatcagacactcattggaaaaagctgttagaaagagattaatggctgaagttccattcggtgttcttttgtcaggtgggttagattcctctttgatcgccgccatcgctgcccgtgaaaccgctaaggccaccaacgatgtggaaccatccacctacgataacaaggccagacacctagcaggtgtcgacgacgaaggtaacctacacacagctggctggacaagtctccattcctttgccatcggtttgccaaacgctccagatttgcaagctgccagaaaggtcgccaagtttatcggctctacccatcacgaacacactttcacactgcaagaaggtttagacgctttggacgatgtcatctaccatttggaaacctacgatgtcaccaccatcagagcatccactccaatgttcttgctatccagaaagatcaaggctcaaggtgtcaagatggttctttccggtgaaggttcagacgaaattttcggtggttatctatatttcgcgcaagctccttctgccgcggaattccataccgaatctgtgcagcgtgttaagaacttacacttggctgattgtttgagagctaacaagtctactatggcttggggtctagaggcccgtgttccattcttggacagagaattcttgcaattgtgcatgaacatcgacccaagtgagaaaatgattagaccaaaagaaggccggattgagaagtacattttaagaaaggccttcgataccacagacgaacctgaaactaagccatacttgccagaagaaatcttatggagacaaaaggaacaattttccgatggtgttggttactcctggattgacagtctaaaggatactgccgaagctgtcatttccgatgaaatgttcgccaatcctaaggctgaatggggcaccgacatcccaaccactaaggaagcttactggtacagattgaagtttgacggcttgtttcctcaaaagactgtcgctgacaccgtcatgagatgggttccaaaggctgattggggttgtgctgaagatccttctggtagatacgctcaaattcatgaaaaacacattgattaa

SEQ ID NO: 2717 - DNA, 915 bp, Saccharomyces pastorianus
atgtctatacaagagtacaccaaatccaagttaccgtgctcgatattgaatattaagcccacagttaccacagacaacaaagatgctccattgctggtgtgggtccctggtaatcctggacttttacactactatcaagagatgatccatcatttacatttgaagcatcctgagtgggagattcttggtatatctcatgctggtatgagttcgaatgcgcattcaaataccccgatattttctttacaagatcaagtagatcatcaggttgaagtaattaataatttttcgcacaaggacagaaaaatcattatcatgggacattcggttgggggctacatcgttcaaaaagtttgtctctctaacgagttggtcggttctgtaacaaaagtcggtttaattactccaactgtgatggatattcatgcctcagagatgggcgttaagatgacaacggcattacattatgtccccgccttggctcatgttttatcacttattagttatgttattttttattgggtcttgtcagaagggttttcaaaattaattattaacaaatcaatgggttgtggaaccaccgattcccgagctgtactgtccacgagattattcttgactcacaggcagttcgtccgtcaatcgctcggactggcctctcaggaaatgaaagagataaccactaactgggagtttcaagataaatttatcaactactgcgaagagaacgagatttttacttggtttttgttcagcactaaagaccattgggttactgatgaaactagaaaacatctttcacattactatcatgataaagtcaagcaagaaaagttaaggattgatgtcacggacaagatacctcattctttcgtggtgaaacatgcagaatacgccgttaatgcctttttttaa

SEQ ID NO: 2718 - DNA, 522 bp, Saccharomyces pastorianus
atgctagccccagtcgataacattctgcgtataataaattttatatttctggtcatttccattgctctgatcagttcgttgctgaacaccgagagtggcaatagttcaagaataaactattgtatgtttgccgttgcatatgctatagtcaccgattcattgtacggtgtctttgccaatttctttgaaccattggcatggccgctaattttgttttcacttgactttttgaatttcgttttcacgtttaccgccggtaccgtgttagccgtcggtatcagagctcactcctgtagaaaccagtcgtacctattaagcaacagtatcactcaaggttctgctaacagatgtagagagtctcaagccgctgttgcattcctttacttctcgtgtgccatcttcttggccaagaccctcatgtctgttttcaacatgatctccaacggtgccttcggctctggttctttctccaagagaagaagaactggccaagtcggtgtcccaaccatttcccaagtttaa

SEQ ID NO: 2719 - DNA, 648 bp, Saccharomyces pastorianus
atgtctgcttcattggtcaatcgttctctaaccaacatcagaacagaattagattttctaaaagagtcgaatgtcatctcgaatgacgtctttgatcagataaataagagcctaccattgaaatgggatccctccagtgcccctcgtggttctaattcggcttctctggaatacgtagaagccctttaccagtttgatcctcaacaagatggcgatttgggcttgaaacaaggtgacaaggtccagctcttggaaaaattatctccagagtggtataaaggtagctgtaatggtcgcaccggtatttttcccgccaactacgtcaagccagttttctctgattccgatgcgcaacaacgcctcccaccacctccacaatataaagctcaagaattacaacaaatcccaacccagaatagtaatgtgtcatcctatcaacaacaaccattccccccaccttccactaactactaccaacaaccaccacagcagctgcaacagcagccacaacaacctcctcctcaacaacaacaacaacaaagctcgtcaaataatcatttaaagagctttggtagcaagttgggtaacgctgccatctttggtgcaggtgctagtatcgggtcggatatcgtgaacagtattttttaa

SEQ ID NO: 2720 - DNA, 1842 bp, Saccharomyces pastorianus
atgatcaccaataggcgtattttaaaatcttttgaggagataaaccattccttagaggagtctttacaggatgttacatttgacttacaacaacaattagttcaagatgacaataaagaaaatggagagctagcaaaactgcaagaccaattgcaacgggtcaggtctattgttgagaaagtttgcgtttcaattaagagcgacgatgttgaatcctactactcaatatcttttgattcgttatacaatatatgcaaagacattgcagatccttcttcctttgaagatggggatttgcaatatcttgtgagtcaagccatatttgaatacgtcatcttattgtgttactattcagtaaccaatgaatgtgtccaaggtttaccagccgtgtacgaagccgaacaatactataagacgattagtgattcaacattgagatcattactttattgtttacaaaattcagtgtcaactttacgaagtttatttcaagatgttcaaaagaaaatatataggaaaaatcagctacaccaaacatggtcactacgagctttattgttagatttattagaagaggtacgtccaacaataaataagtttatggtagttagaaactttagatttgttgggttgccaaagaaaccgcttgaaatagcttcatttgcttccgacattccgcgcggcgtagttcatgaaaggctagatataatcaatcggtcatcaaagaactatactatcaaactgggccatttgattgccgaattcgctcaaccggcagacgcagatgacaaactgcaactaccaaactacgaaagacgtctacaatctttgcagagcttctttggtttatcggcgtctgacacaaatttaacagatatcgtacaacgttcagctaaatttcatagagatcatccgctgaaaaagtttaccaaaccaagcgtattgaccagatactggccttcgatgttgttatgtcttttgtatggtccgtcatcgattatgactatatggaattcccgttacgttattcaagacttcattagaaataatgttgttgattttgccaagggactggtattgaattggttatggactcctctaaagcaagtttggtccactgtgagacatgatgaaggaagtgccatttcagtcacatcacaagaaactttaaactctgatatggactctctgactagaatgattgttagctttgttgtagataatagtaactcggctcccgatcaaaccatagaccctattctgttaagcagcaaagtagaacacggtgatttgacagaattcatggaaatttatgaatcacaattgcaccatccaattaaaaatatagccacaggtggtctagtaagatcattattgattcaactacaaaagacaaaagtggatgggtctatggcgttgaatggaattgataaaatgttaaagtcacaacagttagtatttggagtcgtagcattatccccagctctagtaatactgtattcagttactgtggcattgaaaagattcattaagttgggcaacatatggtccaatgtaaaacgttacaaagaacaaatcagcataagtttaaataacgtggaaaggattttgaattactctgaccaaggagcagactccaatgaagagcatttaaaccaagggctattagtgatagaggtctccaatttatataaattgggaagttacttaattccacattcaagaaggaaggagtggttcagagatgtggaagagttggtggatactgaccttgactccaaagctcaccttaatgtcgttgacagaatataccatgtctacggtagatttttgattcattaa

SEQ ID NO: 2721 - DNA, 1869 bp, Saccharomyces pastorianus
atgaacagacaggaatccattaattcgttcaattcagacgaaacatcgtcactgtctgatgtggaaagccagcagccgcaacagtatatcccttcagaaagaggctccaagtccaatatggctcctaaccaattgaagctgacacggacagaaaccgtgaagaccttgcaagacatgggtgtgagctccaaggccccaattcctgacgtcaatgctcctcaatccagtaagaacaagattttcccagaggaatacactctagaaacccccacggggttggtccccgtggccactctgcattcgataggtagaacgtcgactgcaatctctcgtacaagaacaagacaaatcgatggtgggtcttcgccctcttcgaatgaagacgctctggaaagcgacaataatgaaaagggcaaagaaggcgactctagcggtgccaacgatgagggaccagatctagatccagaaatcgagtttgtcacttttgtcactggtgatccggaaaaccctcacaactggcccggatggatccgttggacctacaccgtgctgttatccatcttggttatttgcgtcgcctacgggtccgcttgtatcagtggtgggctgggaaccgtcgagaagaaataccacgtcggtttggaagccgctattttatcgtgttccttaatggtcatcgggttctccttgggtcctttgatctggtctccagtcagtgacttgtacggtagaagagtcgcttacttcgcgtctatgggtctttatgttattttcaacattccttgcgcattggccccaaatctaggttgtcttttggcctgtaggtttttatgtggtgtttggtcctcttccggcctatgtctcgttggtgggtccatcgccgatatgttccccagtgaaactagaggtaaagccatcgctttctttgcctttgctccttatgttggtcccgttgttggtccattagtgaatggtttcatttccgtttccaccggccgtatggacctgatcttctgggtcaacatggccttcgcaggtgttatgtggatcgtggcctctgctattccagaaacatacgctcccgttatcttgaagaggaaagctgccagattaagaaaggagaccggtaaccccaagatcatgactgaacaagaagctcaaggtatcagtatgagtgaaatgatgagagcttgtttgttaagacctctatactttgctgtcaccgaaccagtcttggttgctacttgcttttacgtgtgtttgatttactctctgttatatgcgttcttcttcgccttccctgtcattttcggtgaattgtatggttacaaggataacattgttggattgatgtttattccaattgttatcggtgctctctgggccctagccaccaccttttactgtgaaaacaagtatctagcaatcgtcaaacaacgtaaacctacacccgaagatcgtctgttgggtgccaagatcggtgctccattcgctgctattgccctttggattttaggtgccacctcttacaaacatattatttgggtcgggccagcttctgccggtttagcttttggttatggtatggtgttgatttactattcgctaaacaactatatcattgattgttacgtccaatatgcatccagtgctttggccacaaaggtcttcttaagatcttgtggtggtgctgccttcccattgtttaccattcaaatgtaccacaaattgaacttacactggggttcttggttattggctttcatctctactgctatgattgctttaccttttgcattctcttactggggtaaagaattgagacataaattgtccaagaaagattactccattgacagtgttgaataa

SEQ ID NO: 2722 - DNA, 1404 bp, Saccharomyces pastorianus
atgcgttgcgtaacatcgcagatattgctatggttcttgataatgatcgtaagcgtggtagacgcgctcgtccttccgcccttggaagactacgatccattggagccattaatgaaaagagacacatccacgtcgcagcacagcaatgctcaattcgacaatcgattgccgcccatactaaacccctcggatgttacagaagatcagagatcttttcatgtcccgggagaaatcccgtcttatgtcatcgatcattgtcccttggttcatctatatagcgaagagaagtactggccctcggatattgccgagtttgtgcaaaacttccaaatcaaagacaaacatggcaatttcatacctactcatgaaaacttgacgctgcatgatttaaaggcggaatacagcgcagacttgctggccaacggaactgagacccgtattcctagtagcgacgtgtttttgacaagttcggatgatttcgacaaagatcccaagtggtcgctgggccacccgccagaatacggaacaggccacaaccccaaggcgcctgcagtcctgttcgtggtcgacaagggtaacggatgggtcgacgcattttggtttttcttctacccgttcaaccatggtcccttcatcatgggccagggtccctggggcagtcacgtcggtgactgggaacactctttggtcaggtttcacaatggtgtaccaaagtacttttggatgagcgcgcattccagtggtaccggctacagatacgaagctgttgaaaaattcaagaagctgaccaaaagaaaacagcaagatgacaattttgacgaggacaccatactccaaagaccgctgatttttagtgcgagaggcactcatgccaattacgcttccgtcggacagcatgctcacgacattcccttttttttcatgcccttgagcgattttaccgatcgcgggccattgtgggatccgtctttgaacttttattcctacacttttgacggtaaaactgtgaccccttccacagagagagaagaatctctgggcttagattggttacattttcaaggaggttggggtaataagcaactaccctcgaaggatccaagacaaaaatggtgtttaggtcaatggaaatatattggaggcccccgcgggcccctattcaagaagatggatagattgaatctatgtggtggggtgaaaaaatggaatttttggaacggcgggtgccctgctaggagattgattaagaaagctgagggcttagacgctgaaacgacagaacttatgggtgacaattgcggtgtcttgctatacaagattagaccgcggtggctaagaggcattctcagaatcttaatgtggagaggcatgctgtgctctcttatggagttcttcaccaattga

SEQ ID NO: 2723 - DNA, 2160 bp, Saccharomyces pastorianus
atgccattaagaaacctgacgggaacacataactttagtagcacaaatctggacacggaaggtgcagatggaggtcgcgatcctccttctctttctccgtcaccatcttttgcacagctgcatgacaagacagacaacaatgctgctcttacaaacccttttataggtagtgacgaagaatctggtgaacgtgacggtgagtctttttcttcttctgttcactatcagccacaggggagtgattcttcactactccatgataattcgcgtctggatataagtcaaaacaatggcatatctgattacaaaggttactattcaaaaaataatagtagagttgtgagcacagccaacgacaactcatttcttcagccgccacataagactatagcctcgtctccttctctaaattctagtttttccaagaacgacattctctcgcctccagaatttgatagatatcctttggtaggttccagagtggcttcaatgacccaactgaacaaccaaggccgttccccgtcgtcatctccaggtaatgaatcatccgcatcattctcttctaatccatttttaggtgaacaagatttctctccattcggtggttatcctgcgtcatctttcccactcatgatggatgaaaaggaagaagatgattacttgcacaatcctgaccctgaagaagaagccagactagataaaagaaggttcattgatgactttaagtacatggataaaagatctgctggtgggtttgctggtgttttgcttttgttcatagcagctgtcttcatttttattattttgccggcgctcactttcacaggtgccattaaccacgggaaagatgtcgaagaagtttcatatttaaccctgtatcaatatcctcaattgtccgctattagaacatctctggttgacccagatacgccagatactgccaagacaagagaagccaaagatggctccaaatgggaactagtattttccgatgaatttaacgcggaaggtagaacattctatgatggagatgacgcatattggactgcccccgatgttcactatgatgccactaaggatttagaatggtatagtccagacgcttccactacagtaaatggtactttgcaattgagaatggatgctttcaaaaatcatggcttatattacagatcaggtatgctacagagttggaataaggtttgtttcacacaaggtgctttagaaatctctgccaatttacctaactatggtcgtatttcagggctttggcccggtctgtggaccatgggtaacttgggtagaccaggttatctagcaagtacccaaggtgtgtggccatattcttatgaagcatgtgatgccggtattactccaaatcaaagttctcctgatggtatttcttttctgccgggacaaaaattgagtgtttgtacctgtgatgacgaagatcatccaaaccaaggtgttggtagaggagctccggaaatcgatgttttggaaggtgaaactgacaccaagcttgctgttggtgtagcctctcaatctttacaaatcgcaccttttgatatatggtatatgccagattacgatttcattgaggtctacaatttctcaacaacaacaatgaatacgtatgctggtggtcccttccaacaagctgtgtctgctgtttccaccttaaatgtaacttggtatgaatttggcgaatatgccggttatttccaaaagtacgccatcgaatatttaaatgatgacaatgacggttatatccgttggtttgttggtgataacccaaccttcaccatttacgctactgccttacaccctactggtaatattgattggagaaggatcagtaaagaaccaatgtcagtggtgctgaacttgggtatctctaacaattgggcttatattgattggcaatacattttcttcccagtggtcatgtcgattgactatgtcagaatatatcaacccagtgatgccaagtccatcacgtgtgatccagatgatttcccaacatatgattatattcaagcgcacttaaacgcctacgaaaatgcaaacttgacgacatgggaagctgctggctacacgttccctaagaatgtcctaactggcagctgttctagttccaaattcaaactatcttcataa

SEQ ID NO: 2724 - DNA, 2718 bp, Saccharomyces pastorianus
atgccgccagcaagtaccagcactaccaatgacatgattactgaggaacccacttctccacgtcagatccctagattgaccaggagattgacccggtttctgccacaagaaatcaagtcaattgacactgtgattcccttgaaatcaagggcgctgtggaacaagcaccaggtcagaaaattcgacaaacctgaggacttccaggataggtttatcgaccatgttgaaaccacattagcacgttctctttacaattgtgatgacatggctgcttatgaggctgcttcgatgagtgttcgtgacaacttggtcatcgactggaacaaaacccagcaaaagttcaccacgagagacccaaaaagagtctactacttatctttggaattcttaatgggtagagcgttggacaatgctctgatcaacatgaaaatcgacgacccagaagacccatctgcctcccaggactctaagggagaaccaagagaaatgatcaagggcgccctggatgatttaggtttcaaactggaagacgttctagaccaagaaccggatgcaggtctgggtaacggtgggctaggtcgtcttgctgcttgtttcgtcgactcaatggcaacagagggcatccctgcatgggggtacggtctgcgttatgagtatggtatctttgcccaaaaaatcatcgatggttaccaagtggaaaccccggattactggttgaattctggtaatccatgggaaattgaacgtaacgaagttcaaattccagtcacattttatggttacgtcgataggccagaaggtggtaagacgacattgagtgcatcacaatggattggtggtgaacgtgttcttgccgttgcctacgatttccccgttccaggtttcaaaacttccaatgttaataatttgagattgtggcaagcaagacctaccaccgagttcgattttgctaaattcaataatggtgactataagaactctgtggctcaacagcaaagtgccgagtccattaccgctgtgctgtatccaaacgacaactttgcccaaggtaaagaactgagattgaaacagcaatacttctggtgtgctgcatccctgcacgatatcctaagaagattcaaaaaatccaagaggtcatggaccgagttccctgaacaagtggctattcaattgaacgatactcatccaactttagctatccttgaattgcaaagagtcttggttgatttggaaaaattggactggcacgaagcttgggacattgtcaccaagacctttgcttataccaaccacactgttatgcaggaagccttggaaaaatggcctgttggcttgttcggccatttgttgcccagacatctggaaatcatttacgatattaattggttcttcttgcaagatgttgcaaagaaattccccaaggatgttgatcttttgtctcgtatatctatcatcgaggaaaactctccagagagacagatcagaatggcctttttggctattgttggttctcataaagtcaacggtgttgcggaattgcactctgaattaattaagaccaccatcttcaaagatttcgtcaaattctacggtgcatcaaagtttgtcaacgttactaacggtatcacaccaagaagatggttgaagcaagctaaccctaacttggctagattgattagcaaaactcttaacgatcctacagaggactatctactagacatgacaaagttaactcaactggcaaagcaccttgaggataagaagtttttgaaagagtggaatcaagtcaaactcaataataagatcagattggtggacctaatcaaaaaagaaaatggtggtgaagacatcattaacagagagtatctagacgatactttgtttgatatgcaagttaaacgtattcacgagtataaacgtcaacaactaaacgtctttggtattatttaccgttacttagcaatgaaaaatatgctagagaacggtgcttccatcgaggaagtggccaagaaatatccacgtaaggtttctatcttcggtggtaagagtgcacccggttactacatggctaagttgatcatcaaactggtcaactctgtcgctgaaattgttaacaacgacgaatcaatcgacgacttattgaaagttgtcttcattgctgattataatgtatccaaggccgaaattattattccagcaagtgatttaagtgaacatatttcaactgctggtacagaagcgtcaggtacttctaatatgaagtttgtcatgaatggtggtttgattattggtaccgtcgacggtgccaatgtggaaattaccagagaaatcggtgaagataacgtcttcctatttggtaatttaagtgaaaatgtcgaagatttgagatataaccttcaataccacccacaggatttgccatcgagcttggaatccgtcctatcttacattgagagtggtcaattctccccagagaatccaaacgaattcaaaccattggttgacagtatcaaatatcatggggattactatctagttagtgacgactttgaatcctacttggccacccaagagttagtcgaccaggagttccacaaccaaagaccggaatggttgaagaagagtgtcctgagtgttgcaaacgttggtttcttcagtagtgaccgttgcatcgaggaatattctgatacaatctggaacgttgaaccagtgacttaa

SEQ ID NO: 2725 - DNA, 1971 bp, Saccharomyces pastorianus
atgagtaataatgggtctcctgcggctccttcaaaaacagaattcaataaatataaaatcggtaaagtgaagagtacaccagctatccaacgagatttgaagactaatttaacattcattgagttgaaaaagagaagtagtgagaaggtttacggatgtactgttttccaagaccattatcgtgaagacgaaaaactaggtcaaggtacttttggtgaggtttataagggtattcatttagagacccaaaggcaagtggccatgaagaagattatagttagtgtggaaaaagatctctttccgataacggctcaaagagaaattaccattttaaagcggttgaaccacaaaaacataatcaaactaattgaaatggtgtatgaccattcaccaggtacgataaattcaacatccaacaacttgcataaatcattttatatgatcctgccgtatatggtagcagatctctcaggtgttctgcacaatccaagaatcaatttagaaatgtgcgatatcaagaatatgatgttacaaatatttgaaggtttgaattatattcattgtgcaaaattcatgcatagagatataaagacggcaaacattttgattgaccataatggtgttttgaaactggctgactttggtttagcaagactgtattacggttgtcctcccaatctaaagtatccaggtggtgcaggttcaggagcaaaatatacatcagtagtggtaacaagatggtatagagcaccagaacttgttctaggtgataaacactatacgacagctgttgatgtatggggtgttggatgcgttttcgccgaatgttttgaaaaaaaaccgatactacagggtaaaaccgatattgatcagggacatgtaattttcaaattgttagggacacctacggaagaagattgggctatggctcagcatttaccaggtgctgaactaacaaaaacaagctacaaatcaacgataaaagagaggtttggtaaatacctaaccgagacaggcttggacttcttgcgacaattgttggctctagatccttataagagactgaccgccatgtccgctaaacaccatccttggtttacagaggaacctttgccttcagtaaaaattacactaccaactgaagaaagtcatgaagctgatatcaagagatacaaagaagaaatgcatcaatcattatcacagagagtgcccacggcaccaagaggtcatacagttgaaaagggtgaatcacctgttttgaaaccccgtgtagcaattccaagaggtcccaagaaggatgacgcaatccctatagcgcccttgagagatatatcttctaggccgccttcgtcaaattcgagagatcagcatcaaaatcctaggtcgtatcattctaataacggatattcgaaaaccgtggcaccaccatcagctacacccgtgggaatcaacaggtatgggaccaataatattccgagaaacaatcgcttcgacggcagccatgcaggtccaaataacaacaggaatccaataaatcggtttcaaccagagacaaatgtcaactctaaatacactaacacaccactgccactgggaccacaatcaagataccagggcacctcaacagattcgaggtacaaaagctcggcaaacgactctagataccacaacccaaggtatcctaacaaatcggacacaagtttcaataaaccagttcaaaactacagtcgccaagaaccccatgtaataagcagaaattataatcctccgaacggtccccgcaacgccggtttcaatcatcatcaagatccaagaccaccccagacacagtttccagtatcatcctcgcagaaccaaaatcaaattttaaataaaccactagataataaaaatggaagtttgaaggacgagagagcaaaaccagatgaccaaaggagtcatgacaataatgatattgcagatctatattag

SEQ ID NO: 2726 - DNA, 1590 bp, Saccharomyces pastorianus
atgacaacaaacaaagccagcctaccaccaccagtcaatcttattccaataaagcgaccttcgaatgaagaggttcaagacacaacatccattctgaaaaagcgtagtaaagatcaagaaaagcaaaaaaatgctgatcctgattttacttctcttcaaaaaagactattacaacaattgaatggcactattcccataagcgagaaaatcatctttaggtacttacaagacagtcaacaagagatcgatagaatcataaaacagtccgtcattcaaaaggaaagtcattcggtaattctcgtgggtcccagacagagctataaaacatacttattagactgtgaattggctttattacagcaaagttacaatgagcagtttatcactataaagctaaacgggtttattcactcggaacaaaccgctattaacggaatagccacccagttggaacagcaattgcaaaaaattcatggaaatgaaacgaagatcgatgatgcctcgttagaaaaaataagcagcggttccttgacagaagtttttgagaaaattttattgcttttagactcggctacaaaggcaggaagcgaagatggtgataacgctgacggaagcagtaccacaaagataaccgtggtcttcgtgtttgacgaaatcgatacctttgctggaccagtaaggcagaccctgttatacaatctctttgatatggtagaacacgctagggtacctgtttgtattttcggctgtacaacaaagttgaacattttggaatatctggaaaaaagagtgaagagtagattctctcaaagagtgatccatatgccacaaatacaaactttggacgacatgatcgaaggggtaaaggatttacttactgttcgtttagaagtctcgcccttggcttcaaactggaatgatactatggaaaaggagttatccaaccctcggtccaacttgaatagacatatcagaatgaattttgaaactttcagggcatttccagtcttaaaaaattgtttgactccactgatagcgacgtcccaaaacttcgattcactctgtagtgccataaagtcatgcgcctttcttgaactttacaatacgaaccaattgtctaatagcttaaccggaagactgaaatccttgtcagatttagaattagccattttgatttcagctgctagggttgccttacgagccaaagacggatcctttaatttcaacttggcgtatgcggagtatgagaaaatggtcaaagctatcaattccaggatcccgactgtggcaccaactattaattcaggaacaggacaaactactttttctatcgataatacaatcaagctgtggttgaaaaaagacgttaagaacgtttgggaaactttggtgcaactggacttttttaccgagaaatcggcggtaggcttaagagacaatgcaaccgccgcattttacgctagcaactatcagttccaaggtactatgatcccatttgacctgagaagttaccaaatgcagatcattttgcaggaattaagaagagccatccccagatctaatatgtactactcatggacacaactgtga

SEQ ID NO: 2727 - DNA, 1323 bp, Saccharomyces pastorianus
atggctccaccaaagaaaaccgtcaagaagatggatcttacgtcatttttgaatgatgacacttttggttcatcttgggctgaagaagatgttgatttgaacaagatcaccattcctatcgaaacggccaacgcaaataccattccgttatccgagttggctcacgctaaaaataacagcaacaacatgcactccggcggttttggtggcagtttcggtggcagtggtggtagatccagactagaccctgccttgggtgggggtgtttccgacagaagagaggaatatcctgttccagatgctccaccatacagagctgtcatcaacaacattccatgggacatttcctcagagggtgttcaagcgtgggttgaagacggtttagtcaagcctgaagccgttgaagaagttgttctaccaaagaatctaagagacccaaccagattaaagggtaacgcctttattactttgaaagaaaaggaagatttggttgccgttttgaaatttaatggtaccaaattgaacgaaagaaccgtttacgtctctgttgccgctccaagaagaatgggtggtgatgatgtcgactggagtagtgccaggggctctaacttccaaggtgacggtagagaagatggacctgatctagattggggtgccgctagaggttccaacttcagaggtccaagaagagaaagagaagaagttgatattgactggaccgctgcaagaggctccaatttccaaaactcctcaagaccgccaagaagagaaagagaagaagttgacatcgactggaccgctgcaagaggctccaatttccaaaactcttcaagaccaccaagaagagaaagagaagaaccagacatcgactggagtgctgctagaggttccaacttccaaaactcttcaagaccaccaagaagagaaagagaagaaccagatatcgactggagtgctgctagaggctccaacttccaaaactcttcaaggcctccaagaagagagagagaaagagaagaaccttctttggactggggtgccgctagaggttctcagtttggcaagactcagcaggccaagagctcccacaaggataaagcagcatccaacaagaagcctaccgaagaacaaccaaaaattcaaaaatctgcctatgatgttttacgtaccgaagatgatgatgaagatgaagacgttgccgaaaagaaaaatgaagacgtaaaggaaagtaaaaccgatgctggagttgaagatttacaagaaaaaaccgctcaattgactgttgaagatggcgacgattgggaagttgttggtaagaaataa

SEQ ID NO: 2728 - DNA, 4221 bp, Saccharomyces pastorianus
atgctaggtttgcgaactcatggtctagacaaatatgaacattatgtcagtcgcccgtcggattttggcaagctcgagttgcaggactggttgaataataagacgttccgagtttcgccaaacttattgcacgattgcaatcccacacgtgaatggaacgaacctgaactcttttaccagagtggagattgcgcttacacttgggttgagccttgtaaagagacaaaacttgagccatcaatgatgatgctcagataccatgactcaaacattggacagatgcctcaatcttgctatccgattactactccagtggattccgaaccactgctgaaatacattatgcaagaacgtgccgacctgtcaaaagatttcccccacaagtacaacgccttattaggtagcctctttgatgttgataagaacccggaaactctagacgactctgatatagaagcattagatgacacagaaatatacgatagcagtgaagaaacacgaattgaactgcaaacactaaatgaactccaacaaaaacactccagtttgatagtatcgaacaatgggatttttcaagcaggcaatacactaataacgaacatacgacatggcatatctaatagtttagctatcaaacccaatgacgtagcgactctactcttacttactcagccaagtggtcatttattgtctcttttaccattgaacgacgaaaacgagacgtatctactacaatactggaatctaggacaaagaggccagtgggacataataaaacatcagaacgagaaacaatttgttcttatacataaagaactgggcatttgcaaatttttcgaatttcatttgccattcacttttcaattggtgaacaacttaactttgacagattcaataatcatgaatggttccttctttccaactgtttattatgattctgatccatatttcatcattttcgtaacagctataaggtacgggagaattgtttattttgtgatagaatggaatggtaatgaaataaagaaaaaggaagtttaccaattgaccgtattcgatggtgaaaaaacaaacatggctctccccattggactaaatgcttgtctcgttgagactccgctcaaattttccttggtctctgcaaaccaaatcatgtctggagaaactgaatttcactcattcgggctgaaagctttgaaaggaatcaagtcgttctttccagctcccttattactatcaaaactgcaaaaactagatccggatacgtttgaaaagtttcaatattgcaccgtgatatcttcctcaacaggaaatatttgtttctgtgtcactgaacgatcgacaataataaacggcaacttgaaatttttcgaattgacgagattcaaagggttgaagtccatttcgtcattaccttcaaatccactgaatctagattccaaatctcccagctataaactaatagtgataagttttagtaggactttggagctaacattgaccttaagagatttgagatgtttggatacaaaagatatcatcaaacctctgaacaatattacttttaaacacacaatcgatagctcgaccgaggaaaactttcaaatattagcgtttacatcttccaaaacatataatactcatacaggctctaacatcaatgataaaagtaattcccaagtttggctaacttcaccaaatgcaattactcagccctgtattgactataaactaaggaaagttcaccagattgtgcatttaaagcagtttcagattttcaaccatttaaaaatttggaaatgtaagagtttaaatatatctttgttgcaaaggcttggaatagaacatcaaaagaccgagagctcattgatttttacgactgatgccgtttcaaataataggatgtgtttattagacttgaccataactgcaactgatgccaatgatgaatctgcccaaggactgataaatatagaagacttgttatgcgactctgaaaacgaaactatctttttggattttactgagaagaacttgattcaggttaccaggaatacaatatacattgattcttttgatgctgatggaaccctggtcaagatctctcccggctgggaatttgaaaacgtagcatacaatgatgggatcttaatagtttggaataccaaactgggccaagtctcctatattaaagacgtagatgcaattggtgaatttagcacccctatactatccttaatcgatagtaaatgcgtgagcctattcattaggcagctgggaacagtgaaaaacataaattttaagattacaaagtctgcagatgatccgattgaacatattatttggattcttttgcatgacagaatcatttgcacatacttttccagttggatatccgatacagtggtcttttctaaggactataactctaaaattcagcaggcgttaatttttggtccccacttttgtgttgttgatcatgaatcttttttccaaacatacagctttaaaaataatcctttaaacaacgatttcatatgtacaagccgaataaattttcaaggcaaagacgtaaaactaagaaaatttggccagaatcaatgtttggcgtttaattcgtttgaaatttttgttattaatctacaaccaatatcgcaaagtgaagaattggacttttacaaattaaaattaccgcatttaggaaatttcaactctataatagaagtttgtccagacacaaacaataaccagttgttcatattgtactctgatggtctgagaatctttgagttgtcatatttaacctcaaataatggaaatttcttattgaaatctacaagaagtaaaaataagaaatttttgtatctagacaaaatcaaccgaatgctaatacttaaccaagacttaagagaatgggaatgtgtaagactgtcagatggtaaagcggtgagtctggattcccgatttctcaaagacgattccggagaaatccttgaaataaaagaattaccaatggctatcgaagataatcccttagaaaaaaaaataatactattaattacttttaccagctcacttaaactagttttattaactgcagccaaaaacaagatttctaatgaaataatacattcctatgaacttgaaaattccaggttactggatcatttggttgttacaccgcaaggtgaaatttttgttttggattacaaagttatgggcactgataatgaaatgtcctttaataagttaaaggttgtaaagcaccatgctgacaatgaaaaacgcgagaatagcgcacgtttacaaatcgccttggaaagaaaatttacgttcaagagctggagcacggtgaagacgtttacagttgtaggcgataatataattgctgctacaaatttgggtcagaagctttatcttatcaaagatttctccttgacctataatgaaggaacgagagtataccctttagagatttacccagattctaaagttcaaaagataataccgttgaatgaatgctgttttgttgttgccgctcattgcggcaatagaaacgatttggactcccgaataatattctattccttacctacaataaaagttgggctcaataatgaaacaggcgctctaccagatgaatacggtaacgggaaagtcgatgacatatttgaagttgacttccccgaggggttccaatatggcgtaataagcttatatgacgttttgcatggaaagaagcatgtagataattccgatagtgtcatagggccagataacgatgaaatagaggacgctcttgcaaagcgtaacaaatctctgctgttttggcgtaaacatcgcgcaacaccaaagcctacaatacgaagcaatactaccattgtatatgaggaacatgtatcatcccgctattttgaagatataagttctatattaggaagtaccgcaatgagaaccaaaagattatcgccttacaacgcgatagccctagataagcccattcaagatatgagttacgacctatcggctcagactttatacgtgttgatggcggaccaaactatacataagttcggcaaggataggctgccccatcaagaggggtatgagcccgggtggaactcgggttatttcgtctcaaaaaggtcgctaatcaagcccgacctcatctgtgaagtcgggttatggaatctaagcaacgagagaaagaacatgatataa

SEQ ID NO: 2729 - DNA, 630 bp, Saccharomyces pastorianus
atgtcccaacaagtcggtaacagtatcagaagaaagctggtaattgttggtgatggtgcctgtggtaagacatgtttattgattgtcttttccaagggccaatttccagaagtttacgtaccaacagtcttcgagaattacgtagcagatgtcgaagtcgacgggcgtcgtgtagagctggcactatgggataccgctggtcaagaagattacgatagactaagaccattatcatacccagattccaatgtcgtattaatttgtttctctatcgatctaccagactccttggagaatgtacaagaaaaatggattgctgaagtattacatttctgtcaaggtgtgccaatcattcttgtcggttgtaaagtcgatttgagaaatgacccacaaaccattgaacaattaagacaagagggtcaacaaccagttacatcgcaagaaggccaatctgtagcagaccaaattggtgctaccggatactatgaatgttccgctaagactggctacggtgtgagagaagtgtttgaagccgccactagagcttcattgatgggtaaatctaaaacaaatggtaaagctaagaaaaatactaccgaaaagaagaagaagaagtgtgtcttattataa

SEQ ID NO: 2730 - DNA, 348 bp, Saccharomyces pastorianus
atgggtaatttcagatttcccataaagaccaaactaccacccgggttcattaatgcccgtgtactaagggacaacttcaaaagacaacaattcaaagaaaatgagatcctgattaaatccttgaagttcattgccagaaacttaaatttaccaacaaaattgagactagaagcccagttgaagctaaacacgctgcccaactacatgagatctacacagattaaaaatagatgcgtcgactcgggtcatgcaaggtttgtgctgagtgattttagattatgcagataccagtttagagaaaacgctttgagcggttctttgcctggcgttaaaaagggtatctggtaa

SEQ ID NO: 2731 - DNA, 786 bp, Saccharomyces pastorianus
atgaaaagttaccatttgaacaatgacattattgtcacacaggaacagttagatcattggaacgaacaattagccaagttggaaacggcacaagagattatcgaatggtcgctagtggctttcccacaccttttccaaaccactgcgtttggactgacaggtttggtcaccatcgacatgctgtcgaaactatccgggaaatactatatgccggaattattatttatagacactttgcaccatttcccacagactttaacactgaaggatacaatcgagcaaaagtattatcagccccagaagcaaactatccatgtttataagccagatggatgcgtctcagaggcggaatttgcctcgaagtacggtgatttcctatgggagaaagacgacgataagtacgactatttggctaaagtagaacctgcgcaccgtgcttacaaagaactgcgcgtaagtgccgtcttcacaggcagaagaaagtcgcagggttctgctcgctctcagttgtcgcttattgaaattgacgagcttaacgggatcttgaagataaatccattgattaattggacattcgagcaagttaaacaatatatagatgcaaacaatgtaccatacaatgagcttttggatctcgggtatagatccgttggtgattaccattccacacaacctgtaaaggaaggtgaagatgaaagagcaggaaggtggaagggcaagacaaagactgagtgtggaattcacgaagccagtagattcgcccaatttctaaaacaagacgcctag

SEQ ID NO: 2732 - DNA, 1746 bp, Saccharomyces pastorianus
atgacccagtatgaacgtgaccctgagctggtgaattttttgtcaaaagtagaagacctggactctaaaagatacaatagtagttcaatcacgaatccagccagacaacccctttcgcctgtgaacaacgactcaccaggacacaggaacgttaggagagccaatacaacgacaaccgaaaacgaagaacgcaggaacaggtcggccaatttagcttaccgatctgcttataattatgaaatgacattctcccccaagaaaactcactactcattaaaagagctggatcttgaacgggcgacaccaaactcgaatttgaatgaacctcgccctcaaaacgcaaaggaatttgttatttccgaagaggattatttacttttacagaagatgaaagcttctcaatcacctaatgattatagttgcagtaaaccatcaccttcttttagaaaggaccatcgcgtaccaagtcgaggccgacccagagacaaggaaatagtcactgttcaatatgattttgacttccaagagacagctcgtttgcccgcttcgtcttcttcttcctcacccacaccaccaccaatgcccaccaggcgtagccatgttcaagtcattgaagatgaagagaaaccaatgcttccaataagacccgctaaggcggaaattgtcgaacgcccgctacgaaggatcactaagccggaattgccggtgcctgagcccgtcaagcccaaaccgcctgtttcacgttccacgaagccgacaagctttttgagctctttgcaagataacaagttaacaatggcaaatagccatggttcagaagtagagactcctacgaaaatagtaaagaactctcacattgactacctggattccatacaattaaaaccagccactttatcatctacaataaataataagcctaagcctacaccaccttctcccccggcgaagaggcttcccaggtctgaaagctttattaagtctgcattgaattcgaacttaacgacaacatctaaaccttctttacctgaaaaacctcaggaactacgaaatgcaaagctgaccgtccaaagggcaaaaccgagcataccgccaaagaaagtagagctaaacctcgcgttgcctgacttgcgtcctgtagagacttcttcaacgaaacaaaaatttgaacattccatcgatttacctaaattacgatccagtaaccgtaacgtcaagaaacaagaagatgatagcattccagaagcaattaaaaatattcagaacttaaaaaaaacaaaacatgaaaagcctgcaattccacagaagaaaacattcctggccaatggcttaaaacccacagcagttaaaaccgacggtgatgtgagcaagctaaaaaacaatgagccggaagctctctcgttaagaaataatctcaaaaagagccctccaaaagcaccagaacgtaagatttcaatgccagaagcattacgaagaattgaattaatgaaaaaatccaaaactgagcccgcgctggagcctgcgaaggaacttagtataaacgcgagattggatgcaataattgcgtccaagaatttgaggtcctccaatactgtaccggagtttaacagtgttaaaaccactgctaagacttctgacgacatcaatgtatcctcacgggacgaagcaaaggaaacaaaacccctggtacacgttaataaaaatagggcccgtggtcctagaagaaaacctcccacacacgtatga

SEQ ID NO: 2733 - DNA, 603 bp, Saccharomyces pastorianus
atggcttggactagcacattaccggtacacctattgaatttgatcaaaaattccaagtatgttcacgtagctacctgctctaaagagtgcatcccctcagtggcattgatgaactatatctacgtaccaggtgaaaagttgtttggtcaaacagacatcaaaaacgattacattatatttgttactcccgagaatacgcaaaagtttaataacatcaaggaaaaccctaaagtggctttactatttcatgactggatcatcgctaataatttgtcagttgggaaggaaagcatatcagagactccaaccccaacaccagtttctcaagacgaacaacgccaaagtaagcttctgaatttgttgcaagaacttaaccaagctgaattgaaccagatgagtgcgtctatcgggggccaaactgaaatcatagatccaggaactgaagaatcaaagtactacaaggacttaatactaaaggccaaccctgacgctagagcctttatatttgaagaaaacactgctgtaattaaggttagaattgacaacgctagagtgtccaataatgagaacagaacaatgtttttaagtaacgaaaaaagttga

SEQ ID NO: 2734 - DNA, 1314 bp, Saccharomyces pastorianus
atgagtacgggagattttttgagcaaggggatagagctggtccaaaaggccattgatttggacacggcaacgcagtatgaagaggcttatacggcgtactacaacggattagactatttgatgctggctttgaagtacgaaaagaaccccaagtcgaaggagttgataagagcaaagttcacagagtatctgaaccgtgcagagcaattgaagaagcatttggaaactgacgagacaagtggggggaagaagtcccctagtgccggtagtggttccacgagtggtaataagaaaatctcgcaagaggaaggtgaggataacggtggtgaagacaacaaaaaactaagaggtgctctatcgagtgccatcttatccgagaagcctaatgtcaaatgggaagacgtggctgggctggaaggagctaaagaggcccttaaagaagccgttatcttgcctgtgaagttcccacatttgttcaaaggtaatcgtaagcccacaacaggaattttattatacggaccaccgggtacgggtaaatcgtacttggcgaaagctgtggccaccgaggctaattctactttcttcagtgttagttctagtgacttggtctctaaatggatgggtgaatctgaaaaactggtgaaacagttgtttgccatggcaagagagaacaagccttctatcatcttcattgatgaagtggatgcgcttacaggaaccagaggtgagggggaaagtgaagcaagcagaagaatcaaaaccgagttgctagtacaaatgaatggtgtaggaaatgactcccagggtgtattggtcctcggtgccacgaacattccatggcaactagacagtgccatcagaagaagatttgaaagaagaatatacataccattgccagatttagcggccagaaccactatgttcgagattaacgtcggcgacaccccctgcttgttgaccaaagaagattatagaactttgggtgggatgactgaaggttattctgggagtgatattgccgtggtggtaaaagatgctctgatgcagccaataaggaagattcagggcgccactcatttcaaggatgtgtctacagagcaagatgattcaaagaaactaacgccgtgctctcccggtgatgatgacgccattgaaatgagttggactgatatcgaagctgacgaactaaaagaacctgaccttgccataaaggatttcttgaaggccattaagtcgacaagacctactgttaacgaggatgatttgctgaaacaagaacagttcacaagagattttggccaagaaggtaactaa

SEQ ID NO: 2735 - DNA, 666 bp, Saccharomyces pastorianus
atgggagttcaagacaaggcaccaggaacacagaggaaccgcaagttagcgtccgtatctcgtgaaagaagcaacgtccggcacgcttcgcagaggacacgttccaagaactacaagaatatctcaaagaaaagggcccaacagcatgcgtttgggttcagcgtttcaaagatggttgcgatgatccgggcacgtgtgtggggaacacccgccgaggaggaagaagaaagcgtaacctcttcgtctgcgtctccttacgactgtgtgcctctgcaatggcaagccaaattcgcgcaactacaactgcaactgcaatccacgcaaaaggaactacaatttgtcaaggagaagtgccacttgctgcaatcggtgctggacgatgcgaacatcgaccaaaggtacctcgagtcccgcagagacatgaaaaacattgaacgggacaatctcaagcctactgaaattttgccgccctctccagtgagagcggtgaacccactagtgacttcgagcccaatccacatgtcgccgctccagtctcgccagagaccactttcggcattgcagccccccaagggccccaacttttacgccaagtatccgaaactaccccagacgaatatcctaagagaatctcccactgaggaatcgctttcccaggcccaatag

SEQ ID NO: 2736 - DNA, 978 bp, Saccharomyces pastorianus
atgtcgggactgtctgcgttgcttagggagaaacatattcgctacattgaatcactagattccaagaaacacaattttgaatattggcttacggaacatcttcgtttaaacgggatgtattgggggcttacggccctatgtgtgcttgattcttccgagacatttgcaaaagatgaggttatatcgtttgtgctcagttgctgggacgacaaatatggcgcatttgcaccatttccaaggcatgatgcacacttattgaccacattgtccggggtgcagattttggccacgtatgatgccttagacgttctcggcgaagagcgtaaagctcgattggttgcatttattcgtggcaaccaattggaggatggctcatttcaaggtgacaggtttggggaagtcgatacaagatttgtttatacggcgttgagtgcgctgtcgattttgggcgaattgacgccggaagtggttgatcctgcagtgaaatttgtattaaagtgttataattttgatggtggatttggattgtgccctagtgctgaatcacacgcagcgcaagcttttacgtgccttggtgctttggctattgcgaacagattaaacgcgctaaatcatgatcaattagaagagattggatggtggctttgcgagcggcaattaccagaaggtggattgaacggtaggccaagtaaactacctgatgtgtgttacagttggtgggttttatcttcactggctattattgataaactggactggataaactacgagaaattaactgagttcatactaaattgtcaagatgagaaaaagggcggaataagtgatagacctgagaatgaagttgatgttttccatactgtctttggggttgctggcctaagtttaatggggtacggtgatctagttccaatagatcctgtatattgtatgccaagctccatcacagccaaaatcaaaaaatatccatacaaatag

SEQ ID NO: 2737 - DNA, 1398 bp, Saccharomyces pastorianus
atgagtaaaggtgtttcgtttgaaaatcttccagtggatttgcaacataagagtgttacacaaaatgaaagcaccgctgatatattaagccagttaccacatgaacgattacaagctgtccttgagaaggtgccagaagatgacgttgaagtgagaaaagtactattgttattgaagaagccagaagtggtggataacgaagatgtgcagcagagaagggtacgactggctgaagcgctgataactgatgaagttgatccatctggtatctcaaatacagcagaagtaaataccgaagaggaagacgaggaagatgacgaggagttttttacgccagcaacttctgagctaatatctgctaggaaatttctagtcaaatactcattagagagatctcgaaagaggttacaggcagagatgcaaaggcaccaaaatttcaatataaaggaagagttactcagtcgacgggcagaactagaacgtatggcaaatttagaacttgctggatctcaattagtatctactaggcctatatcagctgtctctttatcaccaaataatgattatatcgcaactggaagctgggcgggtgatattaacatattgaattctcaaacgctacaaccgttagcacagaaactcgattctcacatagggaaaattggggctgtacaatggcatcctggatcaaacaatcaaataatatcatgtgcagaagatggactcataaaaaatttccaatacttaaacgaggaaggggacttacggttattgggtgaccttgtggggcacgaaagacgtgtctctgatttgaaataccatcccagtggtcagtttataggcagtgcctctcacgatatgacgtggaggctctgggatgcttccacgtaccaagagcttctattgcaagaaggtcatgccaagggggtattctgtttgtctttccaatgtgatggatcgcttgtttgcagcggtggaatggactcccttgcaatgatatgggacatacgatctgggaataaggtgatgtctctaaccggacattcaaaacccatctacactgttgattggtcaacaaacggatatcaagtagccaccggtggtggtgatggattgatcaatgtttgggatataagacaacgagatggtggtcaagtacaccaaattttggcacaccgaaacatcgttactaaagttcaattctcaaaagacgataatggcaaaaaacttatatcttgtggttatgataatctgattaatgtatatagtagtgataattggttgaaagtggcaagcctggaaggtcatactgataaaattattagtttggatatttcaaacgactcccagtatttagtgagtggcggttgggacaggtcagtgaagatctggaattga

SEQ ID NO: 2738 - DNA, 2307 bp, Saccharomyces pastorianus
atggacttcgagaccaatgaagacatcaacggggtccgtttcacctggaacgtgtttccctcgaccagaagcgacgccaacagcaacgtcgtccccgtcggctgcctgtacactcccttgaaggagttcgacgaattgaatgtcgccccatacaacccggtcgtgtgttccggcccacactgtaagtccattctgaacccatattgtgtgatcgaccctcgcaactcgtcctggagttgtcccatctgtaactccagaaaccacttgcctccgcagtacaccaacctgtcgcaggagaacatgccgctggagttgcaatcgaccaccattgagtacgtcaccaacaagcccgtcaccgtgcccccaatcttcttcttcgtcgtggacctgacttccgagacggagaacctggactcgcttaaggagtctatcatcacctcgctgtcactgttgccccccaacgccctcatcgggctgatcacgtacggcaacgttgtccagctgcacgacctgtccagcgagacgattgacaggtgcaacgtgttcagaggcgacagagagtaccagcttgaggcgttgaccgagatgttgacgggccagaagcccacaggccccggcggtgctcagtcgcatctaccgaacagcataaacaagatcacgccgttctctttgaacaggttcttcctacccctagagcaagttgagttcaagttgaaccaactactcgaaaacctgtctccggaccaatggtccgtgcccgcaggccacagaccactaagagccaccgggtccgctttgaacattgcctctttgcttctacaaggctgctacaagaacattcctgcaagaatcattcttttcgctgctggcccaggcaccgtggccccagggctgattgtcaattcagagttgaaggaccccttgagatcccaccacgacatcgactctgaccgcgctcagcactacaagaaggccagcaagttctacaaccaagtcgcccagagggtcgccaccaacggccacactgtcgacatctttgccggctgttacgatcaaatcggtatgtcagaaatgaaacagttgaccgactccaccggtggtgtcttattgttgaccgattccttttccaccgcgatcttcaaacaatcctacttaagactgtttgccaaggatgaagaagggtatttgaaaatggctttcaacggtaatctggctgtcaagacaagcaaagacctgaagattcaaggcttgattggtcatgcctccgccataaagaagacagacgccaacaacatcagcgagtccgaaatcggtatcggtgcgacttccacttggaaaatggttgctttgtccccttaccattcgtatgcaattttcttcgatattgccaacaccgcggctaattccaacccaatcatgtctgcgcctggttctgcagacagacctcatctagcatacactcaattcatcacctcttaccagcactcttctggtaccaaccgtatcagagtcaccaccgtggcaaaccaacttctacccttcggcacccccgctatcgcagcttccttcgatcaagaagctgcggctgtgttgatggcacgtatcgccgtccacaaggctgaaactgatgacggagccgatgttattagatggctggacaggactttgatcaagctgtgccaaaagtatgcagactacaacaaggacgaccctcaatccttcagactggctccaaatttttcgttatatcctcaattcacttactatttaagaaggtcccagttcttaagtgtctttaataattcccccgatgaaactgcattttatagacatattttcacaagagaggatacgactaattctttaatcatgatccaacccactttgacatctttctcgatggaagatgaccctcaacctgtcttgctagattccatctccgtcaaaccaaacaccattctgttattagacactttcttctttatcttaatataccacggtgagcaaatcgctcagtggagaaaggctggttaccaagacgatccacaatatgccgatttcaaagcccttctagaagaaccaaaactagaagccgcagaattattagtagatagatttccgctaccaaggttcattgacaccgaagccggtggttctcaagcaagattcttactatctaaattgaatccatctgacaactatcaagatatggcccgcggtgggtctacaattgtcctgaccgatgatgtatcgttacaaaacttcatgactcacttacaacaagtcgctgtctctggtcaagcatag

SEQ ID NO: 2739 - DNA, 261 bp, Saccharomyces pastorianus
atgagcgaggccagtgacagcaacgtgatgcaacccgtaaacccgaagccctttctcaagggcctggtcaaccaccgcgtgggcgtcaagctcaagttcaacaacaccgagtacaggggcacgctcgtgtccacggacaactacttcaacctacaactggaagataccgaggagttcgttgcaggcgtctcgcacggtgtcctgggcgagatcttcatccgctgcaacaacgtgctctacgtcagacagctgccgaactga

SEQ ID NO: 2740 - DNA, 804 bp, Saccharomyces pastorianus
atgagcattgagtactccgttatcgttcccgcctaccacgaaaggctaaacatcaagcccctaaccacccggctgttcgccggtatgggccccgagatggccaagaagaccgagctgatcttcgtcgacgacaactcgcaggacggctccgtcgaggaggtcgatggcctggcccacaagggctacaacgtgcgcatcatcgtcaggaccaccgagcgcggtctttcctccgccgtgctcaggggcttccacgaggcccagggccagtacctcgtgtgcatggacgccgacctgcaacacccaccagagagcgttcctgacctgttccggtctctacacgatcacgcgttcaccctgggtaccaggtacgctcccggcgttggcatcgacaaggactggccgctgtacagacgcgtcatctcctccaccgccaggatgatggccagacccttgaccgtggcctccgaccccatgagtgggttctttggcctgcagaagaagtacctggagaactgcaacccacgcgacatcaactcggagggcttcaagatcgcgcttgagctgctcgccaagctgcctctgccaagagaccccagactggccatcggcgaggtgcccttcactttcggtgtgagaaccgagggtgaatccaagctctcgggcaaagtaatcgtccagtacttgcaacagctgaaggagctttacgtcttcaagttcggcgccaacaacctcatcctcttcatcgccttttggtccatcctatttttctacgtgtgctaccagctgttccatctggtcttttaa

SEQ ID NO: 2741 - DNA, 4611 bp, Saccharomyces pastorianus
atgaacagaactctactgctacgtttgtccgacactggtgagcccgtcacaagctgctcttatggcaaaggtgtcttgacactaccccccatcccactccccaaggatacccccaaggaccagccgctgtacacggtgaagctgttgatatctgcaggctctcccatcgctagagatggcctggtgtggacaaattgcccaccagatcacaaaacgcccttcaaaagagacaagttctacaaaaaagtcgtccgctccagcttccacaaggacgactccatcggcctggacatttacgccccgggctcgtactgcttctacctctccttcagaaacgacagcgagcagctcgaaacaactaggaaatactactttgtcgccttacccattctccacgtgaacgatcattttttgcccttgaactcgatcgccatgcaaagtgtcgtgtccaaatggctgggctccgactgggaacccatcctgtccaatatcgctgccaaaaactacaacatggtgcatttcacgcctctgcaggaaagaggggaatcaaattcgccgtactcaatatatgaccaactgcagtttgaccgggcccacttccagtccccggaagacgtggcagatctggtcaagcacctgcatcgcgacctgaacatgctctccttaaccgatattgtgtttaaccacaccgcaaacaattctccttggcttgtcgaacaccctgaagctgggtataaccacctcactgctccacatttgatcagcgccattgagctcgatctagaacttctcaacttcagcaacaacctcaagtcctggggctacccgaccgagctgaatactatagacgatcttttcaaaatcatggatggtatcaaagtgcatgttctagggtcgttgaaactttgggaattctacgcacttaacatccaggcaaccctacaagacttaaaggaccactgggacgacgaatccaacgaaaccttcgagttccccgaagatattaaagatgcctcgtcagacttcgtgaaactggcctcatttgttaaagataacgttaccgaacccaatttcggcacactaggcgaaagaaactcaaacaaggtccatgtggctaaacttatacagctactgaagcttatcagcaacggagatagcaacaacattgaaccctcattagctgttgcccagaacatcttgaatgaattaaacttgcccctgtataaagaatacgacgatgatgtcagcgagattcttgaacaactgttcaaccgaattaagtatttaagaatagacgacaacgggcccaagcagggtccggtcactcccaaggtgcctttaacagaaccatactttaccaggtttaaggggaaagacggcacagactatgccctcgccaacaacggttggatatggaacgggaatccgttagtggattttgcatcccaaaattccagggcttacttacgtagagaggttattgtctggggggattgtgtcaaattaagatacggcaaaagccccgaagactccccctacttgtgggaaagaatgtccaagtatattgaaatgaacgccacaatatttgacgggtttagaatcgataactgtcattccaccccattacacgttggtgaatatttcctagatctggccagaaaatacaatccgaatctttatgtcgtagctgagctgttctccggttcagaaaccctggactgtctgtttgtcgaaagactcggtatttcttctttaatcagagaagccatgcaagcttggtctgaagaagaactatctagattggttcataagcatggtggcagacctattggctcctataaatttatcccgatggacgatttttcgtatccgggggatttcgatttagatgaagaacattgtttcaacgatccaagcgataactcgttaaaatgtgtttcagagatcataattccgaaaattctaaccgccactccaccgcatgccttgtttatggactgtactcacgataacgagactccatttgagaaaagaacagtggaggataccttacccaatgctgcgctcgtggcgctttgctcctctgccataggatctgtttatggttatgacgagatttttccgcatttactgaatttagttactgagaaaagacattatgatagttccacctctaccggtagttcttctgcagggattactaaagttaaggccactttgaactcaatcaggacaaatattggccaaaatgaatatgatatcgaagattcagaaatgcatgttcaccaccaaggacaatatatcacctttcatcgtatggatgttaaatcaggaaaaggatggtatttaatcgccagaatgaaattttccaataacggcgattccaatgagactttacccccggtggtactaaaccaatcgcagtgctctttgaaattttcatatgctttggaaagagttggcgataaggttcctgatgatgacaaagtaatccgaggtatttccacaaaattaaaagagcttaaagggtttgagatctcttatgatcacgtaaagaagctctccaccatcaaattacccgacgaattccctcaaggttctatcgccatttttgaaactcaacagaatggtgtggatgagtctttggaccatttcataagatcgggtgccctaaaagcgacctcaaaattgactttagaatccataaattccgtcctgtaccgtagtgaacccgaagaatacgatgttagcgctggcgaaggcggtgcttacgatattcctggtttcggcaaacctgtttattgcggattgcaaggttgggtctccgtcttgagaaagcttatgttttgtaacgatttggctcatcctttgagtgcaaatttaagaaatggccattgggccctagattatactgcaagcagactaaattactacaatgatgaaacaggaatcattgagatacaaaactggttgcgttctagatttgatagagtcaaaaaattaccaagctacctggtaccaagttattttgccctggttataggtattctttatggatgttgtcgtttaaaagccatccagttgatgtccgataatattggtaaatctacgttgtttgtacaaagtttatcgatgacgtctattcaaatgatttctagaatgaaatcaacctccattctaccaggagagaacgttccctccatggctgcaggtttaccacattttagcgtaaattacatgagatgttggggtagagatgtttttattgcattaagaggtatcctattgaccactggtaggtttgatgaagcaaaggcgcacatactagcgtttgccaaaacattaaagcatggtttgattccaaatttactagatgcaggtagaaacccaagatataatgctcgtgatgctgcgtggtttttcttacaagctgtacaagattatattcatattgttccagatggtgaaaaaattttgcaggatcgagtaacaagaagattcccattggacgacacttacattcctgtagatgatacaagagcatttagttactctagtagcctagaagagatcgtttacgaaatcttgagtaggcatgccaagggaattaaatatagagaagccaatgcgggtcccaatctagatcgtgttatgactgataaggggtttgatgttgaaatacacgtggattggtctactgggttgatacacggtggatctcaatacaattgtggcacctggatggataaaatgggtgaaagtgacaaagccggctctgtaggcatacccgggactcctagggatggggccgctatagaaatcaacggccttctgaagagtgccttaagatttgttgttgaactaaaggaaaaagggttatttaagtttacagatgtagagacacaagacggtgacaaagtcagctttactggctggaatcaattggttcaagacaatttcgagaaaaagtactatgtaccagaagatccaactaaggatgcggagtatgatgtggaggtcaaatcaggcgttaacagaagaggcatctatagagacttgtacaagtcaggaaaaccttacgaagattatcagttaagaccaaactttgccattgccatgactgtggcaccagaattatttgtccccgaacacgccatcaaagcgattactattgcggacgaagtgctaagggggcccgtgggtatgcgcactttggatccaagcgactataattaccgcccgtactataacaatggagaagattccgaggatttcgctacttcaaagggaagaaattaccatcaaggccctgagtgggtctggctctacggttacttcctaagagcgttccatcactttcacttcaaaactaacgctcgttgccaaaacgcagccaaggaaaaaccgtcctcgtacttgtaccaacaactgtactaccgattgaaaggccacagaaaatggattcgtgatagcgtatggacagggttaactgagctaactaataaggatggtgaactatgcaatgattctagccccacacaagcctggagttccggctgcttgttggatctattctacgatttatgggacgcctacgaagacgattcatga

SEQ ID NO: 2742 - DNA, 492 bp, Saccharomyces pastorianus
atgaaccatagtgaatcgctaacgttcaatcaactcacgcaagactatataaataaactcaaggatgcgtttcaaatgctagatgaagatgaagatgggattattagtcggaaggatcttgccaaaatgtatgctaccttgggaaagacattgacagacgaagaatggtccaacatggtacccagtaatgaaaataccacaaaagaggttggtgaagagggtgcgagcttccccatttttttatctattatgggaaaaaacctgtcacaatttcccgaacgtgaagaattagagaaaagcttcaagtcacttagtgagaaagatgacttaaacattcctctcaatgaggtgattgaatcgttaaaggaggcgggctttgaaaatcctgaagaagaatttgctaaacttttgaaattgtttactacaaatcagcaaagcactgatgagaaaacctttcgaggtaagcttttcttggattcaatcaccgattaa

SEQ ID NO: 2743 - DNA, 4257 bp, Saccharomyces pastorianus
atgtcggacgtcaaacaactgttgaaagaagccaagctagaattgacgagacgggactacgaagagaccattgaaatttctgaagaagttcttaaattagaccctgacaattactttgcacatatctttttaggcaaagcgttttcgagtcttccacctagtaatgaaggcaactcaaatcgtcatttggagagtgccactgctcattatatatctgctaccaaattggcccctgacaaccttttagcatggaagggtcttttcctcctattcaagaccaccgaggccgttccaaatatactttcgtatgatgtatattttgatttatgtggccaatatgccgatattcttttgaagcaggagcagtctcaagtagggctgataaatgacgtaaagcttttaaagaaaactcatacagactgtaggaaggccttttatgagcatttgaaacccggatctttaatggccgaaaccattggtcgtcatttagctacaccacaggacgccttattgaatctcataaaaattttgtccaatacagaagtcacagaaattggtaaggccgttagtcagaatagattaagactaaaagccagtgatccagattatcagattaaattaaactcattctcctgggaaatcattaaaaactcagatattgatcagctatacaaccaattagtaaatattctcaccgatgatcaactgagaagtgacatcgaaaatgagtggttggaatatagaattaaagtcctaaaatctatgccgttagatgtgaagaaggatttcttcatgaaagtcaaagatatggttgaagatatggttcttgtagatcaccagtctttactcgcctggcagaaattttttgagtggaaggattacgaaggtctggacaacatggatgctatgctaatattacagtattttaagaagtttcctaaagatcctttagcgatgattctttattcttgggttttttcaaaactatcaaaatatgatatcaagagtttggaagccactaatcaaccgactgaaagtcatgacaagaaaaataaggaaacagacgtcaagaatacagatgaacatgtaattaaggatcaagatgaaaatgaaaatgaaaatgagccaaaagaagatgacgaagaagatcttgatgatatggaaatcggtttattggaagatgaagttgtaactgcattaacagaaaatatcgtaaagtgcaagaataatattttggcacatcggattttatgtcagtattatttgctcaccaaggaatacgaagcatctttgccgtatatcaaaacgggaatttcattaatcgcttataacattaaggatttgggagtttatttgccattaactaaaagagagttttctctggatctggcaactgtttatacatatgttgatgctccaaaagatcataatgctgcgttgagattatacgacaacattttatctggtgattctgacaatatacaagcaaaaatgggtaagggtataattttcattgaaagaaagaactgggaggaggcaatgactttattgaccgaagtgcatgaacaatcccctaataacttggaagttttatctgaactatcgtggagtaaagcacacatgggtttcatggaagaagctctgattggcctagacggggtggtcaaggctatcaaaggtatggatttgcgttcgattgatttcagagcattgaacttatggaggcaagcaaaagtttatctaatgaaacatgcttcacttgacgatgaaaatcaagaaaatatcaagtttgcatttaaactattagttcaaagtattaagatcttggatacttttgcccctggtttctcaacgctgggtgatatctattgccactattataaagatcattcaagagctttcaaatgttacttcaaagcgtttgatctggatgcaggtgattatacggctgcaaaatatattacagagacatatgcaagcaagcctaattggcaagccgcctcctccattgcttcaagattgatcaaaggcgaaaaggccaaggcagaattacgttcgaacaattggccatttagagtcgttggggttgctcacctggaaaagcaagaagaaagtgactctattgagtggtttcaatctgctttacgcgttgaccccaatgatgttgagtcatgggtaggtttgggacaagcataccatgcgtgtggccgtatagaagcatcaattaaagttttcgataaggccattgaattacaagcttcacacacttatgcgcgatatttcaaagccctatccctatgtgacatgggtgaatatcttgaaagtttggagacgctagaaaaagtgtgccaagaagtggctaccgaagaatctttccagattggtttggtggatgtacttgtaaaatactccttggatttatattcacaggggtttttaatgaaatcagtagcaatcgccaacgatactattgaaaggattaggataataatcaccgagttgcaatgcacaaaccagcagatttggatttgcctttcacaagtcttgagattgttcatttggatagaatccaaggttgatactttacctgttgaatcactagtatcaattttccaaatttctgggcttactgaaactaaagaagttgattccatcgacaatattaaaattgacaccttgctggatagtactactgacgataatgtatccattgcgtgtaaatttttgatattggcttcaaaatacagtgtttccaatcaaagcatgtcagatgccgcaggaacaattagagcttcatactggtataatattggtatctctgagcttaccgcatttgttactttgaaagattctcattatagagatgctgcagtttttgctttcaagaaatcgattcaactacaatccaatacaagcgaaacttggattggactgggtatagcaactatggatataaactttcgtgtttcacaacattgtttcattaaggcaactgctttggagcccaaagcgaccgatatttggttcaacttggctatgctgggcttgaagaaaaatgatgctgagtttgcccagcaagttctcaataagttacaaagccttgcaccacaggattcatctccttggctaggaatggctttaatacttgaacaacaagggaatattgtcgaaagctctaaattgtttgcacactcctacatattatccaatggtagctcaaaggccgcccaagtattatatgctaaaagtgtacttgaaaatcatattgacaacggtgatgacgaaagagatattgaaacagtagaaaaactaaccactgtttcaatagctctggatcagttcttcaagaaaagccctgaaaatccgttcgctattcagtgtgctctgctaacctttgaaaggttacatcattacgagcctgctaataagttagctgaccaactggcaggaatattggagaaaagatttgaaaaaactcaagacgaaaaagagttatttaattttggtatcatcaagggacagtttgcccgtattcatctaggtctgggacattttgaactctccattgaaaatgcagaattgtctcaaggtattatatccgaatccagtgacaaaaaagcattaagaacaaagatatcgaatcatatttctctaggattgagttattttttcctgaatgattttgatcaaacattaagacaatttcaagagttgctaagaatttcgaagaaatctaagcatttagtgattttgatcgctaaggtactttatgatgtaggtgaaaatgatgcgaaggaaattgccctacaagaactaacagaatatataaccacaaaaggggcagacttgttaataacactaaccattgcagctatgtcaattctggatgacaagcgtgaagatttaagtattattgtaagtaaattgaaggccttaccattgtccagcctgatagcggataaacacaaagatgcaccatatctgatagaagagataacgaaaagactttataatgatgacacctgtaaacaaacatggcaaagaagcgcatattttttccccaataatctcgaggtttggaatagattgaataaaaatattcagcgtaaaatagcttctaacggtcagaataaagttactgcagaggagatgagtaaactatactgtgaaagtaaaaatttgagaagcgtgcaaagaagtgtgttcctgtgtccttggaacaaaactgtagtgaatgcactaaaagagtgcttttag

SEQ ID NO: 2744 - DNA, 1971 bp, Saccharomyces pastorianus
atggacgagctactgaaggatgtggtaagtgcggaaaatcaagcaggtcaaggcggggcagagtccgagagactggtcacgcccgaagacgttatgaccatatcttccttggaacagcggactttgaatcctgatttgtttctatataaggaattggtgaaggcacatctgggtgagagggctgcctctgtggtcggaatgctggctgcactgggcagattgagtgttcgggagttggaggagaagatagatggcatgcatacggagagcatcaagaccacgttagtgtcattgacgcaattgaggtgtgttaagtttttgcaagaaacagcgatttccgggaaaaaaaccacctattattattataacgaggaagggattcatctactgctttactcagggttgattattgacgaaattacatctcaaatgcgtgttgacgatgaacataagcaattagtggcacaaatcgtacaaaacgtcatatcattgggctccctgactgtcgaggactatttaagtagcgtcacatcagaatccatgaagtataccatttcgtcactcttcgtgcaattatgtgaaatgggatatcttattcaaatatcgaaattacattatactccgattgaagacctgtggcaattcttattcgacaagcattataacacaatccccagaaactctcccttatcggatttgaagaaaagatctcaagcgaagatgaatgcaaagaccgattttgcaaaaattttgagtaaaccaaacgacctttcacaaatcttaaccgttgacaccaagacttcattgagggtcgttaagtctacggtctccttaactattaatttagataggtttatgaagggcagaagatccaaacaattgaccaatttggccaaaacgagagtcggatccattacagctcaggtttacagcattgcattaagactcacagagcaaaaatctccctgcattatagatctattaactcaaactggtcttttacaggatttagatgaggcaaaatcgtttcaggaagaactagagctcattgaggaaaagacgccaggtttaacctttaacgctattgacttggctaagcatatccctaaagaattggacctgcgcggcagcttagtaaccaagaagccctctgacaataagaaacgttccggttcgaactccgctccaccaccagcaaataagaaactgaaaactgaagatggatttgccattcctgcgctacctgctggcatactcaaatctgttcaagatagtgaagaaggagaacaaggaggagaacaagaagccgaggacgacgatgaattggatgcagatatggaaaatccacactcagcttcgttaataaatagccatttgaaaatcttagcatcatcaaattttccattcctaaacgaaacaaaaccaggtgtttatcacgttccgtatagtaaattaatgccaactttaaagtcatctgtttatgaatatattattgcttccacactaggtccatccgctatgcgtttgagccgttgtattcgtgataacaagctagtctctgaaaaaattattaattcaactgcattgatgaaggaaaaggatataagatcgacattagcgtctttgattagatacaactcggtggaaatccaagaagttccaagaactgtcgacagatctgcttcaagggcagttttcttattcagatgcaaagaaacacattcctgcaatttcatgaagcaaaacttggagtggaatatggcaaatttgcttttcaaaaaggaaagattaaaacaagaaaactccaccttattgaaaaaggcaaatagagatgatgttaagggaaaagagaatgagcttttactaccaagcgaactgaatcaattaaagatggtcaatgaaagagagctaaatgtttttgcacgtttgtcgagactattatcactttgggaagttttccaaatggcatga

SEQ ID NO: 2745 - DNA, 1779 bp, Saccharomyces pastorianus
atgtcttcaattattaaggaaatctttgtagacccctacaaaaggttgaaatgggggtttatcccggtgaagagacatgtagacgacttacaaggcgatctagactctacaaaaaactcaacccactcgggtgataccaacaatcgcgaaacgaaagagagtaatattaataatacaaccgagaaggccaatttgtattctgaaataactcatcacgatcgaaataatggggacgatactacagtatatgaatatagagatgaagccagtagaccatggtggaaattcttcgatgaacaagaatatcgtatcaatagaaaggaaagatcacacaataaatggtacagttggttcaaagagggaacaagctttgaagagaaaaaattattggttaaattggacgttcttttggctttttactcatgtatcgcttattggattaagtacttggatacagtcaatgtaaacaacgcctacgtctcaggtatgaaagaagatttaggtttcaaaggtaacgacttggttcgtactcaagtaatgtacacaattggtaacattatcttccaattaccttttttaatatacctgaataaaattccattaaattacgttttaccaatcttagacttatgttggtcattattgaccattggtgctgcttatgtaaactctgtcccacacttgaaagcgatcagatttttcattggtgcttttgaagccccgagttatttggcataccaatatttattcggttctttttataaacatgatgaaatggtacgccgttctgctttctattatttgggtcaatacctcggcatcctatctgccggtggtattcaatcagcagtattttcatcgctaaatggtgtaaatggcttggaaggttggagatggaattttattattgacgcaattgtatctgttgcggtgggtatcattggtttttatgtcctaccaggtgatccatacaattgttattcaattttcttgactgacgatgaaattagattagctagaaaaagattaaaggaaaatcaaactggtaaaagtgattttgaaacaaaaatatttgatactaaactatggaaatctatttttggtgattggaaaatctatattctatcgctatggaatatcttctgttggaacgacagtaatgtgtcgtcaggcgcatacttgctttggttgaaatctttaaaaaaatattctattccaaagattaaccaactatctatgattactccaggtttaggtatagtctatttaatgctaaccggtgttattgcagataaatttcattcccgttggtttgcaattattttcacacaagttttcaatattattggtaacactatattagccgcttgggacgtcacaggaggagccaaatggtttgggttcatgctacaatgttttggctgggctatggcacccgttttatactcgtggcaaaatgatatctgtcgtaaggatgcccaaactagagctatcacattagttacaatgaatatcatggctcaaacatctactgcatggatcagtgttttggtttggaaaacagaagaagctccaaggtatctaaaggggtttaccttcaccgcaagttcggctttctgtctttctgtttggacttttgttgttttatacttttacaaacgtgatgaaaggaataatgccaaagaaaatggtattatactttacaactctaaatatgacgaaaacccaacatcaaaagaggtcgaaattgtatcaatagccaaagaaaaagaattttaa

SEQ ID NO: 2746 - DNA, 741 bp, Saccharomyces pastorianus
atggcttctcatcaaccaggcaagtgttgcttcgaaggcatttatcatgaagggactcccgagggacgtcatgaacaaatctttggtttggatacgtacgtgacagggtctacatcacctcaggaaaaagttatcgttgtcatgacagatgtgtatggtaacaggttcaataacatattgctgactgcggatcagtttgctaacgctggatacaaggtctttatccccgatattttattcggtgattctattccgctggacaaaacaattgatcgtaaagcctggaaggaaaaacattcacccgaggttacgaaaaaaataattgacggattcgttaagtcgttgaaggatacgtatgacccgaagtttattggtgttgttgggtactgttttggtgcaaaatttgccgttcaacacatcaattctgacagaggtcttgccaatgctgcagctattgcacatccttcgtttgttagcatcgaagaaattgaggctattggtagtgggaagccattattgatttcggcagccgaagaagatgcgattttcccagccaatttgagacacttgactgaagaaaaattgaaggaaatccatgctatctatcaaatagacctctttagtggtgtttcccacggatttgctgcaagaggcgatatcgccaagcctgctgtgaaatatgccaaagagaaggccttgcttgatcaaatctactggttcaatcatttttcaaaggcttaa

SEQ ID NO: 2747 - DNA, 2559 bp, Saccharomyces pastorianus
atggtggtccaagcccgttttgcctcgggcacctcgttgccagacttgaaaccaaaatctacttccacttccatatccatacccatgcaaaatgtcatgaacaggcccgttaccgaacaggactccctttaccacatatgcgccaacatccagagaaggctcgaggctctgcctcagctgaagccgtttttacaattggcctaccagtcaagcgaagtcctgagcgaaagacagtctcttctgttgtctcagaagcagaatcaagagcttctcaagtccaacgatacgaatagagacagtagcgacatggcacccacgttgcggtcgagctccatctccacggccacaagtctaatgtcgatggagggcatatcgtacacgaattccaacccgtctacaaactctaacatggaggacacactgctgactttcagtatgggcatcctgcccattaccatggactgtgaccctgtgacgcagctgtcccaattgttccaacagggcgctcctctgtgtatagtgttcaactcggtgaaaccgcagttcaagctgcccgtcatagcctctgatgatgtgaaagtgtgtaaaaaatccatctacgatttcattttgggctgcaagaaacattttgcatttaacgatgaagagctctttactatctctgatgtgtttgccaattcgacctctcaattggtcaaagtggtggaggtagtggaaacgctactgaattccagtccaaatatcttcccctccagagacaaaacacagcaaaccttgactgcagaaaatcaacagcatcttcaacagcagattccttcaaaaaaacatattgagtacgttaagattatcaaagaattcgtcgcaacagaaagaaagtacgttcatgatttagagattttggacaagtatagacaacagctattagacagtgacctgatcacgtctgaagagctttatatgttgttccccaacttgagcgacgcgatagattttcaaagaagatttttagtatccctggagatcaatgctctagtagaaccttctaagcagagaaccggtgctcttttcatgcattccaaacattttttcaagctttatgagccttggtccattggtcaaaatgcggccatcgagtttcttacttccactttaaacaaaatgagatctgatgaatcgcagaagttcataatcaacaataaactagaattgcagtctttcctctataagccggtgcaacggctctgcaggtatcctctattgattaaggaattggtggcttactctagtgatgacaacaatacaagagaactggaagctgccttggatatctccaagaatatcgcaaggagtatcaacgagaaccaaagaagaactgaaaatcaccaagtggtaaaaaaactttatggtagagtggtaaattggaagggctatagaatctctaagtttggtgaattattgtacttcgataaagtgttcatttccacaacaaacaattctacggaacctgaaagagaattcgaagtttatctttttgaaaaaattatcatattgttttcagaagtaatagctaagaaatccacatcatcactaatgctcaagaaaaaatcttccgcctcagcatcaatgtccaactcgggagcaatggacaacaataacagtcctcaccataattatcataagagacgcagcaatagtagtagtagtaataatatccatttatcgtcttcgtcagcagcggcaataataaattccaatatcaacggcggtgataacaattccaacaattcatcgttatcttcattattcaatatatacaccaatgaacctaaactggatctgagaggtagaattatgataatgaatctaaaccaaattataccacaaaacaacagatcattaaacattacgtgggaatccataaaagagcaaggaaatttccttttaaagttcaaaaatgaagaaacgagagataattggtcatcttgcctacaacaattgatccacgatttgaaaaatgagcagttcaaggcaagacaccactctacgacatccacatcatctacagctaaatcatctttgcttatgtcacccacagggaccatgactacgccaaatcaccataatagtcgtcatacccatgatagcatggcgtcttactctagttcccatatgaagagggtctctgatgttttacctaaacgtagaactacttcatcaagtttcgaaagcgaaatcaaatccatttcagaaaatttcaaaaattccatcccagaatcttctatacttctaaggatatcatataacagtactaccaacgttaacaacaccgaaatctttacgcttttagtagaaaaggtatggagtttcgatgatttgatagccgctattaactctaaaatatcgaatacccataatagttctgctttgcccatcaataaggttaagtaccaagacgaagatggagactttgttatacttggcagtgaggaggactggaattttgctaaggaaatgttggcagaaaacaacgagaaatttttaaacattcgtttgagttga

SEQ ID NO: 2748 - DNA, 831 bp, Saccharomyces pastorianus
atgggttggttttgggctgatcagaaaaatactaccaagagcgcagcctgtggtgctgcatctgcatctgcatctgcatctgcacctgcatctgcaccatcagagtgcccagtcatgcacaagtcgtcatcgtccaagtgccctgtcatgcaagcagacacagagcagataaacccgctcaacaacatgcccgagctcaccgccgccaggcagcctggccagaagctcgacctgcccgccgaccgcaccgtatccagcatcccgaagagcccggacagcaacgagttctgggagtatccctctccgcagcagatgtacaacgcaatggtcagaaagggtaagataggcgatagcgctgacgtggccgaggacgccgtagagtcaatggtgcaggtccacaactttctcaacgaagggtgctggcaggaggtcctcgactgggagcaaccgcacacggaccagagccacgtgcagcccaaactactcaagttcatgggcaaaccgggtgttctgagccctcgcgcccgctggatgcacctatgcggcctactctttccctcccgcttcagccaagaattgcccttcgacaggcacgactggatagtgctgcgaggcgagcgcagcgagcaccaacagcagccgaccttcaaagaagtcagatacgtcctcgacttctacggaggacccgacgacgagaacggaatgcccacgttccacgtcgacgtccgcccggccctggacagcctggacaatgcgagggaccgcatggcccgtttcgtcgaccgaatcaagccggatccgtcctcgtcatcatcgtcccgggccccttaa

SEQ ID NO: 2749 - DNA, 507 bp, Saccharomyces pastorianus
atggtgcgtttaaagagcagatacatcctattcgaaatcctgtaccctcctacagacatcagtgtcgaagaatccttgtccaagggcgacattctgttgtcgcaccacagggcatcgcccgctgaagtatccataaaggctataatccaagagatacgacgctcgctgtcgttgaatctgggcgactatgggtctgccaagtgcagctctctcttgcagttgaagtacttctctaataggacgtctacggggataatccgatgtcatcgagaggattgtgatcttgtcattatggcgttgatgctgatgtcgaaaattggtgatgttggtgggctgatcgtgaaccccgtcaaggtgagtgggaccattaagaagatcgagcagtttgctatcagaaggaactctaaaattttaaatttgataaagtgcgataatgagttcctgattaacgactttaagaaactcgagaacgaaaacgaaaacgaaaaccaaaacgacaccgattag

SEQ ID NO: 2750 - DNA, 1143 bp, Saccharomyces pastorianus
atgttcagcagcagactaccacctccgaaacactcacaaccccagacttcgacggatttgagctcggatcgtcttgagccagcaatattaactaatgaaatcgcgcaaagcgtcaagctggatgattttgtacccaagagacaatcgaatttcgaattaccagtgcccctaccaacccaaactgacatccaagaatgtgcagcaagaaccaagtcatatattcagcgactggtgaacgcaaaattgtcgagttcaaacaacaaggcctcatcgagatacgtaaccgaaacacatcaagcccccaccagtctaacactggataacggccgccaaattgaagtggtatctaagcaaatggacccattgctgccaaggtttgttgggaaaaaggccaggaaggtggtagcacccacggtaagtgatgaagtggtgcccgttcttcatatgggtggtagcaatgaaacgggtgaggctgatccaaatgactggaagataccagcagctgtttcgaactggaagaaccccaatggatatactgtggccttggaaagacgtgtggggaaagccgatgacggtgaacgtgtcattaacgatgggtttatgaaactatccgaggcgttggaaggtgctgacaagaaagccagacaagagatcaagtccaaaatggatttgaaacgacgtgctatggaacaagaagcgttggccaaggaatctaagttgaaagagttgagccagcgagccagacaacaccacggagcccctcaaacgggggccgtggtgaaacccaagaagcaaatgagcacagtggctagactaaaagagctggcctactctcaaggaagagatgtgtcggataaagtgattctgggcgctgctaggcgctcagagcagcccgacctgcagtacgattcgaggtttttcaccagaggtgccaatgcctcctccaagagacacgaggaccaagtgtacgacaacccactgtttgctcaacaggacatcgacagcatatacaagaccaaccacgagcagctggaccaagcggtcaatgcgaaaagcgaaggtgccagcgggtctcatggccccattcagttcactaaagcagaatccaaggacaaacctgatgaatatggggttcagaaatga

SEQ ID NO: 2751 - DNA, 789 bp, Saccharomyces pastorianus
atggccccaagcatagcaaccgtcaaaatagctaaggacatggtccttcccctacgtatatttgttaacagaaagcacatgcttcaaagcaataatagcagtaataataatccggacgcaactatatttcaggcacctttgttatcaaacaactccatcgtttgcttaaaatcgccgaatacaagaatatatttatctcaacaggataagaagatcctttgtgatgaaatcaaggaggacctgttattgatcctttacgaactagcatctcctgagattgttacatcggtgctaagcaaaataagaattgggcataccatagatttccaaacgggtgttttgcccaaacttttcgcaggagcttgcacggaggacacgttgtcttctcatatacagacagtaacaaggctggctaaatttaagtacaagctgcattacaaaaacaagtgggaactagacatatacatcaataacatcaagaacattgctaacatcaggcattacttgacgtttcaaacgttaacaatcaacgggttttcactcaatgcaggtcccaaaaccctattgactaggaaaatagaagcgcaaccacaggtgcctactttatcagaagagaatgaggaatcgggtatattagatttgccagtagaagagaatataaaaccagtgatagaattcaagtacaaacccgttatcaacttgggcgaaattatcgatatccacgtgttgcagagaccaagaagacataaagtacgtgttcaacctgatcaacatctagaagaagaatga

SEQ ID NO: 2752 - DNA, 1014 bp, Saccharomyces pastorianus
atgagctgtgtgtatgcgtttgggtccaacggacagggtcagctgggactggcgcacgacgaggacgtggacacgccgcagaggtccgtcctggcaggtgagagtaaagtgtcgaagatagcgtgcggtgggaaccacagcgtggtgctgatgagcaatggaactctggccgggtgtggggataacaggcgaggtgagctgcagggcacggctgccctgcagcaggtgcctggttggacgcccatcgaggtgccggcgccggtagtggacgtggcatgcggctgggacacaacggtcgtggtcgacacacgtggccatgtatggcagcgaggaggcggtcgttacgagttcgagcagcgccatctgccggttctggacccggcagatggccgcatagcagtatacgggtgcttccagaacttcgtggtggtgcagggcccgcaagtatacggctggggcagcaacaccaagtgtcagctgcaggcgcgcaagtgccggtcggtggtagagcccacgctggtgtgcgatttggggtctgtggccgtggactacgtggccatgggcaaggacttcctggtcgtggtggacaagaacggccgcatggcgcacgcatccggtcgcctgcccgcagggttccagctcgagcagcaagaagcaaggctcggactcgaggtccgctgcatgtggacctcgatccacgtctgggacaggcgccagggcaccgtggagtcgtttggcaggggcacgcatgcccagttgttcccgcaagacgccgtggccgtgggcgtgcccatcaccaacttcactgccggcagtgagcatggcatcctggtcactgccagccaagaagagcccctccactacgacgtgcactgctggggctggggagagcacggcaactgcggccctcaacgagggtcgcagcctgggctgcaactcgtggggcggtacgccaccagccctcgcgtgttcggcgggtgtgccaccacctgggtcgtgctcgaccagtactaa

SEQ ID NO: 2753 - DNA, 3375 bp, Saccharomyces pastorianus
atgaacggttcacattccaacgatgaggatgacttagtgcaggttcccgagacgtcttctccgactaagacgatgtcgtcgtctcccctgaagtcggggtcggcggctccggacgccaacgtagcctctttgaggagcaggttcacgttcaagccctcagaggccagcgaggggccccatatctcgaatcctgcgccatcggggagtcctgaggtggctttagtcaacctggcgaaggagtttccggacttttcgcagacactggtgcaggctgtcttcaagtccaactcctttaacatgcactctgctagggaacggctcacgcggttgaggcagcagaggcagaactggacgtggaacaagaacgcatcccccaagaaaccagagatcccgccgcctgccaggaagacgctgccgctggccaacaccagccgtctgtcatccattcacggtaacggcaacaacaacaagtcctccaagatcacggtggccaagcagaaaacgtcgattttcgaccgttactcaaacgtcatcaaccaaaaacagtacacttttgaacttcccaataacttgaacatagactcggagacgctgagcaagctgcccgtgagttacaacaaaaagagaaggcttgtgagagcagatcagcacccacagggcaagtcccaggtctctgccaccacgcaattgggctctgcaagagagaaactgcttgcaaaccgcaaatacggccaccacaccgatgacaataacgaagaggaggaggagagcatgatgaccgacgacgacgacgacgcaagcggtgacgactatatggagtccacgccgcagataaacctggatgaacaggtcttgcagttcatcaacgactccgacatcgtcgacttgtctgatctttccgacactacgatgcgcaaggcccagctcatagtctctcacaggccgtatgtctctctgaatgcgtttgcgaatacagacttcaacgataaggacactgaagaagctgcctcaggcaagaggaaacgacgctcggcggccaccgccaacgaaagcgaacggttgctcgacaagatcacccagagcattagaggctacaacgccattgagtccgtcatcaaaaagtgttcgtcctacggtgatctggtcagcacacagatgaagagatgggggcttcaagttggcgataactccgagttggacgtgatgaatctcggtgaagacgacgacgatgatgatgatgatgatgatgatgataaagacggccacaatggtaccggttctgcgggtacacacgaccagcgcaatgataaagaggcggccagggccgtggtggagggctttgatgagaccagcgctgaacctactcctgcactagaggaaagagaaacacggaccaggaacacatccgagccattggtcaagtcggacgaagaagatgtggatctagaggcaattgatgacgagttgccgcaatccgagcatgaagacgacgactacgaggaggaggacgaagactacaatgatgaagaggaagacgtggcatacggcgacgatgatgacgacgacgatgacgatgacgaattcgtggccacgagaaaaaacagacatgtggcctctaccacaaacagaaacggccggaaaccgattgtcaaatttttcaagggcaaaccaagactgctaagctccgaaatctcactaaaggattaccagcaaaccggtataaactggctgaatctgctctaccacaacaagatgtcatgtatccttgcagatgatatgggtctgggtaagacgtgccaagtcatttcatttttcgcatatttgaaacaaatcaacgagccgggtcctcacttggtcgttgtgccatcctccactttagaaaattggttaagagagtttcagaaattttgtcccgctatgaagatcgagccttattatggctccttgcaagaaagagaagaattgcgtgatattttggaaagaaactctgggaagtatgacgttattgtgaccacgtacaacttagccgcgggcaataaatacgacgtttcgtttttgaagaatagaaacttcaacgtggtggtctatgatgaaggccatatgttgaagaactccacttcggagagatttgccaagttgatgaaaattcgtgcaaacttccgtcttttattgaccggtacaccattacaaaataacttgaaggaattgatgtcactgttggaattcatcatgcccaatcttttcatttccaagaaggattcattcgatgcgatctttaaacagcgagccaaaacgacagatgataacaaaagccacaacccgcttttggcgcaagaagctatcacaagagcgaaaacaatgatgaaaccgtttattttgagaagacgcaaggaccaagttttgaagcatctaccaccaaagcactcgcatatccaattttgtgagttgaaccccgtacaaaggaaaatttacgacaaggaaatcaaaaccgtattagagcacaaaagaatggttaaggatggagaattgcccaagaacgctaaggaaagatccaaaatacaatcttcgagctctaagaatctcataatggcactccgaaaggcttccctccatccacttctattcagaaacatttatgacgacaaaatgattgctaaaatgagtgacgccattctggatgagcctgcgtatgctgaaaacggtaacagggaatacatcaaggaagatatgagtttcatgaccgattttgaattgcacaaattatgttgtaactttcccaagacactgtcgaaatatcaactacataataatgaatggatgctttccggtaagatcgatgcgttgaagaaattgctgaagactattatcattgataaacaggaaaaagttctgattttctcgttattcactcaagtgttggatattttggaaatggttttatccactttaaattataagtttttgagactagatgggtccacccaagtgaatgatagacagcttttgatcgataagttttatgaagacaaagagattccgattttcatcttatctacaaaggcaggtgggttcggtatcaacttagtgtgcgccaataacgttgttattttcgatcaaagtttcaatccgcatgacgataggcaagctgctgatagagcccatcgtgtgggtcagaccaaagaagtcaatataaccacattgattaccaaggattctattgaagagaaaattcaccaactggccaagaacaaactagctctggattcttatattagtgaggataaaaaatcgcaggatgttatggaaagtaaagtcagtgatatgctggaggacataatatacgatgaaaattcgcaacaaaaggaaaataaataa

SEQ ID NO: 2754 - DNA, 984 bp, Saccharomyces pastorianus
atgagtttcactggttcgttagtgttggctggtgttggcggtttggtgtacaagttcgctgggggccaatcgtacgagaagcttccagctgtcactattcccttcaatgagtactcagacaaggtctacaaaaaacacttcacaaaggtagtgggccgtaccaagtacatcttgatgaacttcttcaaggatgcgttcactggtggcgccttcatatacccttttaggggttttttggagtttaacgccaacaagagcagctattcgaccacaatgctgagtgttttatcgagctacttagtaatgtttgcgctggtgagctttgtttattgggccaccatcacgccaatgtacacggcatttttgattgtgctgggtcccattggtctcttcattgccattttgcactcttttttgcaagctaacgtattcactttgttgtttatgagactgagccacttcaacaaccatttggtggaggtttgcctaaaaaagaagggcctacagcaagattcccacctggggaagccaatcaagtactatgtgcctgttaattcggtgtatttctgggcttattatttcccctttaagttggtaaagtacatcctggggctagtggttcttctggctctcttatccgtatcatttttcccactggtggggcccgtgcttttccatgttttgatttctcctttcattgcccaaatttacttttcaaaagttttacgtttacaaaatttcaacaacctacagagacgtgaaaacatttatcttcatgcaggccaatatgcctcgtttggattgttggcagggttgatagagtctgttccagttttggcaggatttgccatctccacaaataccattggtagtgttttattgaacattgattatccgatggttccggaaatcgtaaccgtcgttgaaactaatattgaaattgaaacagtaccccaggaaaccaatgaacaggtaaattattaa

SEQ ID NO: 2755 - DNA, 1287 bp, Saccharomyces pastorianus
atgaatatccttttacaggatccatttgctgttcttaaggaacatcctgaaaagctcacacatacaattgagaaccctttacggactgaatgtctccagtacagtccttgcggtgattacctggctcttgggtgtgccaatggagcacttgttatttacgacatggatacattccggcctatctgtgtcccagggaatatgctgggggcacatgtgagaccgattacttctatcgcatggtctccagatggccgttttttgcttacaagctccagagattggttcataaaactttgggatctttctctaccaagtaagccattgaaggaaattagctttgattctccaatttgggggtgccaatggctggacgctaagaactggctctgtgttgctacagtatttgaggaatcagacgcatatgttatagattttagtaacgatccggtggcaagccttctcagtaaatctgaggagacatcattgagctcaacacccgatcatggatatgttcttgtatgcactgtgcatactaaacatcaagatatcattattactgggacatcgaaaggttggttaaacttctataaatttcattctatctttcaatcggaatgtattcattctctcaaaatcacgagctcgaatatcaaacacgtaataatttcgcaagacggtgggagattggctattaactcttcagatagaacaataaggcagtatgaaatacatgttaataacaaaacctccaccgtagagctaattttagagcacaagtaccaggatgtaattaacaagttgcagtggaactgtatcctcttcagtaataactcagccgaatacttagttgcttctacccatggttcttctgctcatgaactatacatctgggaaaccacaagtggaacgttagtgagagttttagaaggtgtagaagaggagctgatagatatcacttgggacttctatagcatgagtatcgtgagtaacggttttgaatctgggaatgtgtatatgtggtccgttgttgtacctccaaaatggagcgctttagcgccagactttgaagaagtagaggaaaatgtggattatttggagaaagaagatgagttcgacgaagtcgatgaagctgagcagcagcaggggctggaaaaggaggaagaaatagttatagatcttcgaacaagagaacagtatgatgtcagaggtaataatttacttgtggagcggttcacaattcccaccgattatatacggatcataaaaatgcagtcatcgtcaggttga

SEQ ID NO: 2756 - DNA, 1452 bp, Saccharomyces pastorianus
atgatgaacggcaatgatagcgaggctgagaatcaacgtctcttggacgaattgatgaaccagaccaagattcttcaggaaacattggacttttcgctagtggcacctactgcgtaccacaacaacgattatgaaatacagggcagtgcttacccaggtggcgagactccggctcagcagcatgagaaactgtcctacatcaacacacacagttccaacgataacaacttgatgggcagccaagcgagatcgaattcacaaacacctacgccctcgaccatatacgaggaaggggagccacattcgtcctaccttgatgacatgttcagaacaaaccatggcagtaggcctgccactcagaattctatatcttccatagggcaggctcccttgagggcatccttttccatgtcttacgattcgcctgtggagaaggtattgaatgcaccatcgcagcaacatgaaggtatgaaagctgaattaccgcaagactttctgttccaacacggtgcagacgacacgatgtacaacttaactgacgatctaagctcctctttatcttccagcattaattctgatatgatgacccctcacacgtattcatcatctttctcctataacccacaaactctgggcccagcatcggtttcatctacatattctccaaaagttagatcgccatcttcgtcattccgtgcaggaagctttctttcctcgtcctttagacatggtagcataaatacgcccagaacgaggcatacttcaataagtagtaatatgactgaaaacatgggacccgggagtattccaaaggtcctggccggattaacctcagacgaaaagttgagacggaaaagagaatttcataacgctgtggaaagaagaagaagagagctgataaagcaaaaaataaaagagcttggtcagttggttccgccctctctattgaattatgatgacttaggtaaacaagttaagccgaataagggtatcatattggatagaacagttgaatatttacagtacttggcagaaatcttagaaatacaatcgaggaaaaagaaagctttactaaacaagataaaagaattagaacataaaaaaatttcagtcgccactgcatctccttttgccaatgaccatcatgcaaacactagaccaattaataaccaaaaaaacgaggaaagaattatagatatcagatccgttccggactcatcttcaaatgaacgggatatcaagactgaatttcacaattgggggccatcaatatatgattcaacgaaaaaccacaataatactatggaagcacagccacacgcaaatattcatgatgatttaaaagaatttttatccggggatttgatcgaggccgaggataacgcaaaattaatgtttggagatgacaattctaaccctgcagattaccttctagaatttgggtcacgatag

SEQ ID NO: 2757 - DNA, 1647 bp, Saccharomyces pastorianus
atgatgttagctcgtactgctgctatccgttctctgtcgagaactttactgcactccgccagagctgcaagacctgccgctggtgttgctgctttggcctccgccagaagattggcttccaccaaggcgcaacccacagaagtttcctccattttagaggaaagaatcaagggcgtgtccgatgaggccaacttgaacgaaaccggtagggttcttgccgtcggtgatggtattgcccgtgttttcggtttgaacaacatccaagccgaagaattggtcgagttttcctccggtgtcaaaggtatggctttgaacttggagcccggtcaagtcggtatcgttcttttcggttctgacagactggtcaaggaaggtgagttggttaagagaaccggtaagattgtcgatgttcccgttggcccaggccttttgggtagagtcgttgatgctctaggtaacccaattgacggtaagggaccccttgactccgtgggtcgttcaagagctcaggtcaaagccccaggtatcttgccaagaagatccgtccacgaaccggtccagaccggtttgaaagccgttgacgctttggtccctatcggtagaggccaaagagaattgatcattggtgatcgtcaaaccggtaagaccgccgtcgccttggacaccatcttaaaccaaaagagatggaacaacggtaacgacgaaaccaaaaaactttactgtgtttacgttgccgtcggacagaaaagatccaccgttgcccaattggtccagactttggaacaacacgacgccatgaagtataccatcattgttgccgccaccgcatctgaagccgctcctttgcaatacttggctccgtttaccgctgcatccattggtgaatggttcagagataacggtaagcacgctttgatcgtatacgatgacttgtcgaagcaagccgtcgcataccgtcaattgtctttgttgttgagacgtcctcctggtcgtgaagcctaccctggtgatgtcttttacttgcattcaagacttttggaaagagctgctaagttgtccgaaaaggaaggttccggttctttgaccgccttgcctgttattgaaactcaaggtggtgatgtttcggcttatattccaaccaatgtcatttccattaccgatggtcaaattttcttggaagctgaattattctacaaaggtatcagacctgccattaacgtcggtttgtccgtctctcgtgtcggttccgctgctcaagtcaaagctttgaagcaagtcgccggttctttgaaattgtttttggctcaatacagagaagtcgctgcttttgcccaatttggttccgatttagatgcttctaccaagcaaactttggttaaaggtgaaagattgactcaattattgaagcaaaaccaatactctccattggctaccgaagaacaagttccattgatctatgctggtgttaacggtcatttggacaacattgaactatcaagaattggtgagtttgaatcttctttcttatcttacctaaaatctaatcacgatgaacttctaactgaaattagagaaaagggtgaattgtcaaaagaactgttggcttccttaaagagtgctacagaatcctttgttgccactttttaa

SEQ ID NO: 2758 - DNA, 2961 bp, Saccharomyces pastorianus
atgaatttcgaagaaagaactctaggcaagaggtctaacgttccccccctatatatttccgtgaacgaatattctaaacgaatggaggacgaactcaatatgaaaccaggtgacaagattgaagtcattacagatgatggggagtacaatgatggttggtattacgggcggaatttaagaaccaaagaagaaggtctgtacccagcagtattcaccaagaagacaactctgaacaaacctgaaagtttgcgtaagacacgaactcaagagagtggcaatgcaagtggcaacgcgattaacaattacggaacttcgaatggatacaccaataaactaagtaagcttccctcacaacaacaggaaaataggtacacttcattgaaaagtactatgagcgatatagataaagccttggaagagctaagaagtgattcaattgaactacaaacaaaaacatcacccatcaagctacctgaactaaatgctatggttatgccagatgaagaaactttaattctagagaaacctcaaaacgtgggaaacacaacacatgactctgtcttttcgagtacggcagatttgaatctaagctctgaatctctaaaggacacaagcaaatcggttatatctacgaaatctttagaggcaagttcaagttccactaacccgttagaccctaaaatggcaaaaacttggacaccagaagaggttactgattattttattatggtaggattcgatcataccaattccaataagtttaagcaacatcaaatttctgggaaaatactattggaattagaattggaacatttgaaggaactagacataaattcctttggtataaggtttgaaatattcaaagaagttggcaacatcaaatctgcaattaattcgtcgtcaaatgaggtgcacaacagctacatcccttttgctcttgacaaagaaactactaaactaatgcctgcagctactgtaaatagggaagaaattcagcaaccaatctcctctaagtttgacaccaacaggctaccaaacgtaaatttcaatagaagatcatcttcaaatacaacagagcctcaaagaccaagctccgttgttgtaaatccaaattttaaactccaagactccaatgaacaagttttagatataacacaggttcctgatgtgtttactgacaaagatatttttgaatctccagggagagctccaaaaccgccatcgtacccgagccccgttcagccgcctcagtcaccatctttaaataataggtacatgaacaacaatgccaggttccctcctcaaccagcaacatcatctcgaaacagaaattcagtcgtttattcaaatgcggcaattcctaactcttccacatcttcagataattcgacaaataagttcaaatttcctgttatgaatggtcatgattcgaactccaggaacacaactttgacatctgccactataccttcttttaatacagtcaataccgatgattctcttccaacaatttcaaatatctcttcaaatgcgacgtcccaccacccaaacagaaattctgtcgtgtacaatagccacaagagaacagaatctgggagctcatttgtcgatttgtttaatagaatttcaatgctgtcaccagtaaaaacagattttgacgaagaagaaacaaaaccagcttcaaagtctaataaaactgtattcgactcgacactcaggaaaccatctcttgcacattcaacagatccatcactttcggaactaaaaaaacatagaagaaactcgtcgatattatcctttttctctttaaagagtcaatcgaatccaacgtcgccaacaaaacaatcttttaccgtctatccttctaagatgacatcccattctcgctctcagtcaaattcctattcacatgcaagatcccaatcctactctcacagtagaaaacactctttggttgctagtcctttgaaaacttcattaagccctataaactcaaaatctaacattgccttagcaaagaaagaaagtaataatagcagcgagaataaaaaggaggaaattgtccaaccgcttgaaagcaaacataaacataaacataaacacaggagtaagcataagcataatacttccaaaagtagtgcctccgaagaaaagggtcgaaagaaacttttttctagctcaaaagagtcttcagctggaagcaaagaatcaaaaagatctcctagtgaactctctcaaaaacctaccaagtcgatacttcccaggtctaatgccaaaaaacaacaaacgtctgctttcactgaaggtatacgttccatcactgcgaaggaatctatgcaaaaggcagattgttcaggctggatgagtaaaaaaggttccggtgctatggggacatggaagcaaaggttttttactcttcatggaacaaggctttcttatttcacaaataccaatgatgaaaaggagcgtggtttgatagacattactgcacatagagttttgcccgccagggatgatgatagactaatttccttatatgctgcaagcttaggaaagggcaagtattgcttcaaattggtcccgccacaaccaggatctaaaaaggggctaacctttacagaacctcgcgttcactattttgcagtggaaaataaatctgatatgaaggaatggttatcagctataataaaagctactattgatattgatactagtgtccctgttataagttcatatgccacgccgacgatatctttgagcaaagcgcaaacgctactggaagaggcgagattacagactcaattaagagacgctgaggaagaagaggggagagatcaatttgtatgggatgaaacagaaaatagaagaaatccaaaatatccaactgatcaagaagaatttgtaaatcctcaagactatacagagagtactgaatttgaatacccaggtgggagattttga

SEQ ID NO: 2759 - DNA, 354 bp, Saccharomyces pastorianus
atgaagtctacgttcaaatctgagtacccgttcgaaaaaaggaaggccgaatccgaaagaatcgccgagagatttaagaataggatacctgtgatttgcgaaaaagctgagaagtctgatattccagagattgataagcgtaagtacctagttcctgctgatcttaccgtcgggcaatttgtttatgttatcaggaagagaataatgcttccccctgaaaaggccatctttatttttgttaatgacactttgcctcccactgcggcgctgatgtctgctatatatcaagaacacaaggataaggatgggtttctgtacgtgacttactctggagaaaacacttttggtgggtag

SEQ ID NO: 2760 - DNA, 1287 bp, Saccharomyces pastorianus
atggcagtagtaccagatgaaaccatacaacagtttatggcattgaccaacgtttcgcacaacatagccgtacaatacctctcagaatttgaagatttgaatgaggcgctcaattcgttttatgcttctcaggtagatgatcagaatgacagaagggaagaagcacatcggaagggtcagcaagagaaagagtccaaggaggagactctatcttcttttgaatctttgaggaaagctgtgggtacggagaatgttggtgggtccagttccagattagggtcctcccagggtagtaatgagcatttgaagaaaaaaagctctacttcccctgaaccagccaaaaacacaagccgctcagggagtggcaataactccaggtttatgagcttttccgatatggtaagaggacaagcagatgatgacgatgaagaccatccaagaaacacttttgctggtggtgaaacatccggtttagaagtaactgatccttcggacccaaattcgctgttgaaagacttattagaaaaggccagaagaggaggacaaagcgatcttgaaaacgaatcgcgtgacgaaaatgacgaggagcatgaggatgaccccaaccgcttctctggaagaggttttagattgggttcaacagctgatgctcctgaccaagtggtagaaactagtgctccacaaccacaacgtacaaagcctcagaaggttacaagagaaatcacattttggaaggaagggttccaagtggccgatggcccgctttaccgttatgacgacccggcaaatagtttttacttgagcgagttaaaccaagggagagcgccattgaagctactggacgtggaatttggacaagaagtggaagttaatgtgtataaaaaactggatgaaccatacaagacccccaagaggaaactgggcggcttttcaggccaaggtcaaagactaggatcgcctattccaggcgagtcattgtcaccggtggaagtcgcaaaggatgaagctccaattgttgaggaagaatccgaacctaaagaagagccaaagaagggggatacctccgttcaaatcagatacgcaaacggtaagagagaagtcttgcgttgtaactccacagacactgtaaactctttatacgatcatgtctcatcaaatgcaaacactgacgcgtcgagaaattttactttaaatcatgcgttccctgttaaaccaattaataacgatgacaccacattaaaggacgccgatctgctcaactcagtggtcgttcaaagatggacatga

SEQ ID NO: 2761 - DNA, 1167 bp, Saccharomyces pastorianus
atgtcacagttcttcgaatccgctactcccgttgccatccccacagtcaacgccaacaatggcgccaacgatgccggcagccccgccaccggcgctgctcccgcagctggggctggcgcccagcccaccatcaaccacaggctcttactgtcgttgaaagaggccgctaagatcatcggtaccaagggctcgaccatctcgcgtataagagctgccaattccgtcaagatcggcatctccgaaaaggtgcccgggtgctccgacaggattctgtcttgcgctggcaacataattaacgtggccaacgccgtcggcgacatcgtcgacgtgctcaacaagaaggacgttgagaaagaggacaccgccgcggccgccgaggacgagggtgaagaacactactatttccacttcttgaaccatatcttgcccgcaccctctaaggacgagatcagagacctgcagcagctggaaaacattggatacgtcagactcatcgtggccaactcccatatctcctccattatcggcaaggccggcgccactatcaagttcctgatcaacaagcacggcgtcaagatcgttgcttccaaggacttcttacccgatagcgacgagaggatcatcgagattcagggcttccccggatccatcaccaacgtgctcatcgagatcagtgagattatcttgaacgatgttgatgtcaggttcaacaccgagaggtcctatttccctcacttgaaaaaatcgcccggcgagccctcgtctcctccagcctcctccagcaccaaaatcgaattgaagattccagaactgtacgtgggtgccatcattggccgtggcatgaacagaatcaaaaacttgaagaccttcacaaagaccaatatcgttgtagaaaggaaagacgacgacgacaaggacgaaaactttagaaaattcataatcacgagtaaattccccaagaacgtcaagctggctgagtcgatgcttttgaaaaacctaaataccgagatagagaagcgtgaaaactacaagagaaaactggaaagctcggagggtcacgccgcccccgctgcaactgaacattctgacttcatgtcctcctccgaagaagaagaagaggaagaaaaagaggaagaagaaggacaggacaatgaagatgaacagtag

SEQ ID NO: 2762 - DNA, 4731 bp, Saccharomyces pastorianus
atgatactaattcacgggctttatgccgtctgggcacttctgatctttcccttgaccaatgcggagggattttcccccaaagtgaccaaaactatttcagaagattcgttcactataatgtgttttgatgattctaacactctacttagaacgcaagattcttccctggccattagctttgatgctggggaaaagtgggaaaaggtcaatgacattaaaggaaatgtcaattgggtatatatggaccccttcaatgggcacgacagagccatcgcaacgccaatgaacggatcatacttttacatgaccaatgatcaaggtaaatcgtggaacactatgttcatcgaagaggattctccggctcattattgccaggtgattactcatcccacaaacaaagactatcttattgcaacttgtagctattgtgaaaaccaagaaggcagcgacgaaggtgaacaagccggtgacgatggcacaactattatagattttggccgtaggcgttgttttgataaaacttacggatcaagtgatggtgggaagtccttttctgagatcaagacctctttggaaaagaacgagaaaagtctttatagcaccgctcgttgtgacttcatcaaatctagcaaagattccgacttgggtgacaatgacgcctcaataatttgtctttaccaaaatacttgtttccctgaaaaccaagttggacttactatcactgagtctcaattatttttaactagcgattggggtaaatcgatcaacgaattcgaccaatttaaagataaagccgttgatttctacaaagtgttgaagtctcacgtggtaatcttgacccaaggtgatagatacaataagatgtcttctatggatatatggatatccaatgatctgtcaacttttcaaatggcccacctgcccactcaactaagacattctgtccagagagggatttctgaagactctatcggaagaatcatcctacctatatctagagaaatgaacgatgacgaaaaagacaagtccagcacgtcagaaatcctaatttctgactctcaaggttttaagtttacccccattaaaagaaccaatattgaccaatttggatatattagtcttgctcaacctgatttcttaaaggggacaatcattgcatcgctttaccctatatctggtcgtcataagggtaaaaaaaaaggaaaaagaagcaaaggagaaaccaaaatatccgttgataatggtgcgacatgggcaaatttaaaagttgttgatccagagaatgaagactcatttgactgtgatatcactgaccctgaaaattgctcactctacactatgtttagtccattagagtactcggctccttctgccgggattataatgactgtcgctattgttggcgatgggggcgtattcgattggggagatcaaagaaccttcatctccagagatggtggtttgacttggagtgtagcttttgattttccttgtttatttgctgttggtgatttgggtaacgttatagtagctgtaccatatgactctgaagaagacgatgatccccaatctgaattttactattctttagatcaaggtaagacttggaccgagtacgagttagaagccactatcttcccaatagatttgatcaatactacaccagatggatctggaagcagatttattttgaacgggttaaccatgtccaatatggacaggagcggttcaggaaatttcatttattctattgacttctcaaatgcctttgatggaaaaacctgtgaagatgataaagatttcgaagactggaatctggccgaagggaagtgtgttaatggtgttaagtacaagtacaggagaagaaaacaggacgcccaatgcttagtcggcaaagtgtttgaagatctaaagctgtataaaactacttgtgacagttgtactgcaagtgattacgaatgcgcgtttgaattcgtcagggatgcaaacgggaaatgtgtgcctgactataatctgattgttctttctgatgtatgtgacaagtcaaataagaagtccgtgtctgtagagccaatgcaattaatcaaaggtgatgaatgtaaaacgcccctgaaaatcgagcctgtggaaattccttgtgatggagtcccaggtaagggcaccaatgacaaggaaatagcggtcaccgaaaacaaacttgacttcaaacttgagttctatcaatacttcgacacagttacagacgaatcgctggtcatggtagactctagaggaagtgcgtttttgtctcatgatggtggacagacaataaaaaaatttgacgttgacaacgagaacattgtcgaagttatcttcaacccatacttcaattcttccgcctatctatttggctccaaaggcaatattttcatcactcacgacagaggatacacttttacgaatacgaaattgcctgaagctagacaattggggttgccattagactttagtgcgaaggatcaggatacgtttatatactatggtggcaaggattgcgagtcgatattgagtccagaatgccatgctgttgcataccttaccaaggatggtggagaaacgtttacagaaatgctggataatgcgattcattgtgagtttgcaggctcacttttcaaacatccctccaataaagatatgatcatgtgtcaagtgaaggaaaaatcctcacaaaaaagaactctagtctcttcaacagactatttccacaatgataaaaaaaccgttttcgagaatattattggttatctatccaccggtgattatatcattgttgctgttccccaagaaaataacgaattgagagcatacgtgactcttgacggtgctgagtttgcggaggccaaattcccatatgacgaagacgtcggaaaacaagaggcgtttactattttggagtccgaaaagggatcgatatttttacatttggcgacgaactcggtagcaggagatgactttggtaatctgttgaagtccaactccaacggcacttcgtttgtgactttggaacatgctgtcaatagaaacgcgttcggttttgtagattttgagaaaatccaaggtttggaaggtattattctgatcaacgtcgtttccaacagcgaaaaggtttccgagaatagggacaagaagcaactgaaaacgaagatcacgttcaatgaaggttcggactggtcctttttgaaacctcctaagaaggactcggaaggcaagaagttttcatgtaactccaaatcactagacaaatgttccctgcacttacacggttacaccgaacgtaaagatattagagacacgtactcttccggctccgcgctgggaatgatgttcgggatcggaaacgttggcgatagtcttctaccgtataacgaatgctccacatttttcaccaccgatggaggcgagacctggaccgaagttaagaaaggtccataccaatgggaatacggtgaccatggtgggatcttagttcttgttcccgaaaggaccgaaacagattctatttcttattccacagattttggtaagacatggaaagaccacaaattctgcgatgacaaggtggtaataaaggatataacgactgttcctagagattctgccttgagatttttactatttggagaggcgacaaatatcggaggcggttcaattagaacctacacaatagatttcagaaacattttcgaaagacaatgtgacttcgacattaccggtaaggaaagtcctgactacaaatattcgtctttgggttctcaaagcggatgtctatttggccaccaaacagaatttttacgcaaaactgacgagaagtgtttcattgggaatatcccactttccgaattttcaagaaacgttaaaaactgttcatgtacgagacaggactttgagtgtgattataactaccacaaagacaatgatggtacttgtaagttggtcaagggcttaagtccggccaatgctgccgatatatgcaaaaaagagcccaatctggttgaatacttcaagtcttctggttataggaagatcccgttgtcaacgtgtgagggtggtttgaaactggatattccgtcatcaccccacccttgtccagggaaagagaaggaattcaaagaaaaatactctgtaaggaccggcactttcgcatttgttttcattgctattcttctcgtcattttctttgccacatggtttatatatgatagaggtatcagaagaaacggagggttcgcaagatttggtgaaatcaggctcggtgatgacggattgatagaaaacaacaacaccgacagagttgtcaacaacattgtgaaatcagggttttacatcttctcgaacattgggtctgttgtccaacacgcaaagacaaatgtaggacatttattttccaaaatcaggggaaggttcagcagcagagtgggtccaagctattcgtcgctgactcacgaccagttcttggatgaagcagacgacttgcttgccgggcatgatgaagacgctagcgacttgtctattttcatggaccaagacagcaattttgacatcgaggatgaagatgctgcgacgcccgaacaagaacatacgtcatatacggatcagcctaccgcgagcgatattcctgatgcactgccatcacgcagtgaagaagacgcacacaagtctgacccagcagctccactcaacgaggacaattag

SEQ ID NO: 2763 - DNA, 2526 bp, Saccharomyces pastorianus
atgaaagtgataaagtttccatggctggctcatcgagaagaatcgcgaaaatatgaaatatatacagttgatgtcagccctgatggtaagagactggccactggaggtttggatggtaaaataagaatatggtctgtagatgccattttacaatgcatggacttagaagcagcggcacctgaaacgccgcttccgcaagatttacagatgccattatgtagtatgagtaggcatactggctcaataacatgtgttaaattctcaccagatggaaaatacttggctagcgggtcggatgatcgaattctattgatatgggctcttgacgaagagcaaggctcacaacctgccttcggttccgagcatgagaaagagcactggacagttcgaaaaagattggtggcgcatgataacgatatacaggacatttgttgggcaccagactcaagtatattagtgacggttggcttggacaggtccgtcatagtctggaacggttctactttcgagaaattaaagagatttgatgtgcatcagtcactagttaaaggtgttgtttttgatcctgctaataagtatttcgctactacatcagatgatagaactatgaagatatataggtaccacaagactggggatgtttctttcaccatagaacatatcattactgagccattcaaggaatcccccctaacaacatatttcagacgaccatcatggtctcccgatggacaacatattgcggttcccaatgccaccaacggaccagtaagttcggtagcgatcgtaaatagaggaacttgggatacaagtgtcagtttaattgggcatgatgcgcctacggaagttgcgagatttaatcctagattatttgagaggggtgatagcaacaagaaaagaaaacatgttaacgcagaaaatgaattggtagagcaaaatgaagaggatcttcatcagtttgacaagaatattgactcagttgtagcaaccgctggacaagataaatccttggctgtttggagtaccagcagacctagacccatatttgttgcatttgatatcgcaagcaaatcaataactgatatgtcttggaatcccgatggtagtttactatttgtggtatctttggattcttcgatcaccttgttcaaatttagcaacaatgaattgggcaaaccgattcctctggagaaaaacatggagcagttatacaggtacggtgtcgataaggattcattggatttcccggaaagtgtcaatcaactcctactcgaagaccaaaccaaatcgtctaaaagagcaaaacttaggacatcaaaagcagaagaaaagactcctgaacttgcaacaaatcttatttcaaaccaaaagaatggcatacatgctccagtgttcaaaaatgaacacataaatattctaataccaaagagaaaaaaggacgctaaactgaataaagccgtaactctcaaaagtggtaaaaagcgtgtgacaccgacactaatatctacttcatcatccgctccctttcccaatgctatcaaaagacctgtattggataacaagaggattgaaaataacttgaaagcggccaccaaacacgtcaacagtaaagagctattgccccatgtgccagatggaattgaaaataaaattagtgtctcatctcttccgttaccaagattaggtatacactctttgataatgggtacgaaagaaagggttagaaggaaaaccttagattcagaagttgataacgatggtccagaaaatgaaactgataagggcacagatgggacaaacaacgctattgacgaaattaagattttttcagatgaagaaaacgactttcatagaatgacactgaatgctaaattgacacaagagaagatatggagcgaagagcctacagcgcgatacctttcacaatccgatgttgtaccagacactgatgttgtcgttcttgaagagggtgatttagatcatatatctgtcttggaaatcagaaatggtgtagaaagatccattcaattcgattctgaagcacttctagacaatccaaccaggatactgggatacgaaggggggaaacgaaccattgaatcatttatcccagaagtaatcatttgtgctatgggatcaaaggcttgtaagtgttggtgtttagcttcggccaatggctctatttatatactctcgtacaatggccagcagaaacttccaaaaattagcctaggtcacaaggtcattaagatggtaacatccagcaattttttggttgttctgactgagagaggattattctttgcatgggatttatcagatctaaaatcagtgttgaggaatgtacccattttgccaattcttaatggtcaacctattcaaggaaacaaagtgagaattaacaaagttataaggagctttcatttagatgattctaactgtgatttatatgtagaagttggcgatcctaaaaatatatatagatggactaaaaacctcggttgctggtcactttataaacaatag

SEQ ID NO: 2764 - DNA, 645 bp, Saccharomyces pastorianus
atgggactaattctatatgaatataaagtagtagaactgacgagaagggccgatgccaatgacaccagtaaatacgtggatagcgggggctactatggctattcctttggatcttcatcatggcagtggggacggtggattttgtttgttttattcattgctgctatactgataatcataatgtatacggctttgcttaataagagaagacggaggatagggcgtgctcctataaggggtactgcgtggctaacgcctccttcatacaggcagtctcagcagcaacaaaccgggactaggcagcaacccgctgatgattatgttcctgaatatacagagactgccaatgaacatgaccttgggtactacgacgagcgaggcgagtttcaccctaatgacaaggttgcacccgcgcctcctgtgcaagagctttcgtcagagtctgttaactctttggaacggcctcccgctgctgtggtccatcaaactaactcttcagacatggaagacgatttaacaagaccgaataataggcaagtcccggttgcaagtgacatgggaggtcaaactcaggaatctttaggggtaagcggaactcaggagatcacaccgcccgggagggcaaagctgaacgcaaatcagtaa

SEQ ID NO: 2765 - DNA, 1641 bp, Saccharomyces pastorianus
atggtatatactgcaagctatagacacactgttttcgttgatctcttagagcacttaggtgtagtttccaatacggaaactctacaaagtgcccgtgagggtgaagtcgatcaatcagaatctactgacacaaaggtcactaaacctgggtacgatatagaatcagaccccggctcatccagttccgagtgccgcaccagtttaagtgctagctcacaaatggagaaaaatgacgccttcctagtcgattggaatggtgcatctgaccctgaaaacccgcaaaattggccccttctcaagaaatcaatggtggtgtcgcagatcatgatacttacttgcgtaacgtacatggggtcatccattcacacccctggtcaagagtatattcaaagtgaattcaaagtcggtcacgtggtggcgactctaaatctttccatgtacgtccttggttatgggttaggccccatcatattctcaccgctatcagagattgcccggtttggccgtctttatatctatatgataactttgttcttcttcatgatctttcaaatcggttgtgccactgtgcataacattggcggcttgatcgttatgcgtttcatcagtggtgtattgtgcagtccatctttggccactggtggcggtacagtggcagatatcatctcgccagaatttgttccattggtcttgggtatgtggtcagccggtgccgtcgctgcgccggtcttggctcccctattaggtgctgctatggttgaagctgagaattggagatacatattttggttgttgatgtggttaagcgctgctaccttagtcgtgttagtgtttttcttccctgaaacgcagcattataatattttgtatcgtcgtgctctgaaattgagaaaggaaacgggcgatgatagatactacactgaacaggataagttagatagacaaattgatggaaaaacctttttggcgaatacattatacagaccttttaagatgattatcaaggaaccggcattgctggcatttgatctctatatcgcagttgcttacggttgtttctatctattttttgaagctttccctattgtatttgtcggaatctatcatttcactttagtcgaggtaggcgtggcttatatgggcttttgcgttggctgtgtgttggcttacattttattcgctattttgaatatgagaatcattataccccgtttcaaaaatggtaccttcaccccggaagtttttttgattgtagcaatgtctgtgtgttggtgtctaccgttagctttatttttatttggttggactgccaaagtacattggatcctaccaatcatttcagaggtttttttcgttatagctgtcttcaatatattccaagctacttttgcatatttggcaacttgctatccaaaatacgtcgcatctgtatttgctggcaatagtttctgtcggagtttgtttgcttgtgctttcccattgtttggtaaagcaatgtatgacaatttagctaccaaaaactatccagttgcgtggggctccagcttggtggggttcttcactttggctctagctgctatcccattcgtactttataagtacggccccgcgttacgcgcgaagtctgcttatacagactaa

SEQ ID NO: 2766 - DNA, 615 bp, Saccharomyces pastorianus
atggctattgttataaataaaagaaacgtgagagtcctggtgataactaatctattattggttctagtgtttttggtcgtaagaaattcaaatgctagcactggtgaaagtggtgtaaagtaccatcctggttcactggtaacatttaacgagtcggggaatgctccaggtactcccgaatctgtccataattcagtagcaagtaaacaagacaaggaagttgatgaagcgaatgaaaagagtaaggaagaagagtttgatgccgctgcagaatatgacaccatactaaaaaaatcacacatggtcgttttcagtaaaagttactgtccttttagtaaaaaattgaaagctttactagctgaatcatacaacttttctccaacttattacgtcgtggagttagatcagcatgaacacacagatgaactgcaagaccatattgagaaggtcactggtaggagaacagttccaaacgttatcatcaatggtatctctaaaggtggttgtgacgatatggtcgcattacataaagacgataagctgttagaatcttttaaagagtggagtgatggcgcctttaccgtagaagctgttccaccatctgagagtatttag

SEQ ID NO: 2767 - DNA, 1803 bp, Saccharomyces pastorianus
atgctgctcaccaaaaggttctcaaagctgttcaagctggcgttcatagctctgttactgtgcggcctgttcgtcgtcaccaacaaatacatggacgagaatacgtccgtcaaggattacaagtcgcacttacagaattatatcgactcctacgctaataaggactcttcttcccctgaggatgccgccgccgctgatgatgcgacctcgttgaagggcaacgataaggtaagcactgaaaagctgaaaagcttctataacaatgtcttcaactttttgatgctggactcgccttctggaaaatctgcaagaacctataacgagaagtgtcccttgaagggtgacatcggagaccgtcctgaccaatacaaggatctttacaagttgtctgccaaagagttggccaaatgcttggaattgtcacccgatgaagtatcaaaactgcaaaaaagccataaggactacgtggaacacatagcctcgctaattctaccaaagggcacttacaagggctccggtatagccacagtgggtggtggtaagttctcgctcatggcctttctgatcatcaagacgctgagaaatatggggaccactctacccgtagaagtgctcatccctccaggcgatgaagatgaaaccgagttctgtagcaaaatcttgcccaagtacaatgccaaatgtatctacgtctcagatatcttgccattggagacgattgaaaaattcgcctttaaaggttaccagttcaagtccctggcgcttatcgcttctagttttgaaaatttgctacttttggatgctgataatttccccataaaacgtctagacaacatctttcaagaagaaccatatgtatcaacaggtttggtcatgtggcccgatttctggagacgcactacccacccgttatactacgacattgccggtatccctgtcaacaaggaaaaaagagtgcgtaactcccaagacgatatcaccccacccgctgtttacacaaagaacttgaacgatctggatgctgtcccgctgagtgatatggaaggtacaatgcccgatgtttccacggagtccggccagttgatgataaacaagtccaagcatctggccacagccctgttatctttgttctacaacgtcaatggtccaaactggtactacccaattttctcccaaaaggctgctggtgaaggtgataaagaaacgttcattgccgcagctaacttctatggcctaccattctaccaggtcaaaactaagacaggtgtcgaaggctatcacgatgctgaaggatttcatggtgtagcaatgttacagcatgattttgtacaggactacagccattacctggccgcttctaagagcatcaataacaagtacaaagatgcgatcatcaaatcatccgcgccaataaagtttgacaaggactactccttagaaaaatatatcaaagaatttttcgataacgaagacttgcatgccaagaatcatgtggacgtcatgtttattcactcgaacttgccaaagttcgatcctaagactctatccgaaaccaatttcttaaccatggataacaaacctgcccgttcgttcacttccttagagaaaatacataaatacgacattgaactgtttaatttcagagctctgcatgaatacgtttgtgtcaacaaaaatcctttcaagtacctggatgattctttgggtaaaaataaaaaagaatggaaaagaatgtgtgattacatcgccgagagactggagtttttagaatctacccacgaaaaggcgatcgccggtaactaa

SEQ ID NO: 2768 - DNA, 906 bp, Saccharomyces pastorianus
atgtttaatggttcaataaagtatatgaatcgttgcttatgtagacaggcgaatgtttcaatgcgaagaactttctatcataaaagcgtataccaaaggtttttctcaacaagaaacagtttgaaaaatgttaatggcgaaaaacctggtacgaaaaaaccattgaataggttacaactaggtgatgaaattgatgaaacggaacctgtcagaacaaaatttttccaattttccggatggaagtccacccttatctgttgtggtttaggtgctgcgatatatacttacatatcaaaaaagagacgtttgctggaaacagaaaaggaagcaaacgctaacagagcttacggctcagtagcgctcggagggcctttcagtttaatagattttaatggtcaacccttcactgagaagaatttaaagggtaagttttccattctatattttggttttagtaattgccccgacgtttgtccagaagagctggatagattaacctattggatttctgaattaaatgacaaagataacgtaaaaatacagccattgttcatctcgtgcgatccggcaagagatactcccgaagtcttaaaagagtacttgagtgatttccatcctgctattattggtttgactggaacatatgatgaagtgaaaagcgtatgtaaaaaatacaaggtatatttttctactcctcgtgatgccaagcctgaccaagactacttagtagaccattcaatttttttttatttaattgatcccgagggtcagttcattgatgcattgggcaggaactacgatgaccaatccggtctagaaaagattcgtgaacaaattgaagcttatgtgccaaaaaaagaacgagagcgtaggttgactaaatggtactctttcatctttaaatga

SEQ ID NO: 2769 - DNA, 2454 bp, Saccharomyces pastorianus
  modified_base (368)..(422): a, c, g, t, unknown, or other
atgcccgctgatcataacgataaaaataacaatcaagagtccgtggaagaggctgttttgaaatatgttggcgtaggcctagatcaccaaaaccacgattctcaattgcatcctaaacacctggacgacaagcactctcaaaagcaaaatagtgtcgatggcagtagtgatgtcgaggctagtaacaatgatgacggtaatagaaatgacgataataacgatgattcagaaaatatcaacgcattaaacgcgaatgaatcatcgtcgaatgcggacaacgtcagctctaatgagcagcacaatgctgtcatggactggtatttgagacaaactgctcaccaccagcaagatgaagacgaggacgaggnnnnnnnnnnnnnnnnnnnnnnnnnnnnnnnnnnnnnnnnnnnnnnnnnnnnnnncggcaacgacagtaatagtcacttttctcaggctgacatggtcgtggatgacgacgaagacgacgacggtgacaagaataagaagggcacgacggttaacgtggacgatcatcatcaatcgatggccatggcagctgtcgcagccgcttatacactatcaaaaaacaacaacaacaattccaacaaaaggcaacatgacaatgtaaatagccatgaaaactctaagaaaaagcaaaaaaacgatgacgatgatgacgataagcaaattggcaatgttgatccggaattgaccactttgggcgatgcggatgacaatgacgctaacaacgatgtcattgaccgtgatcaactggttcataaggccattatcgatgccgactcgattacgcaacatcctgatttccagcagtacttaaacactgctgctgatactgacgataacgaaaaattaaagcatataaaagatcatctgatgcgtactcacaatatgaatcaccgtaacaaaaacgacaacgatgatgcagacgatttgtcaaacaatacaaagcaatactcggagctacaaaaggattccatgttggataactctatcaataaatctagaaattacatggaagtcctaccaaaagttatctcccaggatactcaacagcaccaacaaaaattaccttctcatgacagtgaatctggcaacgtagacaattcagaaatatctcaactgcttcaatccgcagccacaaaggcttcgtctttggtttctttatcttcatcttctgctacaccatcaacttcaagatcaaacaatagtaaagctttcgataaagccgaagacgctgccttagaaaggtttataaacgaatacgaagccatcgaacgtttaactagacaacaagtttgcgaaagaatatggagctctgacaggccaaaggacaatttttggaacaatatctataaagttttaccttatagatcaagctcctccatctataaacacatgagaagaaaataccacatttttgaacaacgtggtaaatggacttcggaagaggaacaagaattggctaaattatgtgctgagaaggagggacaatgggctgaaataggtaaaactttgggtagaatgccagaagattgtagggatcgctggagaaattatgttaagtgcggtaccaacagagcatcgaacaggtggtccgttgaagaagaagaactactgaaaaaagttatcagtgacatgctggaagaagcccaacaacaacaatcacacttacatcccaatctgttagaggaagaagaacagctgctacaggacgaccagaatgatcatcgtgacgaagatgacgatgatgatgatacctcttctgcggctgctgccgccgccgccgccgccgctattcaagaacaacaacagctacttcaacaaaaacaacaagatgacgatgacgctattgctgccgctgccgctgctgcttcctcgtctttggaagaaaacggtaaagacgaagataagccacatgattcactgggcattcaactggatgagaacactcaaaactcgataatatgtgctccatccggaacaagctcacattctaagagtttaacgaatacaatcagacgtcataacaacaaactaagaaaatctctaatgggtaacggcaaactagattttaaagatatcatcaattggaccattgtcagtgagcgcatgggcggtacaaggtcgcgtatccaatgccgttataaatggaataaactggttaaaagagaagccatcgccaaaattcaaactgtcaaggatgacgatatgttatggatttttgagaagttaagagacttgggtataacagaggattctcaggtggactgggacgaattagcagctttgaaacctggcatgaaactaaatggtttggaattgaagctgtgctatgagagaatgaagaaaaaggttaaaggttataaacaaaaatcaattaatgaaatcagtaaagagctagtggattattttagctcaaatatctcgatgaag

SEQ ID NO: 2770 - DNA, 210 bp, Saccharomyces pastorianus
atgccaatgagacgtcagtactaccaagcgcaaccaatgtattatcaaccgcaaccacaacccatatacatacaacagggcccacctccacctagaaacgattgctgctgttgctgttgtaattgcggtgactgttgttcggccattgccaacgtgttatgctgtctctgtttagtcgatctctgttgtacctgcaccggcggcatgtga

SEQ ID NO: 2771 - DNA, 1200 bp, Saccharomyces pastorianus
atggaaaaatttggtttagaaaatagtttcccatatgaacatggtttagatttcaggatgacgaggcgggaaattataaattccaccaaaaatgaaacggcttatttattttttaatatgaaaagaatcatgctctgtgttctgaaatactcttataatctcataagttctcttttggactccgcaaagcttattatggatgacgttgttaccattggttcccgaaattttcctacgaggttacaaatcgatgctggcgaaaacgacgatcaagaggatatctgggcatcaacaataattctgggaataattatcggatattcaatatcttgttttggaaaaagggctaaaaacccaatcaaattgactaaagtttattctaaacatagcgaaccgatatctataataataaatttcatgaaaaacgattccagtggtggtagtgatcctattggaggaaacgataccgaagaagttatgggttcacaacttgatgagtctgtccttaacagccatataccaaacatagagattatggatgaaacagatcaaatacttaagcaagacttctatgagatttatgatccattgaatggtgaaactgcaacaatagatggcgtaaaatggttaaaccaattaagtcaggtctttgaagcagagcccaatagtataacaactgataacttgagagaagtacgtcttgaaagaactatcaggcgttacaatgaaaggcatggaccggttgggcatttaataggagatgatagtgtcaggcttcgtcacctcaaagaggacatttataggactaacgcaagtgcgggtaggtttcccgttcagaatacttttttcactatgaatgggcaagcatatttgctttgtttgcgtgggcatgaattggtaatgaaagcggagttatgtgccgagattgataaagaattaatttccttcttcattgaaagcgtctcattcagggaaagtggaatacttgagcagaaacaagaccagttggaagaggtgactcataaagagattatttgctatgatcaaaaccgaagtctggctataatttaccatttgcctaagattgagaagcaaagaaatcccctcacaaaaccaagtatgccaaccttttcaaaaaaatcgttaagtgacaataaaaatgcagcattgattttattatggtattccggccatctatag

SEQ ID NO: 2772 - DNA, 330 bp, Saccharomyces pastorianus
atgtcgttatttctaaacagcctgaagggcaaccaggaaatgtcacaggagaaggtagacgtggcgggagtacaattcgacgcgatgtgctccactttcaacaatatcatgaggacgtgtctcgagaagtgcattccgcacgaggggtacagcgaatcggagctcacgaaaggggagatgtgctgtatcgaccggtgtgtggcgaaaatgcactacagcaaccgcctcatcggagggtttgtacagacacgagggttcggaccagggaaccagctacgacactactcccggttcctgccaaagcaagaggacggcgagcccaataactag

SEQ ID NO: 2773 - DNA, 876 bp, Saccharomyces pastorianus
atggaaaaattactacagtggtctattgcgaactcccaaggtgacaaagaagctatggccagagttggtcaaccagaccccaaattattacagcagttgtttggcggtggtggccctgatgatccaaccttaatgaaggaatcgatggctgttattgtgaatccagaagttgacgtcgaaaccaaattggttgcatttgacaactttgaaatgttaatcgaaaatttggataatgctaacaatatcgaaaacttgaagttatgggggccattgttggaatttctcgatcaaactgacgaagaggagcttcgcgctgctgctttatcaatcataggcacagccgtgcagaacaatttgaactcacaaaacaactttatgaaatatgacacaggtctgcgaagccttattgcgttggcgagcgacaagacaaagccatttgacgtaaggacaaaggcgttttatgccttgtcaaatctaataagaaatcacgaggacatttcagaaaagtttttcaagttaaatgggttagattgtatagcgcctgtgttaagtgacgccaccgtcaaaccaaaactaaaaatgagagccattgcactgttaactgcttatctaacatccgttaaaattagtgagagtttgatcaacgtgttaagagaggatggcgtagttgaaagtacaattgattgtttgtccagcgagactgacttgaacattatagatagagttttatctttcctttctcagttgatttcttctggaataaagttcaatgaacaagaaatgcgcttactgaatgaaggttataaacatatcgaacctttaaaagagagacttaacgaagatgattatttagcagtaaagtatgtattagaatga

SEQ ID NO: 2774 - DNA, 1278 bp, Saccharomyces pastorianus
atgtcggaccaagatagcgcaccggcctccccaagtaaattggctccccaccacaatatatttatggccagcttggaaagctcccccacaaaagacaggaacggttccagccaaaatgccccatcttccaaagtcattgaatcattgcacgaccagatcgatatgttaacaaaggcaaatttacaattgaccacgcaatctcagaacttattgagcaaattggagttagcacaatctaaagaatcaaaactattggagaacttaaaccttctaaagaatgaaaacgaaaacttgagtttgatattcgaaagaaaaaataagaagttaaaggaagtagagaaaaactttagtgatttgagtaacgactacaatgtacaaaaggaaaaattgaccgaattgaacaaagtgatggaaaattccagtgtcatggaaaagacaagttccgagaaattacaaaatttggaggtccattatgattctttattggaatcacagaatttctataaagatcactattctaatgaaatttccaaactaaatgagaaaatcagtttcttggaactagaattgagtaaccaaaatctaaatttcggttcggatgctagttctaattcagatatagagttaaacctggctaaattcaacggctctgttaatgatttgaaagccatggaaacagaaaaggattcaaaattaagcaagataatcgggcaaactttaaatgagctgaatttagaaaactggttaagcttgtatgagacaaatgagagtctgatatcatcttttgctgaaaagatggatttgaacgatgttttggagaaaaatgatgacaagaggaacaataaagatacggtcctccaaaatctgaagaagaatgtgcaaacgcaaatcgaaagtagtaacgctaacaatatggacaatggcaatgaatcagacatacttcctatcaagatggttaaattgagaaagacgccaaacccaaacgatccgtcttcgaatagcagtaatagtagcaacaaaagaagaagcttttatactgcatcgccattactgtcgtcaggttctgcgccaaaatcgtcatcccccgttttgcctggtgtcaaaaggacagcatcagtgagaaagccgagcacaggtaacagcaaggcaaatataatgcataatattgatacaagtacaacccctacaatatcagcaccacctggggctacaagacaaacttcatccgctcataaaaagaagagaaacagtacggttatacacgggaatcaaccctga

SEQ ID NO: 2775 - DNA, 2151 bp, Saccharomyces pastorianus
atgacaaatatgcgactgcgatatatcaccgtttttgatccgtcgaggtccaccaacgaagatgacacttttaagcagctattactattccattcttttggcgataatgatccggtcccgtctttgaacgagaaactgtcaactatagggataattcagggcatttggtcactcaccaattcgggctcaagcagtgatgaccagaatgaggacttagaaaaaatcatagagctagataatgatgtactgctgtgtatcaaagttgaatcaaggtttttaattagtttagcaatatcaaatggtagtggtgatgagaatacgataccgtttcaatattttagttcttacttgtggctcagttacaaattctttaagctactgaatggcccttttgccagattcaataaagatttcaataaactaacggatttattgaacgaattcgtcctcccgttctggaacgatatctatctaaacttggaaacaataacaaataggtcttttactgttatttggcccgatttctacaaaagggcgaacttccagcatggatctttcaacccagtaattaacaacactgataaagaatcatgggatgctatagttttacaaaaaattctgctagataaaaaaagctacctaggcattaaggacattttggtttaccatttaccaaaatacaatgatacaagtacgaaagtgcccattggaacaaaaacttatggactagtaagaaacttcaccaatgatttgaagactttaccagatatatccaattggttgtaccatttacattacacctatggcgaaatatcaagtcatatattaacagggaacgcccatttcaaggaagagctaccggtagaagaagaacaagaacaaaatcaacccacacgcgaagggggtgaaggaggaagagaagaagaggaagaagaggaagaagaggtagaacaacaacagcacaataccctaccaaaccatacgaacaacctttctttatcagaaaggatgatgcataacgtaacgcttcccatttcatttgcatacgacgccatacatgaagtgagtacaacaaccggtgtttccagtagtttatctatgataatagattatgtaccaaaacctcactggccatttctgtcatcatcttccaacaaaaatgacagtaaaaacaaaagcacaggtatcaacgatcgcacaaaaacgaatactacattaataacagagtcagaaacaattggaggaaccataggaagttcaaggtttggatttttaatatctccattgagctgcaacctgttaccgccatcataccaagctttgaaattaaatttggatttcaaaaattcaaaaggtgacgaaaatttttataattgtttattttggtatttcgatgatttcttagtcatggttgtatgtgatccggattttgacaaaatctgggaaaaagactacttaaaggatttaaatttccagctgtgccaaagcatgatatgcttaaaagatgatattttcaattctcagaagtgcgacaccatggaatctttcggttacgtagtcaaagacaacgccactaaccaaattgactcatctgttccattcggatcacccagaatgactttaaacgaaaatatttcatctttacagttagccatcaatggtattgatcagttcattaacgacaactctaattcgctatcactaattaattggaatccaatagctatcatggggggtttcaacaacagcagtaaaggtaacaatactcaaggtagtcaaagtgagctggttggtaataagcaagcatccaaaaggaaatatttgaacttcctgagtcttatgaacacagaaaaattatgggatttacagattgacgtcctacaatttctaattagcttacaaaactcgaaaaaggatccggaatactttcaagaagaaagactgctgaaattaaacaatggaattttatgctacatcagagaaacaaattcgaaattggttatcatcatcaaaaattggttccaaaatgatgatactacaaaggctttgaagcagagaaaccatgttggttcaaatggtttcatggaaagttccttgtttcaaagcttaggtccagatgtgatcgattggtgggaatctagagaaatataa

SEQ ID NO: 2776 - DNA, 1557 bp, Saccharomyces pastorianus
atggagaaagatcagacgcatctcagggcgttagaatccatagacacaaactcattgtctttgctctcttcaaataccagttctaatacgaacagtaacaccaacaataaactgagtcttactactagtgacttatctacagggtctatactaaatagaccagtgactcctcctgtaatccaagacaccgaaaataactccatgtttcaatggcaattcgagaaaagggaatttatctttgacagtaatagtacgccttctaaacagacaaaaccgctacaaaaaacttccccatatcaaggccaaaatcaacagttactgaatgtaagaaagcgacgttcccagctaataggtgcaaagcctaaagttccatcaaaattgtaccaatccgtatctaaattagatttaattgacgataagaatttcacgtctttgccaatcgcgcctccatgcaatagtgaggaaatcaacgacgagaatgacgatgatgaatataatagcagtaacaaacgacctagattaaatccaataaaagaactacgagtacacaataacaaacgtaataggtatgtcagttatgggccaatattggatacaagaaactttgagttagcagaaagtatgtcccaagatactcaaccattagtcttagttgaagattatatagcctatacccaaaataagtcaacaaagaaaatggtatctatttcagacttgaaatccaaactggataaaagaagcgataaccatattccgttgagagtaagaaattcacgttctaaaattaatcgtgaggcaaacagaaatagcctcgaaccgaactcgttaacactaataccccatatcttaaaaaacacaggagaaagcactaatgagattgataaccctatggattttattaaagaggaaagtgaagttagtaatacgtccataccagattcaatagagaatatggtagtcaatttgattaatattccctctacaaataaaagttatgatgatctctatttatcagaattagatgtccattcccagctcagaaaatgtgtgatttgtgaaaaagctttgtatgaaataagttcaaagcttttaaactcagggcactacaaagaaattgtatgtgaacaatgcacagttaaatatgaagaagctgccaaaatttttgaaaactgcgagtttgaatcttctactgatgaatcaaatttaagtaacggtacgtttagtgatctcgataattcagcagaatctttccatttatcaatagatgctccaataggaataagtaatcaaagggaagataataaaatgaactataaaaaggaaatatcaaagaaaaaagatagcttctctagagagcttatagaacggttacaattgcagttgctcgagaatgataagccgaataaaaatcgtctgaataaagatataatgggctcaaaatcaatgaattggtttttagaagcgaggaggaaattgaagtggaagtggagaataaacggcttgctaccacatttcttgggtaaccaaaataacgaccgtttgaattttcaatcctaa

SEQ ID NO: 2777 - DNA, 1158 bp, Saccharomyces pastorianus
atgggctcaaccaaaccaaatgatgaatacaaaaaaccccaaaagtatgtgccaggacccggtgatcctgtactgccaccacaactgtctgaattcaaagataaaacatccgatgaaatccttacagaaatgaacaggatgcctttctttatgaccgaattggatgatactgacggtgctggtggtgaaaatgtagaattagaagccttaaaggcattggcgtatgagggcgaaccacatgaaattgctgaaaactttaaaaagcaagggaatgaactatataaagcgaaaagatttaaagacgcaagagagctttacaccaagggtatagccgtggaatgtgaggatagatctttaaatgaatcactttttgctaacagggctgcatgtgagttggaattgaaaaattacagaaagtgcgttgaagattgtggtaaagcactgactataaacccaaaaaacattaagtgctattatcgtataagtaagtccttttttcaattgagtaaactcgaggaagccaagtcagctgcattatttgctaaggaaaaaattgacccagaaaacaaatctattttgagtattctatcagtgattgaagaaaaagagcaagagctcaaactgaaagaggagaaaaagaaaaaagaagctcaagatcgtgaaaatgagaaaattatgcttgaaagtgccataacattaaggaatataaccaacataaaaacacagtctccagtagaactattgaatgaaggcaagataaaattagaagactcaatggattttgaatctcaattgatttatccagcattaatcatgtatcccacgctggatgagtttgatttcgtaggtgaagtaagtgagctgaccaccgtacaagaacttattgatctggttatggatagaccacaagaaaggtttgaaaaagaaggtaaacaaaactttactccaaagaaagttttggcatttatggaaacaaaggctggtggcttaattaaagctggtaagaaaatagcattccatgatatcttaaaaaaagttacaccggatgtgccattattcgataacgctttgaaaatatatattgtaccaaaagctgaaagtgaagaatggatatcgaaatgggataaacaaaaagccttagaaaggagattcttgtaa

SEQ ID NO: 2778 - DNA, 2103 bp, Saccharomyces pastorianus
atggattgggcaatcaaggcggctaagaagaaaactcaaaggaagccagggtccactcgttcaatcatagaaaccctcgatgatctaaacaacataacaacagatgcacatatagaaatcaaccatcgattacatgaaagtaacgaatggtttagaaacactttatacatgaataaagctaagcaagaggacaaaaacatagaagagtgtttaataagtccagaaaatacccataataaaatgaatatagaatttagtgaagcgaaagaggaatatggtctttctgttccacaaagtgacacttcaaaagatcttactaaaacccccagaagcattttacataacgataaaagcataacaccaaaatcgctccgtagtaaggacgttacagaaaaaataaataagttcagtattcatgaaactcataaaagtccaatcgaaccttcgaataccgttaaaagcaatgaagataacgaaaaatcctccccatggtccccctacaaagtggagaaaattctcagggaaccatcgaaaacttcggaatctccactcactacaagaacatctgataaccaagcctgggcggctaatgaagaagtagaaactgagtccataatttatacttctaaaaaaatcgatccgccaaaagcgaaaccaccaccgaattctgaggcgatcaggtcacaaaggagatcaaatatgttcatcccactgccgaacaaagatcctcttattgttcagcacaatccatcaataaaatcttcaggatcaataacaaaactgagattagtaaaggaatctccaattgcactgaggaggaagccgatagcgaatagcccagttataaaaggtatggaaaacaatgataccgctgggtctaccaaggcatctagtgtttttgacaggctgtcatctataccgacaaaatcatttgaaaataagatgattcgtgggaataataatcataagtactcttcttcgtcaatagacttaacaggatctcccatgagaaaggtttctcaaattttcaagccagtcaactcttcagatactgatatgcaagaaacgctaagggatattttttcagtgaaggacaagattactaaacatgactcacctaagggaaaaagttctagaaagtccttcattccgagatttgataagcattctttaaaagccacaacaaataaaaagctgggtataattgtggaacagcaaaagcgattctcaataagaaaacccaccactgctcaccaaactggctcaagaccgcctagtaggtcgccagtgaaaataaataatagcttgaaatcaccatcggaagatataaagaaccactataaaagcccagcaagaggtcacttgagggcaacaaaaacgtctatttcaccaaacaagaataaaaatacggcgagctctcaaacaccacgtcgtttaagagccaatgaaaaacctttgttaaaaaaactgtctcctaatatatcagatgtttccaaacctgagtcacgtaagtccaagaattacagacttacaaatctgcaattgcttcctcctatagaggcagagaggggtgatttgaagaagaaattcgataaaaggttatcgggaattatgagatctcaacaggaacatcaccgacgtaaacaagaaaagcaaaaaaggatgtcgcatttggaacaagacttgaaaaagcaaacaagctttaacaatgattgcaaagaagtgcctttaaaggaaccattagcatcgtccagtaatcatgtgcggaataataataataaaaatactggctttaacaccgataatatattggccacaatcaatacagtcgaccatcgcgaaataattggaaacaccacccccaaactggcctccggcaatgattctttgcccgatataaatacagattcggagggcgagaccagcgtaactttggcagcatgggctaaatcaccatatttacaagagcaactaataagacaacaagacataaacccacaagctattttcggaccgataccgcctttacacacggatgagatttttccaaatcctagactgaacagattaaagccacgtcaaatactatcaaaaaggccttga

SEQ ID NO: 2779 - DNA, 561 bp, Saccharomyces pastorianus
atggggaatgctttcagtgggatattcgataagttgtggggggtgccgatgcagctgaggatcttgatactcggattggacggtgctggaaagactacgatattgtatcgtttacaattgggggaagttgtttctacaaagcccacgattggattcaacgtagaaactttgaactataagaatttaaaattgaatgtttgggatcttggcggccagacaagtataaggccgtactggcgttgctattacaatgaggctgcttccgtgatatttgtcgtcgactctacagacaaggaacgcatatcattggcagccaaggaattgcatgtcatgctccaggaggaagaattgaaagacgcagcgttactggtctttgctaacaaacaagaccaaccgggtgccttgagcgtttcgtacatatcaaaggagctaaacctagtcagcttaaaggaaagaagctggtcaattgtggcgtcgagtgccatcaaaggagaaggcattactgaagggttggattggttaaccgatgttattaatgaagagcaagttcaaacaagatag

SEQ ID NO: 2780 - DNA, 621 bp, Saccharomyces pastorianus
atgtccgaattcaatgaaacgaaattctctagcaatgggacttttactgaaaacgaagaaccaattgtagagacgaaagtaatctccgtttataccccactcatatatgtcttcattctggtagtgtaccttgttatgttcgcttcaaactacagaaagaagcaggctaaaaaaatcagcgaacagccatccatatttgatgaaaacgatgctcacgacctgtttttccaaataaaggaaatgagcgaaaatgagaaagttcacgagaaggtcttgaaagccgccttgttaaacagaggcgcagaatctgtcagacgatcattaaagttaaaagagctggcccctcagattaatctcttatacaagaatggctccattggagaagattattggaagagatttgaaactgaagttaaactaatagaattggaatttaaagataccttacaagaagctgagagactacaaccgggttgggctcaattgtttgtcatggtctgtaaagaaatttgctttaaccaggccctatctaggcgttaccgatcaattttgaaacgtaaagaagtatgtattgaagaatgggaattgaaaattaacgatgatggaagattagtcgaatag

SEQ ID NO: 2781 - DNA, 948 bp, Saccharomyces pastorianus
atgttccaattcattgcagctgtggcgacggaggatggcttgatggctacttctgcgaaaatatcacccgatggccggtttctggccataacgcagggacctagtattctaatatacaatgtctccaaaaatgccatatcacagacgctggtcacgtcgcatgcaaggccattctcagaactgtgctggtcccctgacggacagtgcatcgcgactgcttcggatgatttctccgtggagatagtgcacttgtcgtacgggctgttgcatacgtttgtcggtcatacggcgcctgtgatatccctggcgttcaacagaaagggcaacttgctgttcacgtcctcgatggacgaaagcatcaagatctgggatacgctaaatggctcgctgatgaaaacgatatctgcgcattcagaggcagtggtgtcggtagatgtgcccgcaaatgactcgtccattctgagttcaggttcgtatgacgggctcatacggatcttcgatgcagagacaggccactgtttgaaaacgctgacttatgacaaggattggaaaagggaaaacggtgtggtgcccatctcccaggtcaagttctctgaaaatgcaagatatcttttggtgaaatcgctggacggcgtggtgaagatatgggactgtattgggggctgtgtggtacgcactttccaggtccaacctccggagaagggtgtgctgcatcattcgtgcggtatggattttttgaaccctgaagacggctccactcctttggtgatcagcggttacgaaaacggtgatatatattgttggaactcagatgataaagagcttgttcaattgctcgatggttcctcccatcatcggaatagtcctgtgatgagtatacattgcttcggcaatataatgtgctcgctcgcgttgaacggagtttgctgtctatggagatgggagtga

SEQ ID NO: 2782 - DNA, 1362 bp, Saccharomyces pastorianus
atgggtagaagaaagattgagattgagcctatcaaggacgataggaatcgtacggtaactttcataaaacgaaaagcaggacttttcaagaaagctcatgaactgtccgtactatgccaagtggatattgctgtcattatattgggatctaataataccttttatgaatactcttctgtcgatatgggaaagttaatcaatgtccaccaaaacaatgccgatcttcctcataacgtcatagagccttccgattatggtgactatgtcaagaaaccgcatgttgtcctaaatgaaaaaaaacgtaggcgaagaagaacggccgtgttagaacctgattccaactttggaaacagcgcactttccggtcagaattcatctggaaatcaaagtagtgggaacttgaacgttctgccggtatcaaatgaaatcgaacacgctgctataggaacatcgttggtaaacgcccaaggaaacgtatcccgtaatggatccaatatttccgaccattcaaaaaatggtataaattacgctatgccacgagatcagttgcaccttggaggggggttttatactaacatatacaaagatattaatggtcaacaatttcaagtagatagagtaccttatggagatcgcatggataagaggatgaaattggatagtcagcaattctttcctggacccaatcagcctggctatggtagttattatccgtcaccttatgataatttaccaaaacccgcgttaccttcaaatctaatgaacaatattccgcccgtccaatcgcaatttgttcaaattattccggcgaattcaaacacaattggaaggtcatttgatgtcacgaatgataacgtgacatttcggacaagacaaactatgtccccgccggttgatgatgttccgagtacatcagatggacctgctccagtgcagacaatggtacatcatttaaatcagctaaatagaaatagagggaagctctcagaaaagcccgctttgaagttaagcatcccgaaggctacagctgatacaagtcgagagtctccaacaatatgtccaactaccacatcgccgaaaatggccgtccaaactaatttcaagcaccctccttgtggtagcactttttcgccattctcccattccaaaattttggaaattaggagcaatgatatcaagagttcgaatcatagtggccaatccacttgcgcacaagtaaatagtaaaacattttttctcaagccaccgattggtagacctccaaagtttccgaaaagcccgtctacttctattgtaatatatcctacccctgtacccaatccaagctcaagctcggtaaattcgattggatctcctaaataa

SEQ ID NO: 2783 - DNA, 1698 bp, Saccharomyces pastorianus
atgatccgaaataatgtactaaatgatatcgcgggttctgctagaatgaacgtcaaatgcaagcagcaagtaaaaagaaaattgggaagagttgaagcgcaaggaataggtctaggtgccaatgaaaagcccacatcagaggaagatttcaagcacacaagttacgaggaaaaagtagatagggaaaaaattaaaatgcactacctctataagaaagggggcactatgaccgacatccctaaactggtgataaatcaacatgctgatataagagagcgtgaaagcagaaaatgcacacctgaacacaacataggaacaacaacctctgaacgcgagctaccattactagaggatgtccctcaatcaatcaaacaagcgaaccgacattttgaggatacacgtgattggtcccagcttagtacaagtaaaatctgtgaaattctggaagatatttcgtctaaaaaacgtagaagtagggtacacttctcttcattacagaagaaagaaaacccacacaaaagatatctgaagaaagatgacgaaggaaatcaggactggtcacaaattgcaaatgaagacatatgcgaactgatagagaagatcgctagtagacgcaacaacagtcttaaagaaatcgatcgtttatgttcgcagaaccaagagaattcagaaacaattcatttatctgaaaatggtacacttataggagaaccaacgaacactcggcaacgtaatgcgaaagggagcagcgagaacacgacagaaaagcattctgatctcgaaagtaaaatttcaagaacagtttgtcttccataccaggaaaaagaactacgattgataccctttttacaaaggcaaagaatggaaccagccataatctctataagtggtgttagagaatttaggatgagaaagtttactaaaaaactcaaaccgtgtccaagaagccctgtgaaggagttttttggcgtaggaattattatttccagtcaatcactgtcttccaaacacgtaatctttttgcatcaaaactccgatttaagattccttcgaggtattttgggccgcagtagacgctctttcttgctctccaagctcgagcagacacgtgctgagatcggtctatcccttatcaaaccaccacagactacttcgcctttttttgcgacaatagttttaaatattcgactcggttccaaagcgtttgccgcgatatgccattacgaaccgcaagccatactgttcgattcaagaggactgaaaacaaggaactgtagcacgcactcgaggttttcacgtcccctccacattccttatgaagcaacggcgatagaagagatcgatcatctagatttgaacagtgaagacaaaacatcacaggggaatacggttgttaaaaatgaaaggcttttcaatgattgcctggaaaaaaaaagtagtgctgatcctttgaatagtatgaaacgtcttggcaaaactcagcctttagaagctaagaataggcttcatcaaaatgtcacgattaatgttcaaggaagcgtaactgttaacaacagtctttttgcctctctgtgtgggcttttccacagcctatgctctaaaggctattggaataaagttgatttatcagaaacattattctatgacgatttgactaacagatgggtgaagatgggagatctagtacagtatcactaa

SEQ ID NO: 2784 - DNA, 429 bp, Saccharomyces pastorianus
atggcaggaactgggctctcgttatttgtgacgggacttgtattgaattgtttaaactccatatgtcaaatatacttcactatattatacggtgatttagaagctgattatattaattcattcgaactgtgtaaacgggtaaacagatggagcacaccagaggcaattttgcaggcgtttgtttctatattatttcttttgaatggatattggtttgtttttctcttaaatgtccctgttttggcatataatgcgatcactgtctttaaaagaacatacctactggacgccactgatattttcaggacgctgggtcaacgcaaaattgaatgctttttaaaattagggttctacctcttcatcttcctcttttatttctacaggatggtcacatcattacttgaaaacgaagctaacttgatagggtag

SEQ ID NO: 2785 - DNA, 1974 bp, Saccharomyces pastorianus
atggccgatgctaataacgcctctctgagacaggacaatccatacatcattccgctacccccttcatcaacagtagagacgtcttctgagcctccaagaacactgtggatgggtgatttggatccctcctttgacgaagctaccattgaacagatatggtcccgtttgaataaaaaagttattgttaaattaataagggcaaagaaaaacttattgattccttgtagttccacctcaagtggtaacaccaataccaacgaggagagtggagaaaaccaacaactcgcatccagtagcaccgatcatttagataactcccagatgattaatattaatggagtctcatttattgacccttccaccactcaattacaccatgcaggatattgttttgtagaattcgaatcacagaaggacgctcagtttgccctatcgttaaatgctacgcccttgcccaacttttactctccaacaaccaattctcaaacaaattcaacattcaaaagaacctttagattgaattgggcttcaggcgcaactttacaaagttctataccatctactccagaattctccctgttcgtaggagatctttcccccacggctactgaagccgatttattgtctctgttccaaacaagattcaaatcagtgaaaacggttcgtgtaatgactgatcctttaacaggatcatctcgttgcttcgggtttgtcaggtttggcaacgaggacgaacgtcgtagagctttgattgaaatgagtggtaaatggtttcaaggaagagctttaagggttgcatatgccacaccaagaaacaatatgatgttgcaattacaagaacagcagcaacaatcgcaacaacaacagcgccagcaacaagaaccagaggacaatcaggcccctcttttggtcaagactgcaaataatcttattcaaaataatagcaatatgctacccctcaatgcccttcaaaatactcctccaataccattaaacgagggtgggaatcacatgcgtgtaaaggaatttttaccctctcacaattataatactgacccgaccaatactactgtatttgtgggtgggctagtaccaaaaaccactgagtttcagctacgttcgctatttaaaccatttggccctatcttaaacgttaggatccctaatggtaaaaactgtgggttcgttaaatttgaaaaaagaattgacgcagaagcttcgatacaaggcctgcaaggtttcattgtaggtggaagtccgataagattatcatgggggcgtccttcaagttcaaatgctaaagcgacgccaaccgttatgggggcgggtcagtatttatcatcgaatagtggaagagctccttcatcagcctcttctattgacaattctaaacaaatcttggaacagtatgcggaagataaaaggcgactctttttgcaacaacaacaacaacaacaacaacaacaacaacagcacgctaactatcccatggagcagttgactcaccataattactacaattacaataatttcgattatcgcaataacaataatggtggtcaaggcgacctggacaattctcaaagaccaaacatcccgtacgtacaagaagaaagtacaatgtacccacaccaatatgcaaactcttcatacccgctccaaccaatggctaatcaactctctaatgctgatgacaacatgccacaattcgggaatgcgttgacaatgtctctacccctgcccagtggtaacaaccataagatgggcatgaacatgggcatgaacatgaacacccccaacatgaaccagatggcatacggaatgggcagtagacccaatatgtacgacgtgtctgggatgatgaaccctccttcaagcacagtttcgagtagcaacaactcgaaactgaatagtatgaacaagcatcctaataggaacaacattccgccaattcatccatctcttttacattga

SEQ ID NO: 2786 - DNA, 1551 bp, Saccharomyces pastorianus
atgttgagatttacaggccaaaacttggctaaatcctattatagtagaattgggagatatgctgctactgcttctggaaagctggcacagtcacgcttgtcgaatatacaaactccaaaaacgctaaagaaatttctcgacgaatatattattggtcaagatattggtaagaaagttttgagtgttgcagtttataatcattatctgaggatcaatgacaaacaaaagaaaagggaactacaaaggcagagggaattgatagaacaggaaagacttacggatgacaaagatgaacctatcttcaatgggaatagtgaggccaaagcaggctggaagaatcttcagagacagtttaattcagtaggtcaagaagcggaagaaaatttagaattaagcaagagtaatgttctagttgttggtccttcaggctctggtaagactttattggcaacaacgctagcgaaaatactaaacgtccctattgcaataactgattgtacgcagttgacgcaagccggttacataggtgaagatgtcgaagtgtgcattgaaagactgctggtcaatgccgagtttgatgttgcaaaggcagagaagggtattatcgtccttgatgagattgacaagttggcgaagcctgccgcaagtattggtaccaaggatgtgtctggagaaggtgttcaacagtcgctgctaaaaattattgagggccataaagtagaaattgccgttaaaaggcctgtcaaacatgatattgacgggcaaaagaatcaaaccacaaccaaaaaggatgaaatatttgtcgtcgacacatcgaatatcctctttatgattatgggcgcatttgttggtttagataagcatatcgtcagaaggatagaaaatataaggaaaagtcaaaataccaaagaggcagatcaaccatcaaaaatcaatgaccaagaaagaatgaagaagctcaggttcagtaatacacttgagcaagtagaattggacaacgggaaaaaagtatgtgctttagatttgactacaccatcagatttagtaagttttggtttaattcctgaactgattgggagagttcctatcataactgcattgcaaccccttcaaagggatgatttatttcatatcttgaaagaaccaaaaaatgccctgctagaccaatatgagtatatttttaaacaatttggtgtcaagctgtgcatcacacaaaaggctctgaaaaaagttgcccaattcgccctcaaagaaggaactggtgctagaggtttgagaggaataatggagagactactgttgaacgtcaattatgattgtccggggtccgatattgcttatgttttagtgaacgaagctacagttgactcattacaagaaactgaacattccttggcttcccacgtggatgtgaagtattattctgatgatcaaaaagacgatttggttcacgatgtttatgaagaagataagaaattaggagcaatgttagaaaaggagttcggaaattcagccagaatccatacgcacacaatccaaggcaagttttga

SEQ ID NO: 2787 - DNA, 1311 bp, Saccharomyces pastorianus
atgtcaaataaaccagagaaaccggtatggatgtcacaggaggattatgaccgtcagtatggcgcagccagcaacgatgaagcatctactatattaggcaacaactccaaaaccttcatgagcgcaccaatcaatggcaatggatcatcaacagcttcgcaaactccacctgctctaaacccagcatcttcagtttcacctactgagccagaaacggcgttcaaagtgcaaaaaagaagacacgaaaggtacgatcaagaagaaagagaacgtaaaaaacgtgctcagaagctgagagaagaacaattgaaaagacacgagatcgaaatgaccgcaaatagatctatgaatgtagatcaaatcgtccgagaacattataacgaacgtacaatcattgccaaccgagcaaaaagaaatttatcacctatcattaagcttcgtaatttcaataatgcaataaaatacatgctaattgacaagttaacaaaaccaagtgacgtggttttggaactcggatgtggtaaaggtggagatttaaggaaatatggtgcggccgggatctcacagtttattggtattgatatttcaaatgcgtctatccaagaagctcataaaaggtaccgttctatgaggaatctagactaccaagttgtcttaattacgggggattgttttggtgaatcactaggtgttgccctagaacctttcccggattgcagattcccatgtgatatcgtttcaactcaattttgcttacattacgctttcgagaccgaagaaaaggcaagaagggctttactgaatgttgctaagtccttaaaaattggtggtcacttttttggtactataccagattcagaatttattcggtataaactaaacaaatttcctaaagatgtggaaaaaccgtcttggggaaattctatatataaggtaacttttgaaaataattcgtaccaaaaaaatggttatgagttcacgtctccttatggccaaatgtacacttattggttagaagacgctatagataatgttcccgagtacgttgtgccttttgaaacccttagaagtctagcagatgaatatggtttggaattagtatcgcaaatgccgtttaataagttttttgtccaggaaattccaaaatggattgaaaggttttctcctaaaatgagagaaggtttgcaaagatctgacggtaggtatggtgttgaaggagatgagaaggaggctgcttcatatttttacaccatgtttgcattccgcaaaataaaagaatatatcgaacccgaaagccagaaagatctttaa

SEQ ID NO: 2788 - DNA, 843 bp, Saccharomyces pastorianus
atgaacaaagctcagactttcataaaggagtgcttgttcaccaaaaatctggaagatcctgaaaaaccaattaatgaaaataggttgcaagatacattgttattattgccaaccgatggaggtttaacttccagactccagaagcaacgtaaaaaatcaaagctgaatctcaacagcttacagaacatttcccaattagaaaatgaaaacgaacagttaaagaaggagaactaccaacgtgtcaacaaaaattctaaaatcgcattgagagagtttattaattcttgtaaaaaaagcacacagaaatgcttgaaattagcacatgaaaataaaattaccgatagaaaaaatctctcaagctacctggaaaaggatcacccagcgatatatgaagcacttccgcagtacgatggatttgtaccgatgtacaaagaattatggcttaactacattaaagaacttttgagcatatcaaatagtataaaaacgcttaacggatcatcagcgctactaaaattatctatggcagattacaacggtgcactattacgtgtcacaaagagcaaaaacaaatctctaagaggtattcagggcattgtgatttgggactctcaaaaatttttcatcctgatcgttaagggccatctaatagatgagataaagtgcataccgaagaagagcacagtgttccaatttgaaattccactctcggataccgatgactccgcattgagatatagtattctaggtgataggttcaagtacagaagtgtcgatcgtgctggaaggaagtttaaaagtcgtcgctgcgatgatatgttatattacatacaaaatcagtaa

SEQ ID NO: 2789 - DNA, 699 bp, Saccharomyces pastorianus
atggacgtgcctgcagatgcccacattatctatgaagacgccatcgattattggaccgatgtagatgccaccgtggacggtgtcctcggaggatatggggaagacactgtagtacctacaatggatgtgctaggatcgaaccatttccttcgtaaattgaagtctcgaatgctccctcaacaagacagcgtaaaatacgccgtggacatcggtgcagggatcggccgtgtgactaagaacatgcttcacaagcatgccgccaagattgatcttgtagaaccagtaaagccatttgtcgagcaaatgcacactgaactaagcgatttaaagagcaagggccaaatcggagagatatacgacgtgggaatgcaagactggacccctgaagccggtaaatactggctagtttggtgccaatggtgtgtgggacacttaccagatgcagaactggtggcattcctgaaaagatgcattgttggtctacaacccaacgggacgatcgtggtcaaggaaaacaacacccctacagataccgatgactttgatgaaacagactcttcagtgactagatcagacgccaagttcaaacaaatcttcgaagaagccggcctgaagcttattgcctgcgaaagacaacggggcttgccaagagagctgtacccagtgagaatgtacgcactcaagcctgcttctgactag

SEQ ID NO: 2790 - DNA, 321 bp, Saccharomyces pastorianus
atgtcaaaattgggttcattagccaggtctgtcaagtggactctttccgcgggggtcataggctctgttttctatctctaccggttcagcaacaagggttatttctacgaccacgatgctacgtggttgaagcaagaccatcaggcacaagacctgatggatagaagggaagtggtacctggaggggtcaaaaatcgtaaacaaatcgtaatggatgacggtgtcgcatggactaggaccatgggggagagcatgaaagacatatggaacgaacaagtaagaaattccgtcaactggatctattcatggggaaagacctag

SEQ ID NO: 2791 - DNA, 963 bp, Saccharomyces pastorianus
atgaagtacacattagaagaccaagtcgtattaattactggtggatcgcaaggtctggggaaagaattcgccaaaaaatactacaatgaaactgaaaacacgaaaatcattgtggtcagtaggtcagaggccaaactgctggatacatgcaacgagattcgtctagctgctcatttgaggaaggaaacttcagacgagggccaggtgcagcacaagttggccacgcctctggaccctgtgcaacgattgttctacttcccatgcgacttgtcctgctatgaatccgtagaaaatttgtttaatgttttgagagacttcgaattgctccccacccaaactttatgttgtgcgggagggtctgttcccaagttatttcgtgggttaagtggacaggaattgaaccagggtatggacatcaactataaaacaactttgaacgtggctcatcagctcgctcttgcagagcaaactagggaacaccatcttatcatcttttccagtgtcacagccctttaccccttcgttggttattcgcaatatgcccctgccaaggctgcgattaaatcactagtagcaatactaagacaagagctgacaaacttccgcgtcagctgtgtttaccccggaaacttcgagagtgaaggtttcactctagaacaggtaactaagcccaagatcacaaagttgatcgaggggccctcggacgccattccatgcaaagaagcgtgtgatattgttgctacttcattggccagaggccaagacgatgtctttacagatttcgtgggctggatgatcatgggcatggatctggggctcacgagcaagagaagtcgctttgtcgcgttgcaatggatcttcggtatcctactgaatattgttgttgtgcccttctacctggtaggctgctcctggtatattagaaaatggttccgtgaaagcgatagcaagaaggccacttaa

SEQ ID NO: 2792 - DNA, 1641 bp, Saccharomyces pastorianus
atgatggcaaccgggctgaatcgtaaaagaagtgccacttcaggcgcactggaggtcacagacccaaacataaaaccgattaattgcaaaccagctagggtctacagtgtttcctccgatatagtgccgcaagtcctgacacatcctgatgaagaagaacatgcgaaattgtccaagtctccgccagatatggctcccaggtggtcgcaggtgggttttcaatccatctttcaagacggttccaattcaagacgttccgcggattcgattgaagaagaatccactcaagataccgaaaaccacgacgaccattcagaaataggttcatcgagtggatatagactacaagtaaacaccgcgtccaatgacagtctgctctcttccacttcaagggggaacaagaggcgactgtccttgtttaccaattctagggaaaatataagaaatcgaagcacgagcgggtctatgaaccccagcattgttgtgaatggtgcgactggtaatgttataagtaaaagtggctctaaactgttcaagactaaatccaacaagagtgccaacagtttacaatcttcattgtcgacaagccattcacattctagcaaaggcaacaatgtttttagtaagatggcaaaaaagcttttaccttataaaccgcatagttccataggtaaggacgatatcgaacctgtggttcccagctcttttagtaaatttctgcactcttcttatggaaaacatagatcgcccgttcagttcctccataattctacagggggcctaatagactctgagaagtctgtgtattcttttaatcctagcattaacaattacccaaatgacacggctttgaatcctattcaagaagatacgtttgatgcgactaatgtttctatattacatgacctactaaggaacttgccctctttggtagcgaattacaaaagcttcaccacacaggaactacacgtcttagaggggaatatatggggcatatactgtagtatagtggtcgagctgtttaagaacaagcgaatatggcaactaccagccaagattgaagatattgatcgtctactggacttttacatcacattgaaaacgcaaaccaaggccgccgttacacatttcaagtttatatcggaaatcgaagaattcatcactacgtcactgtatattttagaaaaccaaattgtattcaattatgctaacgaagagactgtgaataccgctctgaaaagagtgggcataatctggaaaatcttttatcagcaggtttactttgatatcacggcagtgctgttgccctttgagaaaagcttccaaaaggatagtaactactggcttgatgggtatttaccagagccttcaaggtatactccctcggtcgactttttgttgttgaaatgtttcagggactctatcatcctcccgtattacgagagctttctccatacaaatgatggtgccaggaagagtttccaaaaatacatcttcaatgaagaagagcagaacggcgttaccgaggaagataaattgacgatgctgcaatgctttggaatcctgagtactattaagggaaacagcaaaaaccaaagaatcatcgacgaactgctggaagggatacgcatgagtatataa

SEQ ID NO: 2793 - DNA, 1314 bp, Saccharomyces pastorianus
atgttagaagcactgttcagagattctgtggaagaagcggttaatgactccattaagcagggtgtcgccatggcagtttacagcacgaaaggggatgatcattggttggagagttggtttaaggaggatgatgtagcattagatgttttagcagaacacagtatctggctaaagctggtgaaaggtagcgagcagtttaaactttttgagcaggtgtttcccaatgtggtgttgcccagcgtttatttgatacgcgcaggaaagatagaactgatcattcaaggtgaagatgatcgacatttggaaaggttgttggcatgtttgggcatcaaagacagaaatgctagcgaggctttgcccaacgaaattaattcaggtctagtaaagaaggcaagttcatccagaaaagcctctaagaaaaacgcaagggaaagaattgcagagactaccttagaaatccaacgtcgggagcaactgaaacagaagaagctagctgaagaagaaagagaaagaatcataaagcttgttagagcagatcgtgcagaaagaagggctctcgatgaaacacatcaccggactctcgatgatgctaagccgctggatgttcatgataatataaaagatatacaaaaattacatagcagtacatgcgtgctgcaaatcaggatgaccgatggtaagactttgaaaaatgagtttggttcatcagaaacgctgaacgaggttagaaaatgggtggatcttaacaggactgatggaaacggtccgtattcattccataggagcattcctagagtgacattcaaggattccgatgagctcaagacactagaaacattggaattgactcccagatcagccttgttgctcaaaccattggacaccccacattctaagctaaaggtaaccgagatggagggaccaggtattctgggccgcctttataaaggattttccacgtggtggggtggacatgaatactccgtaagtacatcgcagcatgagggatcatctggtctcaaacattctgaaacgacaacatcaacgtcttcattcaggactactccccaagatcgtcttcaacatgaaaacttccgggagcctgtccaatcctcgatctatgcatctcctctgttaacgcccagtggaacgaggttcccttccgaaacgaacctaactacatctcgatctgtttccccaaacgtttttcaatttgttaacaatgatcgtcaagatgatcctgaagacccaacgaccttcaatggtaataatgttaatttagaaaaaaaaaaggacgaagataaagacaaatga

SEQ ID NO: 2794 - DNA, 633 bp, Saccharomyces pastorianus
atgtccgatctagttagagaaaaggcgcctgccttcccgatatccaaagtcaagaagattgccaaatgcgatccggagtatgttattacatctaatgcagcagtatcggcgaccgcgtttgctgcagagttatttgtgcagaacctggtggaggaatcactggtattagcgcagctgaactcgaggggcaaatcaagtctacgactaagtttggcttctattgaagaatgtgtggaaaagagagaaaatttcagattcttagaagacgttatcaaacaattaaagaaaaatagcatacatgacaagaaggggcaactgggaaggcaacctgacttggatgaccaacaagttgccaaagaagagctacaaccgcaccaagatgatgatgagggcgcagaaatcgaaaaagacgaagaagacgaagaagacgaagaagaacaagagcccgaagaagacgattctgtacaggaggaagaactcatggatgatcatgaaggcaacaaagacgacaagcctacgcgtagtgtggccggtctgctgtccaggttccagtaccaatccgcaccggatactggcgagcattcgggttcctctgatgtggaaacatacgatgggaagagcatagacgattag

SEQ ID NO: 2795 - DNA, 1305 bp, Saccharomyces pastorianus
atgtccaaaaaacaagaatacattgcgccaataaaatatcaaaatagtttgcccgtaccacagttacctcccaaacttctcgcctatccagaagctccggaaacaaacccagattcgtcccagttgatcaattcgctatatgtcaagacgaacatctctaatctcattcaacaagatgaagatttaggtatgcctgttgatttgatgaaatttccgggcctattgaacaaattagattctaaattgctttatggattcgataatgttatattggacagagacgatcgaattttactaagggaccctagaatagacagactaactaagaccgacatgtccaaggtcactttcttaagacgtactgaatatgtctccaacacaattgctgcccaagattccacgtctttgaaaaggaagaggcgtttggacaatgaaggctcggatgatgaaaatcttgacgtcaatcatatagttagcagagtagagggaacctttaacaacacagatacatggaaacatccagtaaagaaaggcgttaagatggttaagaaatgggacttattgcctgatacggcgtcaatggaccaaaactatttcatcatgaaattcatgggtagcgcttcattagatactaaagaaaagaaagctttgaatacaggcatatttaggcctttggaattggaggaagatgaatggatttccatgtatgccactgatcataaagattccgctattctagaaactgaactggaaaagggtatggatgaaatggacgatgacactcatgaaggcaagatctacaaattcaaaagaataagggactatgatatgaaacaagtggccgaaaagccaatgactgagctagccatacgtctgaacgacaaagatggcgtagcttattacaaacctttacgttcaaagattgaattaaggcgtagaagagttaatgacattattaagccattagtaaaggagcacgatatagaccaattgaatatcactctaagaaaccctagcactaaagaagctaatgtaagggacaagctaagaatgaaatttgatcctataaatttcgctaccgtggacgaagaaggcgatgaagaggaggaacaacaggaagaagatactaagggtgaatcagctgaagacctcaaagaggagcccaaagaagaaacggagggtaagcaaaacgaagaaagcaaacaaagcgaagagccagtggttgatgaacctgaaattctaaataatgccggtacaaaacaaacgccagaagtacaaaacgaaggcattccacaagaagagtaa

SEQ ID NO: 2796 - DNA, 897 bp, Saccharomyces pastorianus
atgtctaaagtaaccaaaagtgacgtagatccgtttaactcgtttttggcagggtccatagcgggtgctgttgaagcatctataacatacccttttgagtttgccaagacaaggctacaattgatcgataaggcctctaaggcatcaagaaatcctttagtgctaatttataaaactgtcaaaactcaaggtatcggttccatttacgttggatgtcctgcattcattgttggtaatacagccaaagcaggtattaggtttctcggatttgatactattaaagacctgctgagagatcgtgaaactggggagctaagtggtacaaaaggtgtgatagctgggttaggagcagggctattagaaagtgtgcttgcagtgacacccttcgaagcaattaaaactgccttgatcgatgacaaacaatctcctaaatcaagatatcacaataacggacgtagcgtgctacgaaattattcagcactggttcgtgacgaaggcttttcaggtctttaccgcggtgttttacctgtttccatgagacaggctgccaatcaagccgttaggttgggttgttacaataagattaagactttgatccaagattatacaaattcgccgaaagataaaccattatcgtctggtttaaccttcctagtgggtgcatttagtggtgtagtgactgtctactctactatgcctattgatactgtgaagacaagaatgcaaagtttggattccacgaaatattcttctacaatgaactgttttgccaccattttcaaagaagaagggctgaaaacgttttggaaaggtgccacaccgagattgggaaggctaatattgagtggtggtattgttttcacaatctatgaaaacgtcttagttatgctagcttaa

SEQ ID NO: 2797 - DNA, 1272 bp, Saccharomyces pastorianus
atggcgacacaagccctggaagatattacggagagacttctcacgaggtcggaagaggctatcctgcaattagatctctggatacagcgccagcagagatcatcggtatgcgagccatcagatcgggactcactggataagttatcccaccagtacaaccaatacatgtctcaactgaactccttgtatgtgagatctgagtcagttcgggataagttaagtaaggaacaacggcgcagattgaacactgaggacaatgagcacaaacgcatagaggatttggttcatgaattccaggacattactgtgaggttgaacgagctggcgactgtcccaaataaagcatccaacagttccccccagtcacagtccactaggagcagtctggattcgtttcagcctcgaccattgaagatcattgagaggcagcgtctgtgtgtggtgactccatcgaaacctccaaaaaagtcagtaatctttaaccccattaacgaagttgactgcccttccaagacaagctctttaccatgttcacctaaaaagcaacctgggaaagctcgcactctgcgtgctgccaaatcgcatgacactggtttgaataagagtaaaaaaccctcttctaccgatgcatatgaatctttcttcaaaaataagcagagactctccttgacttttttcgatgaaatggatgacgaggatttagattcagatcaagacacaatcattctacccaacataagtactccttctcatatggatatggctaccaaaggtgctgaatttgagcctttgagaaggtacaattcgcacgaaagtatactgtctaataaaccagctcccactatgtctctctcactaggaagtttcccattctttaaaccatcgaatccaacatttggaacttcggtatccaatgtgcaagtcaactactgtccaagggtgactgcgtcaatgattcccaaacgcaacgggactcgtgctccaacctcaaaggcgttgttgtcatcattcattgcacagccagatagaattgtggtaaagcagaaatccaccaatctcaaacatacttccttcatggataagttcaattcatcattatcgacaatatccgagtcgtttcaaaataaaaagggcaaaaagaatactgatttggataatgaccgaataccaaatatgaaccacacagcgccggaacaaaataatagcctcatggatatgggtgtctccatagaggaattacaagatgctttgaatacggaattgctgttgtaa

SEQ ID NO: 2798 - DNA, 2529 bp, Saccharomyces pastorianus
atgggtaagacacagaagaagaatagtaagggtcgtttagatagatactattatctagccaaggagaaaggttaccgtgctcgttcgtcctttaagattatccaaattaatgaaaaatatggtcatttcttagaaaaatcaaaggtcgttatcgatctgtgtgctgctcctggttcgtggtgtcaagttgcatccaagctatgtcctattaactcattgattattggtgtggatattgttccaatgaagtcgatgcccaacgttattactttccaaagtgacattaccaccgaagattgtagatcgaaattgagaggttatatgaagacctggaaggccgacacagtattacatgatggtgctcccaatgtcggtttgggttgggttcaagatgctttcactcagtctcaactaacattgcaagctttgaagttggctgtggaaaatttggtcgtgaatggtacgttcatcacaaagatctttagatccaaggattataataaattaatttgggtttttcaacagctgtttgaaaaagtggaagctacaaaaccaccagcatcaagaaatgtttctgcagaaattttcgttgtttgtaaaggtttcaaagccccaaagagactagatccaaggttgttagatccaaaggaagtcttcgaagaattgccagatgggcaacagaacatggaatctaagatttataatcctgaaaagaaggttagaaaaagacaaggttatgaggaaggtgatcatttattgtatcatgaaagctcaattttggactttgtcaaaactgaggaccctataactatgcttggggaaatgaacaagcttacaattgacaaggatgatcacgaatggaagatcttgaaaaaactgaaacaaaccacggacgaatttcattcatgtattgaggatttgaaagttctaggtaagaaagatttcaaaatgattttgagatggagaaaaattgctagagaaatcttgggtgttgaattgaaggatgaagataagacggatattgaagtagtaccgttaaccgaagaagagcaaattgaaaaggatttgcaaggtttacaagaaaaacaccgtctaaacgttaagcgtgaaagaagaagaaagaatgaaatgaagcaaaaggaactacaaagaatgcaaatgaacatgataacccccacagatattggtattgaagctgcgagtctgggtaaagagtctttgtttaatttgaaaactgcagaaaaaactggtatactaaacgacttggtgaagggtaagaaaagaatgattttcacagacgatgaattagctaaagataacgatatttacattgatgaaaatattgtgatcaaggataagaattccgcgggtgatgcagacgatttagaaactgaattgaatgccatgtacagtgattacaaatccagaagatcagagagagacgctaaatttaaagccaaacaagctcgaggtggcgacaacgaagaggaatggaccggtttcaacgagaaaaatgcaggaaaggaagaagaagaacctaaagactatatcgaagataatgacgacgaagatatcgaaggagattctgatggcgatgaagccatcagcaacttgattagtaaaataaaaggagaagatggtgatcataaattgagtagtaaagcccgtatgatttttaatgatccaattttcaataacgtcgaagctgatctaccagtaaatatcatcaacgatggtatgatgagttcggagtccgtcggtgatatttctaaattaagtaagaagaggaagcatcaagaaatacagcagcaagaaccagaagaagaagcagactcctcggacgagagttcaagtgatgattccgatttcgagattgtggctaatgataatgtatcagaagactttgattccgactatgattctgaagaagaaaggaatcaaacgaagaaagaaaagcattctaaagatattgatattgccactgttgaagccatgactttggcacaccagttggcattgggccaaaagaacaggcatgatcttgttgatgaaggtttcaatagatatactttccgtgataccgaacacttaccagaatggttcttagaagatgaaaaggaacattccaagataaataaaccaattactaaagaagctgctatggcaatcaaagaaaagataaaagcaatgaatgcacgtcctatcaagaaagtcgctgaagctaaggcaagaaaacggatgcgttctgtggctcgtttagaaaagattaaaaagaaggcaggtttaatcaatgatgactctgacaaaacagaaaaggataaggcagatgaaatttctagattaatgcgtaaggttaccaagaaaccacaggctaagccaaaggttactttggttgttgcctcaggtaagaacaaaggtttggcaggtagaccaaagggtattaaaggtaagtataagatggttgatggtgtcatgaagaatgaacaaagagctttaagacgtattgcaaagaagcatcataagaaataa

SEQ ID NO: 2799 - DNA, 1392 bp, Saccharomyces pastorianus
atgaactgtattttcagaaaaggccagttgttagcgttcgcattagtgtcattactggcaacacagactatgggtgctgctatcgatttacccaggagcccacataatgtcaaacccttccgtagtgatcagccggatttgcaaagacgagcaaatgagccctttttcgaaatagatgtaaaaactctgaatgcgaactcacccatatcagagttgtgtaagaaaaatttacacgtaatcgaatctgcccaggaacttttccagctccaaaaccaatgtgaatacatattgggatctttacacatcactaattatgactctaacgtcttggatttgagcagtttgagagccattggtggtgatctgattgttcaagattcgcccgaactaattagaatgcaagcttccaacttgaataaaatcgaaggtcttttccaactacaaggcctgacttcgttggtttccgttgagatccccaccctgaaattctgccggtcgttggaatggaaagtggtccccatcttaaactatgtgtctatggacgctcagaatatcgagattgttgaagatattatcatatcggacacttcattggccaacatcgagaacttcaataagattcaagagattgacacgttcaacatcaataataaccgatttttggaaaccattcactcaaacattaagactatcaggggccagtttagtgttcatgctaatgctaaagaattggaactcgaaatgccatacttaagagaggtggagaacattaccattagagacacatctttggtctatttgccccaactgactaatgtgaaaagttctttagaatttatcgaaaactatttctatgagttgaacttgaacaatttgcaaaaaattggtgggactttaggaatcattaacaatgtaaatctaatgaagatagatttggaaaatgtcacggatattcaaggtggtttgatgattactgataatgaatcccttgaggaaatcaatttcttgcccaatttgaaacaaatcggcggtgcaattttctttgaaggttccttcaaagatgtcatgtttgatagtctgaaattggtgaaaggtagcgcatttatcaagagttcgtcaaacgtgttggattgcaataaatggacaaatccgttgaatggcaggtcaattataagaggcgggaagtttacttgtatttctggaaagaaggaaaacacgttgaatgtaaagcaagatggaacagtcctcgaaaagggtttcaaagacttaacgcaagagagtgaagactccaaaagaaggctcatctcaaaactcacgaactcaacggctccaaccatgcaattaaacttcgttcttattggtatgtgtcttctttccatgttattgctttag

SEQ ID NO: 2800 - DNA, 1752 bp, Saccharomyces pastorianus
atgttgctaaacggaaaaagctttattttcttacccaatcctgacacatcttctagtacatttataaagaatgtcttgaaggataaaggtgccactatcatattaaatgttgaagattgctgtcaatcaaacgcaaataatgtgactgttttggttgatgattcctttgttgattccaatatgaacctgatacaaagggacatttttcaaagagaggcaaactcaaatgatattaataacctatttaataagatcgaagaattaaaaatccaatgtgttaaggttagttgtgttacgaaatgggttcagaatgaaaattttacaattgaaaacagtgagttggttaatttgactcctcctatcataaccatttcagatgatactaataacgggcaaagttctagtgaggcagatactgagattccaactgacgtggaggacaatggggatgatggagacgaaaaaaatgtcgtgggagagttttcacagcagcctattggaaacgccttgcaattggatagtggcacaaaattactcgtaaatgacaaacccaaatataaaaataatgagttggtcattgaagctttgaaaagactgactaaaaaatatgagatcaaaggtgaaagatttcgtgcaagaggttacagactcgctaaacaatcagtcgaaaattgcgattttgacattagttccggtgcagaagcacataccaaattaaggaatattgggcctagcattgcaaggaaaatacaagtcatattggatacaggtgccttaccaggtttgaatgattcaatggggttggaagataaactaaattacttcaagaattgttacggtgttggtccagagattgccaaacgttggaatctgttaagttatgaaagtttttgtattgcaagtaagaaggacccagatgattttatatcagattggtcagtcttatttggttggtcatattatgacgactggttacataagatgtcacggaatgaatgtttagcgcatttggacgtggttcaaaacgcattgaacgaaattgaccctgactgcctggtcgaattacaaggaagctataatagaggttactctaaatgcggtgatatcgatcttttatttttcaaaccattttgtgatgacaccgccgaattggcaggtatcatggaatcactttgtatcaagctttacaaagacggttatattcactgtttcttacaattaacaccaagcctagaaagtttatttgctgagaagatcatagagagatttcaaacagctaagataaacggatataaaaaaagaaaaaagtggtattcttcagagataattaagaaattttttatgggagtcaaattatcctcaaaaaaattgggagagctgaaagaagtagacactgacgaaggtacgtttcttatagaagaggaagaagaaactaaattgaaaccgattgaccaatatatgtccttaaattctaaggatgagaattactgtagaagactagatttcttttgttgtaagtgggacgaacttggagcagggaggatacactatacaggatccaaagaatataatagatggataagaatactagcagcacagaagggcttcaagttaacacaacacgggttatttcgggatagcgtcttgcttgaaagttttaacgaatacaaaatttttgaactattagatttgaaatatgtcgaacctaaggataggaacgacatagaatgggagaaaaaagtggtaaaataa

SEQ ID NO: 2801 - DNA, 2868 bp, Saccharomyces pastorianus
atggtgaccgtcaatgggaagattattcccttaactcataccattttcgcattttcggcattttttgctgctttggtcactggttattcacttcattttcataagattgttaccaatgcacattatacgtatccagatgagtggtttccaagtgtatcagccactatcggtgaccgttatccggagcgttctattttccagattttaatagccctgacttcttttccaagatttttattgttgctgggtcactactacctaaacaaatccaagatatgcttacttgtcggagtactccggactgtttcttgcggtggttgggtatacattacaagcacagacgaccatgacatccatgatatatttatgattgcatacattcttttaactttgccatgggatatcatgattactcgttattcaggtcccttaacttcaaaaaacaaagggctaacagccacgatcttctttggaacattattcccaatggtttactggtatatccagcattcagttcagcagagggctggtgcttattccatttatgcgtattttgaatggtccttgattattttggatatagcctttgacgcgtttgcttatgcagatttcaagaagatagatatagttctcggctttaatgaaaagcccggtaatacgagcttttttcagatcaaggattccgacgctattgtttgtgacgaaaagaaaactacaaatttgaggaaaaaccaaactgaaaagaaagctgcaaagaaagaagctgttagctttaatgccactgattcgtatttcaaatttgattccttcttttatctgttgacaaatttttttaatgggtttcttttctggtcgaatactacctcgttattttgtagtatttggcatttcccgctttggtatatgggaatttctggttatgaaacttcaatgttctgtcttctggggcctattgtactttatctaccattagtctctgaagtctttacccaatatggtgtgcttttaggaggtattattgccattggcgcctatattgttgaaatgccagaattaaggctgattactctagctatcggaacttctatcaccgtttctacgtttgtgcaaaacttaagatatattatgagtgctgaaattagcgcttcttttgctgtcacttggtcactaggtcttgttgcatcgatgatctttaaaatggggttctataccaataatccaacatgggttatcttaaatgagcataatggtggctataacaaaacagctcttgtttttactgtgttgtttggcatgttatcaccttatgttaattcaatcaatttccgaggaaaaataattgctcaagcaaaatcagtttcgtgcataggcaaactatttttagcgattggttttggatcattgttgtttggtattcatcaattgttaacagattcttctaccactatatattgggcttgggaaggttatcatgaaaagtcacatggtccattgccatggccatggagtgcgttgacgtgtacagtcatgttgtttgctgcggtaacttcggggaaatttatgggcaagccattagttccatgtttactgctagttatttccactgctgtgctgtctattaagagtattacagaatggcccaagtatgttgctggggggttattgtacgccattgctatgctttggttagtcccttcatacttttctgtactaggccaagtacaaagtatatgggtttacgttttctcgttcgctgtttatgttctttttgtcttagctcatgtttgggtcgtcgcgtacgcatttgttccattaggttggttactgagggagaaaattgaagctatccttgtggtttcctctacattcattatcgttggtgtcctgatcaacaaaagtttcaacctccaactaataaacgtgaccaagaaatttcatacttatatttctttctttgcagtagttttactagcattgactgctaggttcacctacgatattagaccaaccggaattcctcaaccttatcatcctgattctcatttgatctctgctggtatttggaccatccattttggtctcgataatgatatgtgggcatctgaagatagaatgatcaacttgatagaagaaatggagttggatgttgtaggattattagaaacagatacacaaagaatcatcatgggtaacagggatctcaccagtaaactagcccatgatctgaatatgtatgctgattttggaccgggtccaaacaaacacacatggggctgtgttcttctttccaaatttcctgtcattaatgctacgcatcatctattgccttcccctgtgggagagctagccccagccattcatgccactcttcaaacatataatgacacattggttgatgtctttgtttttcatagtggacaagaagaagatgaagaagatagaagattacaaagtaattacatggctgaactgatgggcaactcgacccgaccagctatcttattaagttatttggtggttgacccgggagaaggtaactacaataaacatgttagtgaaacctctggcatgcatgacattgaccctactgacgatgatagatggtgtgaatatatcttgtataaagatttgagaaggacgggctatgcaagagttgcaagaggcacgatcacggatactgaactgcaggtcggtaaattccaagttctgaatgagcaggaattagccgaacgctcagattccatttatgaatatgatcatgttgatgaaccggaaaatgacgatatgaaatttcccgataggtttttgggcgaaggtgagagaggtcacttttaccatgtgttcgacaagccacgttattatccctaa

SEQ ID NO: 2802 - DNA, 1092 bp, Saccharomyces pastorianus
atgaatgaagaaaattctatggatgcgcaaagcctgattattaccaatggaatgttcatcatcgatgatatcgaaaatagtaagtgcaatatccattataaaaatgttcctgggggtggcggcacttttgccatcttaggagcatgtataatatcaccaaataataagacctccaaaggtttgaagtggatagtggacagaggctctgactttcccgacgaaattacaaaagaaatagagtcctggggaacagatgcaagatttcgggatagttttgacaggccaactaccaagggattgaattattatgagggggataatgatttaagaaagtttaagtttttaacagcgaagaaacagattgatgttcaggactgggtcgctacatttggacgggaaactatcaacgaaatccaatctttccacctactatgttccgggtcaaggtgtacgaaaatgattgacgctctaatgaaggttcgaagcagagagagtgggaaaccagtaattatttgggaacctttcccagacctttgtgactttgagcatcagcatgaaattagatgcgttatgcaaagagaagacgttacagtgatattgtcgccaaatgcggaggagtcaagccgtttatttggtttgcatggaaaagaaccgagtagtttggaagaatgcttcgagctggcacatcgtttcaatgaattcatgaatgataataatatgtgcattttaagatgcggctcccttggaagcatatcgataactgataggcttgggagcgcagaacgagcctatgatcactacccagcgtatcacttcaaaaccaaatctagagtattagatccaactggtggcggaaattcattccttggtgggtttgcaattgcgtatgctttaacaagaaatttagctactgcaagcatatgtggaaacattgcagcaagcgcaatcatcgaacaaatcgggataccaagatatgatcctgcttatatgacttggaatggtctcactctcctagataggctgaagttttacctttcacagtcaggtttgcaatacaatgcaagcgacgtttacaaaagtttatcacaataa

SEQ ID NO: 2803 - DNA, 237 bp, Saccharomyces pastorianus
atgtcacaaaacaattcaactggctttgtaaatgctgaaaggtcttacaacaacataacgttgaaaaatttaacagcatttcaattgttatctcaaagagaaaatatatgcgaactattcgacctagtagagggcacaaaaagacatagcatcatcgttgatcctgaaagacaaaggaggaatttggaagaaatgaggacaatgctcgataatttgaaaaatgaagaaagaacatag

SEQ ID NO: 2804 - DNA, 1842 bp, Saccharomyces pastorianus
atggttcataaaaagctcactttcaaacaacaaatggatggatttccctggacacaactaatggttgtctctttagttaggttcagcgaaccaattgccttttcatcattatttccttatgtttacttcatggttaaagatttcaaaattgctccaaacgacgctcaggtatctaaatattcaggttacttatcttcatcatttgcgttatgccaagtcatatccgcatatcattggggccgattctctgagacacatggtagaaagataactttaacctgcggccttataggaacatctatatcgttgctgatattggggttttcgcacaacttttatcaggctttggtggcaagaagtttaatggggttactaaatggtaatgttggcgttattagaactatcattggtgaaattgccactgagagaaaacaccaggctctagccttcagtactatgccgttactatttcaatttggtgcagttattgggcctatgattggcgggtttcttgttttcagagatggcacgatgaatgaagtgccatcatggttcccgcgctacgccaaaaaaataatcaagtcatacccatacgctttgcctaatgtggttgtatgcgtatttttgatgtttggtttaataaatgcaatcttatttttggaggaaacacatcctatctttaaaaataagagggattacgggttggaccttggggactctattaaaaaaaacatatttggtataagacccaaaaggagaccatggcagaaatatattcataacaattctgaagacagtcgtcgtcgagatgaagagacaaacgctaatgaagcacaaattcgtggcgaggatgagcgcagtccgttactggattccggtaatgagagtgatgctgaaagcgtacaagccattgaccctattttgacaagaagacagtctgtaagtctgattcggacctattctctgcacgaaccaacagatgctgtacacaccgatatagacacagcttccgatggctgtaaagaaagtagtattttccaccatgttttccatacgaaagtattttacccgatatccgtgaacttcatcatggctttgcatttgattgtctataatgaatttctcccagtctttttagcttatgatttggccgtagatcctgagaacccaaagaaactagcttcaaaatttccgtggaaaatttctggtgggattggttatgagccagaacagacgggtactcttttgtccacaaccggtatatttggttgctttgtcgtcatatttatttttcccgtcgtagatcgtaatttcgactgtttgacaattttcagaacgctggttaagttatatcctatcatgtatataatggtaccttatgttatctttctacaaggcgaacgagttcctagctggtgtactgtcgcttatttgtacataatcacagggataaagacattttgtggcgccttgacatctccacaaattatgctattaatccataactcaagccctttgagttgtaggtcagtcattaatggtgccactatcagtatttctgcatccgctagattcataggtcctttagtgtggggttacattatgtcttggtcccaagagaatgatgttgcctgggtcagttggtggtcgctaagtcttttctgtatggtggccctttatcaaagttataagatagccccgatcgatgataatgataatgaagaggaagatagtcaacaggatggtgaaaatactgatggttcgcgggcagaggcttctggtgtaagaatgagtcatcgttcaagcttaagtagcttgagtaatcaatgtcgtgccaaatga

SEQ ID NO: 2805 - DNA, 1539 bp, Saccharomyces pastorianus
atgataaaggaagcaaactccatcactcaaaatgaagtggaaggtgaacccactacctccaaacgtccagttaatcggagatttcttttattcaagatagatctgttcgtattatcgtttgtctgcttgcaatactggattaactatgtggatcgtgttggttttactaatgcgtatatatctggtatgaaagaagatctaaacatggtgggaaatgatttgactttgtctaacacagtctttatgatcggttacatcgtcggcatggttcctaataacttgatcttattgtgtattccgcctagaatatggctaagtttttgtacctttgcttgggggttgctaaccttgggtatgtatcgcgttacatccttcaaacagatttgcgctattagattctttcaggccctatttgaaagttgtacattctcaggaacacattttattctgggttcgtggtacaaagaagatgagctgcctattagaagtgctatttttactggcagtggtttagttgggtccatgttcagtggatttatgcaaacaagtatttttactcatctgaatggtcagaacggtttagccggttggagatggctatttatcattgatttttgcatcacactaccaatttcaatatacgggtttatctttttcccaggtttgcccgatcaaacaagtgctgttaacaggctttcaatgacaaaatttattttcactgaacaagaactacactatgcgagaagaagacttcctgctagggacgaaagtacaaaattaggctggtcaaccgtccccagaattctgaagagatggcattggtggatgttttctctagtgtgggttctaggaggtgagaatttaggttttgcgtctaattctacgtttgcattatggttgcaaaaccaaaaatatacattatcacaaagaaataactatccctcaggcatatttgctgtgggtatagtttctacactttgttctgcagtatatataagcaagtttccaaaagctcggcattggcatgtttccgcttttatatccttaattatgatcatcgtcgcaattttgatacgtacgcgtccattggatccaaaaattatcttttctgcccagtatcttggaggtattgcatatgctggacaagcggtttttttctcatgggccaatattgtttgccatgcagatcttcaagaacgtgccattgttcttgcctcaatgaatatgttttcaggtgcggttaatgcttggtggtcaatattgttcttctctgcagatatggtacctaaatttgaaaaaggttgttgtgctcttttggcaacagcaatttcaagcggggtggtatcggttgttatccgctcgctacaaataaaagagaacctagctaagaaatctgttccttacatagatgctaatgatatttttggagaagaagatgatgatgatgatgatgagaatcaggatgaagatgaaggtgaaaatacgtctgtcgaatttggcgatgaggaaatgactgaagttcccaatccttttcattaa

SEQ ID NO: 2806 - DNA, 1182 bp, Saccharomyces pastorianus
atggctgaaaatactgctttggatactattgaagtccacccaattacttttccaccggacgttcttgcaagaatatccccggaattatctttacaaagacatttatctctaggtatcagaccatgtctaagaaaatatgaagagtttagagaagttacaatagaaaacaacactttgtcccgttacgtggatacagagaatgtgaatgcaaaaaacaatatcttagggtcgaatgttttgaaaagtggaaaaactatagtaatcacttctatcactggtgggataatagaagaaaacagcgcctcaatcaaagacttagatgatttcggtgaggaagagttgtacgaaataaccaaggaagaaaatgtagttgcgaattatgcctccatttacccagtggtggaagttgaaagaggtagagtgggtgcttgcactgatgaagaaatgaccatatcacaaaaactatacgattctgtattgcattctaggatactgcccaaacaggctttgaaagtgaaggcaggtgttcgtagtgtgaacgaggatggtacattatctgttttatatccggatgagttagaaaacgatccatcaaatgaaacaaacctgaaaatgaaaagaaaatggtcatacgttttgtatgcgaagattatagttttgagtcgtactggtccagtatttgatttgtgctggaattccttaatgtacgctttacaaaatgtgaaactgcctagagcatttatagatgaacgtgcgtccgacttgaggatgactataagaacaagaggaagaagtgccactataagagaaacatacgaaattttatgtgaccaaacgaaatcactaccgttaatgataaactcacaaaatattgcatttgcttcaaattatggagtaatagacttagaccctgaatcacaattacaagatcctgataacgctgaagaagaagttgatattgatatggacgaagccagatctgtactaatagccgatttggatactgaagctgaagaaacaagtattcattctacaatctctgtgattgctaatgctaaaggcaactatacccaattgacattagtgggagcaggtgctaaaataacaccaaacatgataaaaaggtcattattattgtcgaaggtgagggcgaatgatttatcgacaagattaaacacataa

SEQ ID NO: 2807 - DNA, 1002 bp, Saccharomyces pastorianus
atgggcattacggtgattggttctttgaactacgatttggacacatttacagatagattacctgatgcaggggagactttcagggccaaccgcttcgaaactcatgcaggtggtaaaggattgaaccaggctgcggctattggtaaactaagagaacctagcagtgactacagtgttagaatgattgggaatgttggcgatgacgcatttggtaaccaattgaaagacgttttgaaagattacaaggtagacactacatatgtcggtacttgtgctgaaactagtacaggtacggctaccatattgatagaagagaaagtaggtggtcagaatagaatattgattgttgaaggtgctaacggaaaaactgtgtatgatagcaagcaattgagtgaatttttccctaaagacaataatgatgaagaatatgtagtattccaacatgaaattccagaccctatatcgataattaaatggatacacgagaacaggccaagtttccaaatcgtatacaatccttcaccattcaaggccatggacaggggagattgggtgttgatagatattctagttgtgaatgaaatcgaaggacttcaaatcctagaaactatatttgatgatcatttcgtcgagcaagtaaaagtgcaaataaataacgatttcattggtgaatatcgtaaaatttgtgaaatattacataaagcacttattgaccaaaatggaaaaggcactgtggttatgactttgggctctaaaggtgtgttgttttgttcacatgaaaaacctcaagtggaattccttccagccgttaaagatgtttctgtaattgacaccactggagctggagacacctttttaggtgctttggtcacccaattgtaccaaggagagaaattgtctacggctataaatttttctactttggcaagttcgttgactattcagaaaaaaggtgccgctgaaagcatgccaatgtataaggacgttgaaaacgttatgtaa

SEQ ID NO: 2808 - DNA, 2769 bp, Saccharomyces pastorianus
atgagattctcacattttctcaaatacaatgcagttcctgaatggcagaatcattatctggactacaacgaactgaagaatcttatctacacattacaaacagatgaattgaaacaggatacaacaaacgatgaagtcaggtctcaaaccccaggtccaattgcggatatagaaagtaatgtcccagcaggagaaccatcttcttctaagaaaaagtttactcacaagcttaagcataaattgttcggttctaaacaatcgtcttcatccagtaaacaaaatgcagaagcagatgaaaaagcaatcgatggaaacaacataaatgaggaaaccattgagctagacgaactgtcacctcaagggaaagctacggctttcaatcggaaatttttaggtaagaaattctttgattcacgtagttcatcagtgagtagtgagggaaagaccctgttcagttcatatgatacttttgttaccaacctaagcgacgaaaaattgaaggtagatgacttttacaaaagaatggaagccaaattctatgaaaggtttgtccacttgattaatgacctggaaaaagaaagcatcgtcacaagagtgagcgaggcctttgatcctgaaatccaagatttgcctcctttaagacaaattgtttctgataaatcccaggtgcatgtatctacaaacccatttgagtttcactcttctaacaatgatagtgaactaagaaacaggtttgattatagtgaagaagaaatggatgatgatgacgaagtggatgtttacacagacaccacagataatacagcccttttgaattattctcaattcaatatcaaatctcagaaaaagtctctactcaagcaaactataatcaatctttacatagacctttgtcaattgaaatcattcatcgagctaaacagaatgggctttggaaaaatcaccaagaagtccgataaagtgctacatatgaatactagacaagaactgattgaaagtgaagagttcttcaaagatacctacatcttccagcacgaaacattggccactttgaacaacaaaatcgcacaacttatcgaattttacgccgttttgatgggccaccctggtaatgtagattcatgcaagcaagagctaaaatcttacctgcacgaccacattgtctgggagagaagcaacacctggaaagacatgttaggtctttcatcacaaaacagagatataatagcgattgaagacgaaactgaaaaattaatgcgcgaaaagcttcaaattgaatacttgaagtatcctctgccaaagccaataaatttaaagtttaccactatagagaatttggcagtcccaaaactgctctttggtaaaagggccatgaaaatagggttcatcataattgtcacaggtgttctgttaggtgtgaagacttttaatgatcctgtggaacacagatgtatggctttggtggaatgctgtgctttcttatgggccagtgaagccattccattacacattacaggtctactcgtcccccttctaactgtccttttccgtgtccttaagaacgacgatggtagtgtgatgaaagcctcggctgcctcttcagaaattttaggtacaatgtggtcatctactattatgatcttgttggcaggtttcacattgggtgaagctttgtctcaatacaatattgccaaagtcctagcttcttggttattggcccttgcaggtacaaagccgagaaatgttcttttgatggcaatgggtgtagtgttcttcctttccatgtggatttccaatgtggcttcccccgttttaacttattccttactgacgccgttattagacccattagactacacttcaccatttgccaaggccttggtgatgggagtggcactttctgcagatattggtggtatggcttcaccaatttcttcaccccaaaatattatttcaatgcagtacttgaagccttatggtattggctggggccaattctttgccgtggcattacctacaggtattttatcgatgttgtgtgcatgggctgtgatgattttctcttttaaaataaacaaaacgaagcttgaaaaattcaagccgataaaaaccaggtttactataaaacaatattacatcatcgctgtgacaattgctaccattcttttatggtgtgtagaatcacaaatcgaaagtgcctttggatcgtctggtttgatcgctgttttaccaatcgtcttgtttttcggtacagggttattgtcgacaaaggattttaacacctttccctggtcgattgttgttttggcaatgggtggtattgcccttggtaaagcagtttcttcatcgggtttattagttaccatcgcaagagctttacaaaagaaaattgagaatgacggtgtctttgctatcttatgtatcttcgggattttaatgttggtcgttggtacttttgtctcgcacacagtgtcagctattatcattattcctttggtacaagaagttggtgacaaattgtccgaccctaaggcagctccaattcttgttttcggttgcgctttgttggcctcgtgtggtatggggctggcctcctctgggttccctaacgttactgctatttccatgaccgataaaaagggaaacaggtggttaactgtgggcgcttttatttcaagaggtgttcctgcctcattattagcgtttatttgcgtcatcaccataggttatggtattagttcatccgtgttgaaaggtagtagtacctaa

SEQ ID NO: 2809 - DNA, 1557 bp, Saccharomyces pastorianus
atggaagataaagatgtcacttcgatacacgagaaagaagtggacgagaacaataatcctagattcatagaatatgatgccgaaggtcgtgctactcgtagtgaaactactaagaaagaaaaatggaaaaatatagttacgattattgcatctggtttcgctttaattagtgatggttatgtgaatggttcaatgagtatgttaaataaactctttgttatggaatacggaaagaaaaactatagttcaagagtttcgacaagagtttccaacgcatctctagtcggtattatttttggtcaattttttatgggtatttctgcagattattatagtaggaaatcatgtatccttgttgctacgactatattagttcttggtagtgctctgtgtgccgcttcacatggtactactgtacctggtatgttttgggtgttaacagttatgagaggtttggtaggtatcggtgttggtgcagaatatccgacaagtacattaagtgccaatgagtctgctaatgaatatactacaaccaatagaggtggtatcctggttatggtaacaaatctgccactagcctttggtggcccatttgcttcgattatttttttaattgtctacaaaatctgttcaggaacgaaacatttagaggcgatttggagaactgtttttgctctcggttgcttctggcctttaacagtgttttattttagatggaagactgctactacagaagtttatgaaaaaggtagaatcaaaaggaatataccgtatgttttagctttgaaattttattggaaaaggttacttggtacatgtggcacctggtttatgtacgattttgtcacctttccaaatggtattttcagttcaacaattatcagttctgttattaaagatcaaaatgatttggtaaaagttgctgagtggaacttgctactaggggttctagctgtattaggtgttccaattggtgcttatttttcagatcgtatcggtcgtaaatatacattaattattggtttctctggatacatcatctttggcctaatcataggttgtgcgtacgaccaattatcaaaaatcaccccactattcatcatcttctatgcgctcatgaatatgttaggtaatgccggaccaggcgatatgcttggtgttattagcagcgaatcatcagcaaccgctgttagaggtgttttctatggtatatctgcggtaactggtaaaatcggttctgtagtgggtgttgaatgtttccaaccaatcagagacaatttgggtgcaagatggacatttattattgccgcaatttgtggtcttgttggtgttcttattacaattttctttgttccacattcgctcgaaaatgatttaatgaaacaagacgttgaatttcataattacctagtatccaatggctggactggtaagatgggatttgatgagatagacgaggagtctgttgttaagagttttgaagatggaggtaatagtactgattgtaatgagaaagctaccgagataatctcagtcaaacaggttaatcaaggttaa

SEQ ID NO: 2810 - DNA, 1446 bp, Saccharomyces pastorianus
atgacaaaaagtaactttattctgaacaaagttagtgatgaacaaacaaattttttagttttctttggtacatttgtagatacccctaaattgggagagctaaggatcagagaaagaacatccatcggagttcttgatggaatcatcaaatttgtgaagagagactcttccgatccagtcatggactgtttagattatgatgctagtctatcacctgatgacattttagtggtggatataacgggagaagacgaatcctgcttgaccagtttttacttcccagggtttatagatacgcataatcatatctcacagtatccgaatgtaggaatatttgggaattctactctattagactggctggagaaatacacatttcctatggaagcagcgctagcaaatcaggatattgcaagcgaagtttataataaagtaatcggcaggacgctatctcatggcaccacgacagtggcttactataacaccattgatgcgaagtctgccaagcttttagctcagataagctctgtgttgggacagcgagtgcttgttggaaaagtttgcatggacgccaatgcaccagaatattatattgaggacaccaaaacctcttatgaaagtacagtgaaaatcatcaaatatataaaagaaactcttggtaatcctctggtaaatcctatagtgacaccaaggtttgcgccctcctgctcaagagaattgatgcaaaaattatccaaactggtgaaggatgaagacctacatgtgcaaacgcacttgtcagaaaacaaaaaggagattcaatgggtccaaaaactgtttcctgaatgtacgaactataccgatgtatacgacaaatacgggctgctcacagaaaaaaccgtattagcgcactgtgttcacttgacagacgctgaagcgaatgtggtgagacaacgacgctgcggcatctcccattgtcctatctctaactcttctttgacttcaggagagtgtagagtacgctggttgttggaccagggcataaaagtcgggcttggtaccgacgtttcagcaggtcattcttgcagcatactagctaccggcagacaggcctttgccgtttcaaggcatctggcaatgaagaaaagcgacaatgtcaaattatcagtttcagagtgcctgtatctagcaactatgggaggagctcaagtcttaaacatggaggataccttgggtacattcgaggtgggtaaacagtttgacgttcaagcgatcgatacttgtactccagggtccaacgtcgacacattccattggcagctacaaaaccaagagcaaaaccaagatttttacaaaaatcctccactaattactaaagaagacatcatcgcgaaatggtttttcaatggtgatgatcgtaacactaccaaagtttgggtagcaggccgggtggtccaccagacttga

SEQ ID NO: 2811 - DNA, 924 bp, Saccharomyces pastorianus
atgattttcaaaaggttcgttaatattctggtgtttttattcctactaggtgccggcttgttgacgttttttcttattttgtctggaggcagacaatcggggacgctgaagaacttctattggctacaggccgatactaacgggttcaacagcgctcccgctaccacaagatggtacaactacgaatggtgtggctacgacaacggccagctggccaattgctcaagcaaggctcccgccaagcccttttcccccagagacaacttcggcgactcgcccaacttgccctcgtcgttcagggaccaccgcaagacttactactacctgtccagggtcggttgggccatgctgctgatcgggctcttcttcatcgccatggcactggtgcccgcgttcctggccacttttcttccattcaaggctgtgcccgtgctttactgtgtgctgtcttggctggctcttttcttcattgtcctggccgcgtgtctgtacaccggatgctacgtgaaggcaagaaaggccttccacaaaggtggacggcctgcgaagttgggtgttaagaacttcgcgttcatctggacatccgtcttcttgatgcttgctaacgctatctggtctaccattttcagcgctacccacaagggccgctcgtcttgctccgaccacgacatgtacgcccagtacgagagcccatccattgacactggtaatcagctagaaaagtctacctacaccagcggtaccacagacggtgccggcccggtcgcggtagctcccgtaattggccagcctcaacccgctaccgccgctaagggtggcgacggcaagtttttccagaaactgagaacaagaaagcactcgccctctgctgatctagaaccagccgaagacggcggtcttgctgggcctgtcactgcacgctag

SEQ ID NO: 2812 - DNA, 2295 bp, Saccharomyces pastorianus
atgcgtaaatcattgagatggcttataacgatagccttctactcttccaactctattttaattagcaactgtctttggaacagtggttctatttccgagttttacctgcactccattgtgctcattgaatgcttttcgctattaggattggtcacctctgactatttgaccccatctttgtcatttatttctagtaatattttccatatctccgatagagtatcaggaatgacattattagcattaggaaatgccctacctgatatcaccagtacctaccagtcgatgaagtccggggttacttccttggctattggcgagctgtttggtggtatttttttcttgttgactgtggttattggactaatgggctgcgtagctactattcagtttcaacctgataagtccattgaaacttacacggaagaaagttttgatcaaaatttatcttacgacagaagccattatgtactggacgtggggatattcacttttatgctcttagtctcaggcacctttctagcagatgggagactatacttctgggaatgtatcgttatggttttgacctattgttgttgcgtcgtttatctgatacgaagtcataaatatccttgtgatactgatggcactttagaaagagaagaagaagagacaaaaaaccatacttttattaatagccgtatgactgttccaaaccatttcaccctatcaaccgccagcgacactcctcaaatggatgaagtagcgcaacatataatacctttcgaagatacacagaataacgagggcggcactactggatcagaagtaacatcttccccaaacaattcagcggataatattttgaggtttaatgaaggtataagtgaaagaagggattatataaggcacaggatacgaggatatttacgttctaattatcatggctgggtcagaatgactttgcaagattgcttagatatctgggagaaacaaaacctctttaacaatgctgtaaaaaccttgtctttgcccaccgacgatacccgtttagttcctaaggcctcgtctgatgatgacgaaggtagaccgttgataaggatgagaaaaaactctttacagcccagcgactattacaaatacttgtcgccaacaaatgctggaaactctaatcaattagggaccgcaaactcagcaccgcacaatgagcgcctaggcgaagattgtaatgaatctacgagtttgtttttaacagtaccacaggaaccaacttccagaaagatgttgagttgtgatcgcatcccgggtttgattcaaaccaactctaatacatttgatggtgataacaaatgttggtcacatatacaaaatcctgtcatgagcaacatatctagtgttgtagatgaatccttgttggagtacgagggagataatatattactcgacggaacattatctctttgctcggcaagaagcaaaaccgtttgccagtgttttcaactgtacaattatttgacagataaatctttggatatcagtccctccgaattcttatcattattggtcaccacaccggtatcaataattctttatctgaccataccatcagaagggagtcaaaaacatcacgactcgcctctctcatgtttacaaatttttcagttgatcgcctcgccaataataataaatcaattaattatagaagatttttcctattggttgcttatattaccggcgctaatagctatatcactctatttcaaactaaaaacgacaccgaggaaatacaattcagatttaattttcactattgcattcttattatcattagcgtgtatttcgaagactgttcatttagttgttgccactcttacccattggatagaaatctttgacatatctgaaactatattgggtttgaccattttcacgtggggtaattccgttggtgatttagtgtcgaatatcacgttcgttagaatgggtgttttagaaatcgcaatcggtgcatgctttgggagtccactattgtatttcctattcggggttggatttgatggaattatgatcatgttgggtgacaatgcagggaaaattgtcaacggtagagataatactattttaatgcaccatattgatttccaggtagacaaacatttacttaatactggggtcggaatctcgattgcatttttgatatttacagttttgataccattgaacggctggaaaatagatagaaagatcagtcttttgcttctgacgttgtatgtcgttactacatgtatcagcgtgtttctggaaatttactga

SEQ ID NO: 2813 - DNA, 1866 bp, Saccharomyces pastorianus
atggttaatcaaggccagccgcaatcaaatccgtatgataagcatataaatatgtttccaccactaagaggacgagattcctcgcataaactgggcaatatcaacaccgacaggcacgattcgaccacccataatatggtgcctgcgccgtatccactagatgattctttggctgaactaacgccagctattccattcacgtctccttcatcttcgtcctcgctctcattgcctttaagtgcgctgaatttcacagatagcaatgttgacggtggtcaattaggcactccagtaaccataaacagtaataacggcattgatatatttaatgccaaaccagcaggtgatactagcagcactaatagtgctagcaatagatatgagctcccattcaattttaactcggcaaaaaatagcttaaattcgtcctctgcacataatatatcaatgaccgatggaagccgaatatcagagcctatcagtaatagtttagctcctccaccttacgaggaatctgagtccagggtgctgcaagaaaagttatacagaacagaggaaaaaactcccatacgacctttggagaagagacccgtcccgcaacagaaaaccagccaaacgacgactaataccatcactaagacaaagactaatggatcttctagcagtaaggataaactctccgcctactcgccggatgcgttagccttctatcaaatctataagaagactattaatgactcttcgaaatttactccagagatacaaatgaagtggtgtgaaacattacttacgtatgcatttaaggaagattttatatcgcagtataacataaatgcagaaaaactgaaaagaagtttaaaacctgaggaaatgctgaaaaatcaaaaagtcatattggaacactcattcaaagtgctcacaaaactaatcaccgtaaaatggcctcgtgccatgtatttgatggggaccttatactcacatcagccgtatttgcccatcaaaaataaaaacattgtcatcaagaatgatgaaaaggccctcgaatattattgcaaagccgccaaattgaatgattcagatgcttgttatcgtgcgggtatatgctatgaatatcaacgaggtacttcgtcttgcgatccatcgctcactaaggaacaatgcataaggaaggcttttcagtattaccagcaaggagccgaagtttgctccaattccgcgtgcatgtataaattggggatgagccacttatacggacttaacatgcagaagaatgatgtcttattagctgttaaatggtttgataaggcaacccaaaatggcgattctccgcaaacgttgtatgagctgggcaaaatctatgaatttagtgttatgccaccagagattcaaaatttattatttgctaacggcatacgaagagaccctcaactggccgtaaagtactactatcagtgtgccaaagactgcgagtaccctctagcgcaatggaagttgggcaattgctatgaattcggtgacttggggttaccagttttagccaagaaatctatatgctggtatttcaaggctgctgcttctcaaccaagagggaacccaatggcaatgttatcgttgagtggctggtatctaacaggagcggcaaacgtcttgaaaccaaacaataaagaggccttggattgggctttgaagagtagcaagtgttcggacggcaagttggcacgtaccgagtttgccctgggcttttactatgaaaagggtatcggttgtaacattgatttggatttggctagacaatattatcacagagctgcaaggttggggtttaagaaggcagttggtgcgctccaaaatttgacgaacttatga

SEQ ID NO: 2814 - DNA, 2886 bp, Saccharomyces pastorianus
atgactgctatcgaagatatcttgcaaatcaccacagatcctgtcgattcccgtggctatttcttattgaaatctgaggaagttcccaagggctcaaccctcggggttgactttatcgatacgttattgttgtaccaactaaccgaaaatgagatgctgactaaaccttttgactatttgaatgactgttttcgccgtaatcagcaacaaaagagaattaccaaaaacaaacccaacgccgagtcattgcataccactttccaggagattgatcgtcttgtcatcggctatggcgttgttgcactacaaatagaaaatttttgcatgaatggcgctttcatcaattacattactgaaatcgtcttcaatgtaaatgcatatactgattttctttctcagatcatacaaagagccatcttagaaggcactgctttagatttgcttaatgccgttttcccaacactattagagtactgcaacaagcacgttacccattttgatttaaacgattcggtgacctacaataacgttcttacactatttgaattatttgtcacatttaaacctatcgcggaaatatttactaagatagaaggattttttgtaagttacgactgtaagccacagttctttgaaaagcaaaccatactaggacctattctgtctctttcccctatagatgctgcggttgcaattcgtaattatggtgacaatctcttgcgctccaaacaacaaacagctatgatccacgaatctttgcaagccgaacacaaggttgttatggatagactgtttttcattgttgataagcttgtgcgtggttctctagattcaagaactgatatgataagctattttgctcatattgctaataagaatcatttacgtaaagctgatcgccccccattcaaggagttatcttctaatggattcatggccaatatcactttattattagttaaattttctcaaccgttcctagatgtctcatacaagaaaattgataagatcgatgaaaactactttaataacccaagcctgttcattgatctgtcagaggagacacgcctaaattcagattataaagaggccgatgcattttatgacaagaatagaaaaactgcggatgccaagcccaacttcatatcagattgcttcttcctaacgctaacttatctgcattatggtctcggaggtacactttcattcgaagagaaaatggggtctgaaataaaatcgctaaaagaagagatcgagaaagtaaaaaagattgcagcaagtcatgatgtctttgcaaaatttgtaacagcacagttatccaagatggagaaagtattgaaaacaacagaatcgttgcgatttgctctgcagggattcttttctcatagatctctgcaactagaggtatttgatttcatttgcggtgcatctacatttttgattcgtgttgtggaccccaagcacgcatttcctttccaacaaatcaaattaccattgattcccgatcaaataggtgtcgaaaacgtggataatgccgattttttgagagcacatgccccagtgcctttcaaatactacccagaatttgttgttgaaggaccaatcaattattctctttacatctctaaatatcaaacctccccaatttttagaaatccacggctgggatcatttgttgagttcacaacaatgatccttcgttgcccagaattggtttccaatccacatttgaagggtaaactagtacaattattgagcgttggtgctatgccattaacagataattctccagggtttatgatggatatctttgagaacgatgaactagtaagcaaaaatctactctatgccctgttagatttttacgttattgtcgaaaagacgggttcttcttcacaattttatgataaattcaacagcagatatagcatttcaatcattttagaggaactctactacaagataccatcgtacaaaaaacagttaatatggcaatccctaaataatgcagattttttcgtgcggtttgtggctcgtatgttaaacgatttgactttcttattagatgaaggtttaagcaacttggccgaggtgcataacatccaaaatgagctggataatcgtgcaagaggagcaccaccaacaagagaggaggaggacaaagaattgcaaacgagactagcgtccgcttcaaggcaagccaagtcatcatgtgggctagctgataaatccatgaagttgtttgaaatttactcgaaagatatcccagcagcatttgtcacaccggaaattgtatacagattggccagtatgctgaactataatttagaatcattggttgggcctaaatgtggggaattgaaagtaagagacccacaaagttattcattcaatccaaaggatttgttaaaggctttaacaactgtttacatcaatctttcggagcaaacagagttcattggcgctgttgctaaagatgaaaggtctttcaatagaaatctcttcgtccgtgccgttgacattcttggtagaaagacaggtttagtgtctcaagagtttgttgagaaactattaaattttgctaacaaagccgaagaacagaggaagactgatgaagaagaagacctcgagtacggtgatgttcctgacgagtttttggatcctttaatgtacacaataatgaaggaccctgtcactttgccaacatctaagatgaacattgatagaagtacaatcaaagcgcatctcctaagcgactctactgacccatttaatagaatgcctttgaagttggatgatgtgaaacctaatgaagaactaagacaaagaatcattgatttcaaaaagcagaagaaggaggaagctaaaactaagtcaaaaaattaa

SEQ ID NO: 2815 - DNA, 963 bp, Saccharomyces pastorianus
atgatgccatcgatatttatagcccccgcaggtataagagcaacatctcgagtctgctatagaacgagagcgtattcaacgaaacctgaaaaggtgacccttcaaaaatatttgaatgacccggttaaggtgactgtgataccgatatccaacaaggattcatttgtttactacaagcatactgaaagtctatttaatagccaatctaggatactaaaaacagaaaaatggatcgtagaaaaatctgccaagctttgggggaaactgaagaagtctcccaaatcatataacaagaagatagtatccatggtccagtctttactgaatagcacaccttggtcggagaatagtctgcttactatcccaagtgaaagctatatcctgaaaagaatcaagggcgaaacggacaaggctcaagagatacgactcacattgaaggactatactgtaaaagcgcaccaggtggacactcagcccttacatatttattaccccgcagaaatctctaatccaggcgagtgcttgaagcaaatgaaaaaactctaccaagacgggttagcataccataagaaatggacattatattgtattctaggtttgcccctgaccattcctttaatcttaataccattgataccaaatgtgcccggattttatctatcttacagagcctatattaatattaaggcctatctaggcgccaaacacttgaaaagtctactggagaactcaaaccaacaattagaattcaaggaactgcaaggatattcagacgtatacaaacgaggtaacagtagccatccgcaggggacacaagaaggtccaaaagattcaccaaagctactgctcaacaagcaaaccctccccttaatcctagatttcttaaaagtccacaaattagaaagcgacttgaacaaagtcatccttcaaaaatcaaaacgacaggaagagatcaaaaattga

SEQ ID NO: 2816 - DNA, 918 bp, Saccharomyces pastorianus
atgtccgactacgatgctcttttgcaattcaacaagagacctgtctcgcaagaaatgatccaatttttagctacatctactgcctccataatccaaatcagacaaaacagtaatccggtgcatggatgcccaccaccggaactatctctctttatcaaaaaagtagtagttcagtccaacgtacaaacaccaacattaatggccactacagcctatctaaacaaattgaagagtataatacccaagaacgtgtacggcatcgagaccacaagacaccggatattcttggggtgcctgatattagcagccaagactttgaacgattcctctccctggaacaaacactgggccacatacacagagggcttgctcaaagtgcgcgaggtaaacactattgaacgtgaactcttggaatacttcaactgggatgtaagaataaccacgtctgatctgattaattctctagcgttcttcttggtcccgattcaggagcaattatttaggcaacaaagacaagaactactattgttcaatgccccaagtcttggtcaattgaaagaatacattaatcatagaaggccggtttcgcattctagatcttcttctaccatgtcagttccatcgctggcatctataatgacagtatcaacaacagactcgaggatctccgcatttgcacagttgcaaccgtctttaccattgatggaactcgataaccttaataaggaaaaccatggacctttcagcggtcaaggcaatatgcataagaatatcgctgtcttgtctcaacaaaagacatgtccaacgcattatatcaatacagcattgccgaatggacaaccgacaccacataaacctgaggtccaccaaaggcttcatttcacaaggaagggctggtcatcatttttcaagcagtag

SEQ ID NO: 2817 - DNA, 897 bp, Saccharomyces pastorianus
atggctacgttcgaccccaacaacgagatggaaaaccagacacgcatgcaggagtacaaggtcaccacgggcaggggcggcgccggcaacattcataaatccatttccaaaccgtctcctctactgctcccactgaaatccaactcgaagccatctgcaaacaccaacacgcagcagaaggtcccacgctttgccatcggtaggggtggtgctggcaacatctttcacgacccacatctgaccagatccgctcagcagttggatgacaatgacaatatcaactatagcgacgtgattaatgacatcgacgactatatatctccaatcacttcagacatggtcgacgacggcgggctgaataacaccaagtctcatctcagcgggacgaggagtcatcagtccatgcattctgccatgtcgactccgaacaacggtagcagcaaggcagcgcccattgttgttggtagaggcggagcaggaaacattttctttcacaagaagaagttggtggcggctaatgacggcggcaacgctcaggatgcgataagagacggtagcggtgatggcgtgggcgaagacgaggacacgatcaacgcgaacgataataacctgttcgtggtgacttcgaatggcaatgctgtgtctgctatcaagtcctcgtccaagaaactcaaaagcaagcataagatcaaaagcacgccggaaaaattcgccatcggcaggggcggcgcagggaatataatctcacccaagtcgagcaggaataccatacaccacaactccgacgacgacgacgaggatgatggtgatacgaagaataacaagagcaaagacgagaaaaagaagaagaagaagaaatccggattcttcaactctttgaaatccatgtttacttga

SEQ ID NO: 2818 - DNA, 660 bp, Saccharomyces pastorianus
atgaagaataaggaaaagctgattgtttattcaaatgccagttcggcgtttgcgtatagtgcagaaataaggccaaatttcaagatatcggtgtctcaaggccaaggttttgcttggaaccaagatctgtttgctacgcagtatcagcaagcgtacaaagtcgtttatgatgcacacgaggatgaccttaatgaactgatttcaaagatcaggggcaagttacaagctaaagccaggaaaagaagtagaattaatgctaaggctaaaggaggcaggagtgcaaagacaagaagggaagccgccgtacttgaagatagcgatgagggtgatgataggcagtatcaaagaatacaagttcttgtaggccacgagtttcccaggggaagtctctataaacctgtgtggagtcaggaccctcactcgggcgacaacgatagtgcaagtgaaagcgaaagtagccatgatgtagatgtttttggcggcatgtcgtattcaaagatggctgagatggatagaccacgcaggaagtccgagaggagcataagtttcgtagaagattccaagacgggggactataggtaccacataggccaagtggatgtggtggaggtggactcagacacacctgaaaataaccatctcaaatggctgacatcatga

SEQ ID NO: 2819 - DNA, 1158 bp, Saccharomyces pastorianus
atgcctgcttctactgttggtaaacctattcaatgtattgctgctgtcgcttacgatgcgaagaagccattgagtgtggaagaaattactgtggaccctccaaaagcacatgaggtacgtattaaggttgaatatacagccgtgtgccacactgatgcgtacactttatcaggctcggatccggaaggccttttcccctgcattttaggtcatgaaggtgccggaatcgtggaatctgtaggcgatgacgttaccacggtcaaacctggtgaccatgttattgctctatataccgctgaatgtggcaagtgtaagttctgcacctccggtaagaccaacctgtgcagtgctgttagggccacccaaggtagaggtatcatgcccgatgaaaccacaagatttcataatgataagggcgaggatatattccatttcatgggttgctccactttctccgagtacaccgtggtggctgatgtgtctgtggtggctatagatcctaaggctccactggatgctgccagtttactgggttgtggtgtgactactggttatggggctgctgtcaagactgctaatgtgcaaaagaacgataccgtcgctgtgtttggttgtggcactgtgggcctttccgtcattcaaggcgctaaggcaagaggtgcttctaagatcatcggtgtcgatattaacaacaaaaaaaaacaatactgttttgattttggtgctaccgatttcatcaaccccaaggaagatttggctaaaggtcaaactattgttgaaaaactaattgaaatgactgatggcggtttagatttcacattcgattgtactggtaacaccaagatcatgagagacgctttggaagcttgtcataaaggctggggccaatctattatcattggtgtcgccgctgctggcgaagagatctcaaccagaccattccaattggtcaccggtagagtgtggaagggctctgcgtttggtggcatcaaaggtagatctgaaatgggtggtttaatcaaagactatcaaaacggagctttgaaagtagaagaatttatcacccatagaagaccattcaaagaaatcaatcaagcttttgaagatttgcatcacggtgactgcttaagaactgttttgaagttcgataaacaataa

SEQ ID NO: 2820 - DNA, 351 bp, Saccharomyces pastorianus
atgagtaacatattggcagtttttaatcctccaccacaaagggagctagaaaaggaagagaccatggactgtgttccctgtcaggtcatgagcaccatgttttctgttggatttggttcctacttggcatctgggaagccattcaaatatggcaagaaagatgccaagaagggcatttcgttggcggagtttgagaagagaaacccacaatggtggaagctaactttacgtagctttggtgggttattgatagcctttgggctcgtccgaggtaccgaaggttggttgtggcataaaaataaagaatataagaattacaagaaactagctaacggtgaaagcacggactag

SEQ ID NO: 2821 - DNA, 2718 bp, Saccharomyces pastorianus
atgtctaataaatggtttactggaatttcgaggacaacaggggagactattcccgaggtggtgccaccaaatgagaataaaaatgtaaccagcggttacaatgtcatcgccgaaggtagtgccaataacgaagacggcgcttcttgtcagctttcctttgattatgatggtgagattgtaatgtgcattgaactatctggaggcaaaatggggtgttctgttttggactaccatactaagatattaagagtgtttaaccaggactatgttgtaaacaagtctacaattacgtcccatgatctcatcgatgaggttaataagtccgcaaacgatatcagcctgatctcaggactcttgataatggaaacgaacccaactatatgtttggtctcggtaaggttggaggactggatttttgattacattaagacgaaatgtgacgaggtgaactgtaggttagatctgcaaccaattaaacgtttcaaggaattgaatcttttgcagtcattgcaattgaaggggcatgataatttggttatactaaacgacttactgtcgaatagtaggttcaccactacagtcactgtaagcacggtggcatgtatcctttccaatcatgagcaacaacatacggaactggatgaatgtaatgcgagcaccgtctctaccaacatgattgccggacgatcgataagaagcggatttgaagatgtaatatgcgacctaaagtatatcgatataaaagatcgaatggtattggatgagaatagtttatcggctttgaatgtgtttcctacagcacataaattaggacatgatagcatgatggaaaatggtgcccttagcctattcgaactgtttaataaagtatcttcggattatgctaagaaaatgttaaagtcttggcttttcaacccgttaactagcaagaagcaaatagagaaaaggtacagcattattaggatattattggatacacaaaacaccatgatttttaatgatctcatccaatcaataaagagatgtcccgatgctttcggttttatgaatcagctgagaagtggtaaatcaacattaggaacttggtctaaaactaaaaattttttagagaaaggaattgccatatttaagctgatatcttctttaaaattaaattccgacggcagaaatatctttcatgacatcaagaataacatcgacgttttagaactaaaaaaatgcctaaggaaaatagaaactgtaatagattttgatacttcaaaggatactaaaacaatcacaataaacacaggggttgacaaaagattggatgaatgtagaaacatttataatcatctggaaacccttctgctagatgttgcaagagaggcacaaacatttttactcaattctttgccccaaacagattccaagataacaaaaaatttagataaattgatcaatgctgtatacatccctcaactaggatatttagtcacggtaagtgcctttatggaatacaccctcaaaaatataccagatcttggatgggaagagattttcagaagcccagaatgtgtttactttaagaatggtagagttctagaactcgacgaaacatacggtgatatatatggagcaatttctgactttgaaattgaaattgtattctctttgcaagagcaaatcttagaaaaaaggacgcaattttctgcatatagtgtactccttagtgagctggaaattctaatatcattttcccaagtgtgtatggaaaggaattatgtagagcctcagttagtggaagatacttgcgtcttagaaattattaatggaagacatgcgttatacgaaacatttctcaataattatattcccaatagcacaatagttgacggtggcttgttttcggatctcagctggtgtaaaaacgataaagaaagaatcatcatcataactggagccaatgcgtctgggaagtcagtatatcttactcaaactggtttaattgtctatctggcacagatcggttgtttcgttccagcggaaagagcaaagattggaattgtagataagatattaaccagaattagaacccaagagacaatatacaagacccaaagctcttttgcattagattcccagcaaatggcaaaatcattgagtttagccactgagaaaagcttacttttaattgatgaatacggtaaaggcactgatattttagacggtccttcactattcggctcaatcatggtaaacatgtctaagaatgaaaaatgtccacgcattcttgcatgtacacactttcatgaactttttaacgagaatattctctcagaacacatacctggtatcaaacattattgtacggatatacttataaaccataattacaacctctcgagtacgaagccagttaaagaaacccatgaaaatgagggaattacatttttgtttagaataaaggagggaatttcaaagcagtcatttggtatatactgtgccaaaatatgcggagtaaatggaaatatagtaaagagagctgaagagttttctgacatgatcaatagaggcgatgatatagttcaaaattttggaaaactgacggaaaaagagatattggagtttcaaaagaatcaggaaatagtgaagaattttttatcttgggacttggatctcgaaacttcaacaacttccgaaaatcttagactcaaattaaaaaacatctttcattaa

SEQ ID NO: 2822 - DNA, 1071 bp, Saccharomyces pastorianus
atgtctagagtattagtaattggtgcaggtggggtcggagtgatcactgcagtctcgttgtggtttaaaggggagagcgacgtatctttggtcgtaagatccgattacgataaggtgtcagagcagggctacacgatcgaatcgtgcgattacggccaattggaagggtggaggccacaccacatctacaggactgtggaggacgctgctgcggatgcgagtgacaaggggtacgactacgtcgtggtgactaccaagaatatcatcgacggccccgctgactccagagtccccaacatcatcaggcctgtgcttgagaggaacaaaagcttgcacggggcgcaattgaccacgcacattttgctggtgcagaacggtatcgatattgagaaggacatcttggcggagttccctcgggatgagttccagtacacggtgctttccggcatccagttgatcgggtccactaagatcgggaccggtcatatcagccaggtcagccaggactacctttcctgcggggccttcgacccacaggacgctgttgctgtccaagctgccaacgacttcgtccgaatgtacagcaacaagggccacaacttcgtggaattcgagcccagggtccgctactcccggtggaagaagctcgtctacaacgctgccatcaacacatccacggccctcgtcgagctggacgttccccgttgtttggagttcggcgtcggtaagaagagcactgcgactgaggtgttccagcctgccatgagagagatcatcgccattgctgcgagtgagggcatcgtcatcgaggagaagttcgtgacgatgttcactgagatcaccagaaacaaggtgttcaagccctccatgtgcgtggaccgcgacaagggccaattgatggagctggaggtgatcctgggcaaccccatcagaatcgccaagagaaacggtgtcccaacgcccactctttccgtgctttacaacctgctcgtgctagtgcaagccagactaaaggagttgaaagggctcttgaagttcgatgaaaagaccgccagtcttgtggaagagtag

SEQ ID NO: 2823 - DNA, 840 bp, Saccharomyces pastorianus
atgttacctatttgttcacgctctgcactgctttggagaactataccgagcagggcatcctgtaacgtattgtcagggctaactagacgtattcaagtcaaatctcaattgcaataccgtattttcagcgcacacgccaagagagatttggctacagtcccaactaaacctcccaataaaaatgccttactcaatattcccaatattttgactttatctcgaatagcttgtacaccctttattggacttttcattataacgaacaatttaaccccagcactgggcctttttgcattttccagcatcactgatttcatggatgggtatatcgcgaggagatacggcctcaaaactgttgcagggacaatattggacccgatcgcggataaactactcatgattaccacaaccttggcattatctgtaccatcgggccctcagatcataccagtatccattgcaggaatcatcctggggagggattttttattggcgataagcgccttatttgtacgatatagtactttgaagttgaaataccctggtcgtgtgaaatggaattcgtattgggattttatccattttcccagtgctgaggtagagccttcccaactatcgaaatggaacacttttttccaaatgatatatcttggaactggtgtattgttacttctatatgaaaagcaagcaagcgacgaggaaacggatgagacttttgagaagagaagagaactttttcagaatgtttttacttatctaggatatataaccgcaatgactacagtcatgagcggagcatcctatgcattgaaaagaaatgccgtcaagcttctaaaatag

SEQ ID NO: 2824 - DNA, 2310 bp, Saccharomyces pastorianus
atgaacgataatcaagattgcctgcgacagagaaaggaaaacgctctttcggagcttgcagacgacttcaacaaccgccaggacaccgacagtaccatcgattataacgtcggacaccacagcgcttatacagagtctcctgaagacacagaagtgaaatccataatgatgtgtgatgatattaacgcataccgaatatcatacgcgaataatgagcccctgggcgatggagcggtggagactacgtccatactattgtcgcaaccgctaccactgcgatcgaacgtgatgtctatcctggtcggtgtattcgttgccgtgggagggttcttgtttgggtatgatacagggcttataaacagtatcacggatatgccctacgtcaagacatacattgctcctaaccattcatttttcaccaccaatcaaatagccattcttgtatcatttctttccctaggaacatttttcggtgcgttgatcgccccctacatttccgattcatacggcaggaagcccacaatcatgttcagtactgctgttattttctccataggaaattctttacaagtggcatccggtggactggtactattgatcgtcggaagagtcatttcaggcttcggcatcgggataatctcggcagttgtgcccctgtatcaagctgaagctgctcaaaaaaaccttagaggtgctatcatttccagttatcaatgggccatcactattgggttactagtgtccagtgcagtgtcgcaaggcactcattccatgagtggtccctcttcatatagaatacccattggtttgcaatacgtttggtccagtattttagccgtaggtatgatttttcttccagaaagcccgcggtactatgtcttgaaagacgagcttaacgaagctgccaaatcactatcatttttaagaggtctcccgattgaagatcctaggcttttagaggagctggtggagatcaaagctacgtacgattatgaagcatcttttggtccctccacgcttttggactgtttcaaaacaagtgaaaataggcctaaacaggttctgcgaatattcactggtattgctatacaaactttccaacaagcatctggcataaatttcatattctattacggagttaatttcttcaataacacaggtgtagacaactcctacctagtttcctttatcagctatgccgtcaatgtcgctttcagtctgcccggtatgtatttagtagatcggatcggaagaagacccgtgcttcttaccggaggtgctgtaatggctgtagcaaatttgatcatcgccgtcattggtgtttctgtgggcaaaagcgtagtggctagtaaggtcatgattgcttttatttgccttttcattgctgcattttcagctacatggggcggtgtcgtatgggtagtatctgccgaactatacccactgggcgtcaggtcaaaatgtactgccatttgtgccgctgcaaattggctggttaacttcatttgtgcgttgattacaccgtatatcgtcaatgttggatcccatacatcttcaattggtcccaagatcttttttatttggggtggtttaaatgttgtggccgttattgtggtttatttcgctgtgtatgaaacaagaggcttaactttggaagaaatcgatgaattgtacaggaaagcgccgaatagcgtcatgtctaataaatggaatgaagaaataaggaaaaggtgcatgacatttcctatctcacaacaaatagagatgaagactagtatcaagaatgctgacaaatcagaagtcgtcaataatccagttcctgaggatactacaatcaacaacaacaacgacatttccaatgtagacaaattcttacaagatctgctactgtcaaacgaccgaacggtcgtggagactaaagaagatagtgtcttagcggacgctatcaatgcggcacccttgacatccatggagcttaaaccaatggaatgcccgtcggtgaattacgtagacttaggaaacggtctaggtctgaacacatacaacagaggaccaccgtcgatcatttctgactctacagatgagttctaccaagaaaatagctcatctagtttcaaaaacaacaccggggaaaacggggacaatagcatcagcacatacatggctcaactgattaacagtccatctaccacaagcaatgacacatcgttttctccctcccacaacagcaacgctagaacgtcttccaactgggcaaatgatcttgctagcaagcacagccaatgcacacctcccaaaaacaatacatag

SEQ ID NO: 2825 - DNA, 2181 bp, Saccharomyces pastorianus
atggatttgtccctcactcatcaaaaagaacagttcacaaagttctcggatactttagaggaattcaaaattgaacaaaataatgaacaaaataccattgacccatttgacattataagagagtttcgttcaactgctggaaaatttgcattagattcagctaactccacagaccaagggaattcaatatcttctaaagattgggagttggaagccaggttctggcatctagtagagttgttattggtatttaggaatgctgatcttgatctcaatgcgactaaccttcatccatacaattctagggcattatttgagaaaaaactgatgcaagacaatctacaactttaccaaatatggatagtgatggtttggttaaaagaaaatgcacatatggaggaaagacctcaagatataccaacatccaagtggtccaatagtatcatctctggaggtttaaagagctgtgatttagattatcccttgcgggaaagtagtaatgtccttgatgttaaagacaaagaagaagaccatatttttttcaaatatatatacgaactcattttagctggtgcaactgatgaagcattagaggaggctaaacttgccgacaacataaccatctgtatgattttatgtggtattcaagaatatttgaatccagtcatcgatacggagattgcaggcgagtttgataggcaacaaggcattaagaggcattctttatggagaagaaccgtttacagtctttcacaacaacctaatttggatccatatgaaagggcaatatacagctatttaagcggtgatattccaaacgaagaagttatgcaatattcagattgggaatctgaccttcacttatatttaaatcaaattttacaaattgaaattgaaaactatctcctagagagcggccaaatcagttctgatgagttaatcataccgttaccttcgcatgcgttgactgtacaagaagtactcaacaaagtagcttcaagacatccgtcggaaagtgaacacccaatcagagttttaatggcatctgttatattggattcactaccatctgttatccattcatctgtagaaatgctacttgatgtcgtgaagggaacagaaactagcaacgatataatagacgagccttatcttctaagaatagtaacacatttagctatttttctggatataatcaatcctggctcagttgaagttgttgacaaatccaaactcattaccacatataccagtcttctaaaactacaaggactttatgaaattattccaatatatgccacttttctaactgaatctgactgtttggaagcgtactctttcatattgtcttctctagaggattcacaagtaaggcaaaagcaaatcgaaataatgaacttcctaaaacttcctgcgtcaaacatcttgagaagaactacacaacgtgtttttgacgaaactgaacaagaatactcaccatccaatgaaatttctatatcgttcgatataaacgacattgatatgcacttaatatatggtgtggagtggcttattgaggggaaactgtatgtagattctgtccactcaataatcgctctatcgagaaggttcttattaaatggtcgtgtaaaggcgctcgaacaattcatggatagaaacaatcttggggagatatacaaaaattatgaactagaaaaaatggccgaggatatatccaaaaacgaaaatcaagatcaattgatgaaggaaattttacaatacgaacatttaatccgaggcataaaagaatatgaagaatggcaaaaatccgtgaatttattaaattcagaatcaaacattcctagtttaatagagaaattgcaaggattttcaaacgatacattcgagttgattaaggtatttttagtggatttgacttcatcggacctgaccaattcgacagatcatgagattttgtatgaaattagagctctgtatacaccatttttaataatggaattgcataaaaaactcgtggaggcagcagagctgttgaagatcccaaagtttatatcagaagctttggcatttacctcgttggtcgccaatgaaaacgacaagatctacttattgttccaatctagtgggaaattgaaagactacttagaccttgtcgctcgtacggcaactcttttggattaa

SEQ ID NO: 2826 - DNA, 723 bp, Saccharomyces pastorianus
atggtaaatgactatttaaagtttaataaaaatgtagaggagactaaaaggaaaaaaccgagccggagatatttcagtgggaacgccgcagaattagcgtcactttccagtctagattatgtttttgacatctaccatttagagaaaatccgtgaagaagaagttgcaaagtacaataatgaaaaaaatataggattcgtgaaaattattgagcagatagatttagctctcgatgaagaaagcgaccctaatgaggcccgatcagatgatgaggattccaatgatgaaaactattatcaaaatgattatccagaagatgaggatgatgatagatctattcttcttggtagcgagggggaagccgcagctatatctgaagaagaagttgttttaggtgttaataaaagccggttctcgtcatggaatgatgatcaaattttaggtcctaatggatataaagatgtagaagaagaatacggagatctcttcaatagacttggggggaacagtgaccttttgaaaaccataaattcctcaaattttgttgacttggatgatccagaaaatgaattaaaagcaagtgacgatgatgatgatttaaatgaaggagatgatattgaataccctagaaatgaattcttcccaacggatgtcgataatccattggcacagcacagggatagaatttttcaccagttacagaacaaaatcgaaagaagatga

SEQ ID NO: 2827 - DNA, 1050 bp, Saccharomyces pastorianus
atgcaaaggtttgccagcaggcttgtgtctgcaccacgaatacccaacaaatttctagattgtttccccaggaaacgtaccgttaataagatattatttcagttagatacgaggctcacatacaatgaaatgtaccctatatttgtacaagtatcacaattaaccgataaagatagtatttcatggaagaagaagtatccatacttaaggagttcagatatcatgcagatgcgaaatgtcttaattactctaaggatgcaaaataagtttgtacataaagatgtattggctatggagaataaactattaaacgttgctgctgaactaggtaacaacgacgctatatcaatattgagcttcaatgtggtacaagcacaagaaaataacaccaccaaagacaatgatcagaatgacgttgagaccgccaatagattcataaaggagttatatgcacgcaatcatcatttaacaatcaaattaataggagatacgtttcttaaaaataaggcttataaaaaagctgaaaaatactacaaagaatttttgaaattggaaaataacaccaaactagctggcgaagtttatgggaatcttggagaaattcaaataaaacaggtgaacggttttttgaaggctgaaaaatcatggctgaaatgtatagaactgttagaacttgaaagaagttcacgttggtacttccttctggcaaagctatactcaagttcagagccgttaagggctaaaccactgttggaaagttgtgcctcaattggatttaaagaatgttttaaaacattagggtttcttgagctaaactattttcagaactacgaaagagcaaaagaatggttcaaactaggcatggaaataacggatttggaatgcttccttggatttttcgattgttctttgaaacttaaagatattgggagtgctaaaaactgtctgaaaagtctaaaaacttttgagaatgatgataacaagaaagtaataatcgacgctttcttggaaagtagaaaagattctatggaactactccagagaaaatga

SEQ ID NO: 2828 - DNA, 588 bp, Saccharomyces pastorianus
atgtcaaacttcgggagaagaacctgggacagagaggagtatgctgaacaagccagaagcgggtatgatgaccaatccttgaagaatacgctaacacccgttgaattacaagcattgaaaacaaaatatacgagctacgaccgactaatcaaagcttcactgaaagatctaaataaacgaaagctaactgcaaataacgaaagtctgtcgtcttctaagaaaggcaaaaagttcgggttttattgcgatatctgtaatttgacgttcaaggacacactacaatacgttgaccacttgaaccataagctacatgcgataaaatttgagaacctatttgacgagccgttagtattggagataagagacaatgatgatataccgcaggaggagttcgaaaagcgttataacgacttggtgaaggaattcatagaaatacattcgactactagtcaatccaagaaaaggatgtcttcaaacgtagacgtaaacaaatccaagaaagtggacaaggcgcctttgctctctacggggaatgaatcaaaagtcagtcaaatgatgggtttttccagttttggcagttccaagtaa

SEQ ID NO: 2829 - DNA, 774 bp, Saccharomyces pastorianus
atgtcgacgccagctgcagaacaacggaaactcgtcgaacagttgatgggcagagactccggtttccgccacaacaggtactcgcaccacaagaaagatctcgggctgcacgatcccaagatctgcaagtcataccttgtgggggagtgcccgtacgacctgttccagggcaccaagcagagcctggggaagtgcccgcagatccacctggccaagcacaagattcagtacgagagagaggtcaagcagggcaagactttccccgagttcgagagggagtatctcaccattctggcccggttcgtgaacgagtgcaatggtcagatctcacttgcgttacagaacttggagcacactgccgaggaacgaatcaagatccgacaggtcaccgaagaattggacgtcctggatgcccggataggtcttatgggccaagagatcgattctttaatccgtgcagacgaggtcactatgggcgtgctgcaatcggtcaagctgcaagaactgatggacaggaggaaggaggttgcaaaacgagtgcgaaacatcacggaaaatgtcggtcaaagtgcccaacaaaagctgcaggtctgcgaggtttgtggggcctacctgtcacgtctagacacagacagaaggcttgctgaccactttctggggaagatccacttggggtacgtaaagatgagagaggactaccaccggctcttgaagagtaaccaggctgctaacgcctatagggcggctgcactacccggaaaacgctttgtgtag

SEQ ID NO: 2830 - DNA, 555 bp, Saccharomyces pastorianus
atgaaaatgacaacaacttcgaccactaatgtaaatggtaaagctaccccagctttaaagactactttgtccacttcaaattcaaattcaaatagcccacctactgctcttccccaaaaacctaaattgacaggctgggcgcaagctgctgccaaagcccttccaaagcagcagcagcagcagcagccacgaagaaatgattcctcgtcaccacagccaggtaacggaaagactaaagtcactgtatccaccacgccgtcgactaacactaagggaagttccagcgttaatggatcgtccacgaataagaaattcaaaagaaccaataaacaaccctataacagagatgaagtcaggtcttacatgcacaaactgtttcaagactacaccacaggcgaaatgagtcattcagtcaagacttataaacaagtactgtctgaaactgcaagcgggagggtttctacggccaccgactggggcactgtatcaaacagcaaaaacaaaaacaaaaagtacggctgtttgactgacgttgctaaaattttgaagaattaa

SEQ ID NO: 2831 - DNA, 834 bp, Saccharomyces pastorianus
atgtctgaacaaccacaacaagaacaaccggagggaccacaatcgagacgcaattcattcgccgtaatcgaatttacaccagaagtcttggaccaatgtttgaagcaagtggaattctacttctcagagtttaacttcccttacgacaggttcttacgtactactgcggagaaaaacgatggctgggttcccatcagtaccattgccacattcaaccgtatgaagaaatatagaccagtggataaagtgatcgaagtactacgcagttccgagatcttggaggtttctgctgacggagaaaacgtaaagaggcgtgttccattggatttgactgctgctaggaatgcaagaatcgagcaaaaccaaagaactttggctgtgatgaatttgccacatgaagacgttgaagcttcacagattcctgagttacaagaaaacctggaaacgtttttccagaaactgggcgaaatcaaccaagtgcgtttgagaagagatcacaagaacaaaaaattcaacggtacggttttggtggagttcaaaacaatcccagaatgtgaaacttttttgaaatcatactccaacgacgatgagtcaaacgaaatcttgtcatatgaaggtaagaaactaagcgttttgaccaagaaacagtttgacctgcaaagagaagcttccaaatccaaaaacttcagcggtagatcaagatcgttcaacagtcatagaaaggaaaacttgcccaaattctccaagaacaagaagaaagatgacgacaaggacgacaaggacgactcttccgccatcgccgatgaagaggaagatcataacgagaaatcctaa

SEQ ID NO: 2832 - DNA, 810 bp, Saccharomyces pastorianus
atgttgatagtatcattcttggctctgttttgttcattagtgtcgcaaacggtttactgcgatgtggccattgtggcaccgggacctaattctgtgtacgatttatccggctcaggccaggccaccgttaacgtaaaatggatgcatacagatactactccacaggagaaggattttatcaagtatacgttcactctatgttcaggcaccaatgcgttgatcgaagcaatggctacgttgcaaacgctcacggcagccgagttggcaagcgatgagtacagtgcagtcattgaaaacactgtcgggactgacggtgtctattttattcaggtcttctcacaaacggcaattggttacaccattcattacaccaataggtttagactgaaggggatgaaaggttctaaaatggctaatccgagtatggtaaccatagcaccagtgccgcaaacaagaatcactacgggggacctgggtgccaccatcgactccaaaagttttaccgtcccttacaacttgcaaactggtgtcgtgaaatacgcgcccatgcaactacaaccagctacaaaagtgacggcaaagacatggaaaagaaagtacgcaaccagtgaggtgacgtattactacactctaagaaactctattgatcagcataccaccgtgactccagggtggtcctacgtactgacggccgatagcaactatgccacgccggcccctatgccggctgataatggtggttggtataatccccgtaagcgactttcgttaaccgcaaggaaggttaatggcttacggaaaaggctatga

SEQ ID NO: 2833 - DNA, 801 bp, Saccharomyces pastorianus
atggagcatgcagagggtgttgggtccaagaaagggggtgggggtatagcatctgaatctcagtttaaactacaacgtaaaaaagaagttgaatctttgctcagtaagggtgaagaagtaccatacactttccaagatgaacaagacgatcaggtgagaagcaatccgtacatttacaagaaccattccggtaagttggtctgtaaattatgcaatacaatgcatatgtcgtggtccagtgtcgaaagacatctgggtggtaagaaacatgggctaaatgtgctaaggcgtggtattagcatagagaaaacttcccaaggaagaaatggacaagcagcccaagattttcagcaccaacaaaaaataattgaagcaaagcaatcattaaaaaataacggcgtagtccctgcgtctaaaattgcagctgtgaaggacccaaagaccggattagtgggtttggctattcaagtaaactacaacatcaacgacaaggaatatgacgctagcggaagcgataaactcggaataccacctctcatcaggatagtatctgggttagaattatcggatccaaagcaaaagggcaagaagttcttaatcattgcatatgaaccctttgaaaacatcgccatcgaactaccgccaaatgagattacatttggaaaagatcaggaaatagaggccaatatggagggagtagatgagctgaatagaaaatgtactgtttgggattcaatttcaagactttactacattcaatttttcttcaaacaggccgaggaagatcaagttgctgcttga

SEQ ID NO: 2834 - DNA, 1389 bp, Saccharomyces pastorianus
atgctaagaaacaaaagtctaaacaaattttttagagtgccaaccattatgtctcagaatctcaaacggagcgcgttaacagcaaatcttacttcggaatcaagagcaacttcggatgaattcaataagcatttgcaaaatgaagtcgaacgagagagggaaattcaacaaaagaagaaaataaagagaaccaagttaaacaaacggtcaattttaactgataagtccacattccaatcgcgagaaatagggaacaagaagcctaagcacagacaggttgatccagaatatgaagttgatatcgagggacccctgaggaaaatcaagccatattattttacatacaagacattttgtaaagaacgctggagaaataaaaaactgattgacgttttcacgtcggaattccgagatcgcgaacctgaatactatatgaaaacaattgccagcggcagtgtttatttgaatgataaggccgcaggcttgtccagcataattaaaaatggagatctaattacacacaaagtacataggcatgagcccccagtcacttcaaggcccataaaaactgtttttgaagacaacgacatcctggttattgacaagccaagcggtatacctgttcaccctactggccgttatcggtttaatacgatcacgaagatgttggaaagaaatttgggttttgcagtgaatccgtgtaatagattggatagactcacaagcgggttaatgtttttggcgaaaacgccaaagggagctgacgagattggtgatcagttgaaagctcgagaagttaccaaggaatacgtggctagagtaattggtgaatttccagagacagaagtagtagttgagaaaccattgagattaattgagccaagacttgctcttaatgcggtatgccaaatggatgatgaaggcgccaagcacgcgaagaccgtttttaacagaataagctacgacggaaagacaagtattgtaaggtgcaaacctctcactggacgatcacaccaaatcagggttcatctgcaatacttaggacatccgattgctaacgatccgatttattcgaatgaagaagcatggagtagcaatctaggcaaaaatggagaaatagactttgatacagttatcgcaagactggatgaagtaggaaaaaccagaccggccaaaagttggtatcataagaattccgctaacggtgaggtattaagacaagaaaagtgcactctttgcgaatctgatttgtacactgatcccggtcctaatgatcttgatctttggttacatgcatacctatacgaatcaaccgagactgacgaagaaagtggacagaaaaaatggcgctacaaaacggagtatccagaatgggcccaaataacatag

SEQ ID NO: 2835 - DNA, 606 bp, Saccharomyces pastorianus
atgtccagcgaagataacaaacctattgttgaaaagaaggaggaaactgctccaaagccaccttccgccgcagtcttctccatgtttggtggtaagaaggccgaaaagccagaggctaagaaggacgaagccgacaccaaggacgaagtcaagaaggaaggcgaggatgccccagaatctccagatgtccatttcgaaccagttgttcacttggaaaaggtcgatgttaagaccatggaagaagatgaagaagttctttacaaagtcagagccaaacttttcagattcgatgctgacgccaaggaatggaaagaaagaggtactggtgactgtaagttcttgaagaacaagaagaccaacaaggtcagaatattgatgagaagggacaagactttgaagatttgtgccaaccacatcattgccccagaatacactttgaaacctaacgttggttccgacagatcctgggtatatgcttgcacagccgatattgcagaaggtgaggctgaagctttcacttttgccatcagatttggcagtaaagaaaacgctgacaaattcaaagaagagtttgaaaaagcccaagaaatcaacaaaaaggattag

SEQ ID NO: 2836 - DNA, 681 bp, Saccharomyces pastorianus
atgtcctttgctgatgtcaggagtattcgtcagccggtggtgaaggtctgtggcttgcagagcacggaggccgccaggcgtgccctgtattcagacgcagacttactgggcatcatatgcgtgcccaataggaagagaacggtcgatccgattgtagccaaagaaatttcggatctagtaagggaatacagaacgagtacgggtactccgagatatctggttggtgttttccgtaatcaatccatggaggacgtcttaaatatagtcaatgagtatggcatagacatcgttcaacttcacggcgatgagccgtggcaagaataccaagatttcctcgggttgcccgttattaaaaggcttgtgttccctagagactgtgacatactactgaatacgcctccagagaaatcccatctgtttactcccctatttgattcggaggccggtgggacaggtgaacttttggattggaactctatttcagattgggctacgaagcatgaaaattcgcaattcctacaattcatattggctggtgggttgacgcctgaaaacgttagtgatgcggtccagctaaacggtgtcattggtgttgatgtaagtggtggcgtggaaacagatggcgcaaaagatatgaacaaaatcacgaactttattcgaaatgcaagaaatatgacttag

SEQ ID NO: 2837 - DNA, 1569 bp, Saccharomyces pastorianus
atgaatacgaaagtaccagaatttagcgctttaaccaaagaattaccaagatctctcgaacgaaaacatcccaatgttgtagacgcatttttccgcacatatggtgctaaacctgattttattgctaggtcccccggtagagtcaaccttattggcgagcatatagattattgtgatttctcggtgttgccattagccattgatgttgacatgctttgtgcagtcaaagtgatggacgaaaagaatccgtcgatcaccttgacgaacgcggacccgaaatttgctcaacggaaatttgatctacccttagatggctcttacatctccattgatccatccgtgtcagactggtcgaactactttaaatgcgggttgcatgtagcacattcgtacttgaaggaaattgctcctgaaaagttcaatggtacgcccttaattggtgcacaagtcttttgccaaagtgatgttcccaccggcggcggtctgtcatcttcagccgcatttatttgtgcggtagcattgggcaccatcagagccaatatgggagtaagattccatgtttctaaaagagatttgactcgtatcacggtagttgctgaacattatcttggtgttaacaatggaggtatggaccaagcgacgtccgtttatggcgaagaggaccatgcattgtatgttgagttcagaccacaactaaaggctacaccattcaagtttcctcaattacaaaatcacgaagtcacgtttgtcatcgccaacacgcttgtagaatccaataaattcgaaactgcacccaccaattataatttaagagtgatagaggtgaccatcgcggccagtgcgttggcgaccaggtacggtgttgctttgccatcccacaaggagaattccaattcagagagaggcaacttgagagactttatggacgcctactatgcccgatacgagaaccaagccaaaccgtggaatggcgatattgaaaccggaattgaccgtttgaacaagatgttagaattggtggaagagtcgctctccgacaaacaagaagggttcaccatggatgatgctgctgaagcgttgaactgttcccgtgaggagttcacaagagactacttgatgattttccccgtccggttccaagtcttgaagttgtaccaaagagccaaacacgtttactctgagtcgctgagagtattaagggcgttgaagctaatgacaagcgccaggtttcaaacggacgaagatttttttacgcagtttggccgattgatgaacgagtcccaagcttcatgtgacaagctctacgaatgctcgtgcacggaaaccaaccaaatttgctctattgcccttaccaacggctcttatggttctcgtctgattggtgctggttggggcggctgcaccgtccacctcgtccctggtggtgctaacggtaatatagaacaggtgcgaaaggcgctaatcgacaaattctacaaagtcagatatcctgatatcaccatgaaagaattggaagacgccatcattttttccaagccagctttgggcagtagcctgtatgaactatga

SEQ ID NO: 2838 - DNA, 1935 bp, Saccharomyces pastorianus
atgagagcatatgggaggaggggtccagtttttagatcctctttaaaatctaatagaggatcgtcatcgtcttctaatgtggaatttagcgatgatgatgtgaattctattattcccgacttaagttctactatgtctagcagtatagcagatcatccagttgaagtatttttggataaacatgacactggtgagcacgcctcaacttcatttgttaatatcaatgaagatgccctttcacagaactcaaaggagagtatacaggatgttaaaactatcactagtgatgatacttctttggtccttatgaagaaggagaagttaagcgcattcgattttcttgatggttcaaagacctctaaaagaaagaaaaggaggacataccaacggcacgacacaagcatagagtcgtcaatcgaattgaatggacaagatgaagacgctgttatgacgcaaaatgaatcagaatcggcaaaacaaatatacaatgatatcaacgagtttatattaaacctaccgaaggcggacgatgatgtatttgataaaatgttcgagaatgaattgaaggaagataacgttgaagaagaagatacgagtactcttaaaaacagaaaatatggaaaatttcgaaccatcttaataaacaaaaataaagatgatgaaatagcggaagaagaggacgatgatcagagagctaacacgataagtaaaaacaacggtgacagcagcaacactgaaaaagaagggctgtcttcaacacatcactacaatgagttaaaaaatatgggagatacaatcaaatatcaagacgatattgagtttttcttatcgaattctaaaaatgacaataacgatgaacagtcaattaacgattacttcaaaatacttctgaatttatctctgatgataattaatgatgacggatttttccaatatgcaaaaagatatttcaaaaaggaagtaatcaagctcgttttttcacgagtaaaattagattttgctgaactgttattattacagggctatttattaaataaggtcagtgaatctcaatgcgatttcccctttaattttgaagttttttctattgaattaagtcgaaataccagcaaagtaagcaaaagaaataaacatatgaataagctatcctccttgaatttcgaagattttcttcgtaaaacccattttaaaacggggctttcctattcattatcactttggagcatatatgggaaattttcgaaagatatagtaaagagaatttctactgtagcttcggacaggtatttgttcaatcaagatatcaataaaattcttcatctgttggaaaaaatagtgtcaagttctacatttggcctcatattcataaagcaacctgatatgttagatggcgtagttggcaatataaaggaagaattcaaaaatatggtcgataatgattccctgattaaggtcttgattttattgactaatatagagggatatggacatagcttgaatgaagatatggatgcgatataccaagactcgatgaatacaatcttgaacggcatttacccattaatcgatacaaaagtcgacatcattctgttacatttagggctatgtttaaacatttgcggtagaaaaagtagttgtttgaaagttgatgaaaaattatggcgtaatatgaaagctacttttgtaaaaatgatccttgatgattctgaggttgaaaatagactgacccaaggtttgttttatctaaattttgcatttgtagttaaccaacaaaaagatggcgatttaaattcgaaagatctcaacaagctgttggtagaattggaagcatttaaattagaaacctcacaatttaatgtaggtatttcaaataaaattgaagccgcattgcattacttaaagtcggcctataaaaggggaagaagtactagttag

SEQ ID NO: 2839 - DNA, 1203 bp, Saccharomyces pastorianus
atgtccacgttcaaaagtctcgtgttcaagagattcaactcaaatctgaagaaaacggccctacatgatcttcatgtgtcgctaggcggtacgatggtgccatatgcaggctatagcatgcccgtactatataagggacagacccatatcgaatcgcataattggacgagaactaatgctggtttattcgatgtgtctcacatgctacagagtaaattatcgggtccacattccattaagtttctacagcatgttacacctactgatttcaatgctttgcctgttggtcacgggactctgagtgttcttttgaacccagagggtggtgtcgtggatgataccattgtcactaaggaaaaccaagacaatgaattttacatcgtgactaatgctggctgtgcaaagagggacaccgagttccttcgtggggagttgcaaaacaaccccgcattggactgtcaatggaaaattattgaaggcagatctctcttggcgttacaaggccccaaggctaaagatgtcttggaaccactattggaaaaaacggctaagggcaaaactttgaaagagttgttctttggacaaagagacgaatttgcattgaaggatggtactttggtccagattgctagaggtgggtacactggggaagacggatttgaaatcagtgtgcccgatgagaaggctgttgagtttgctgaacagcttctagcgaaccccgtaatgaaggctatcgggctagccgctagagacagtttgagaatggaagccggcatgtgcttatacggccatgaattagatgaaactattacacctgtagaagcaggattgaactgggtgatttccaagtcaagaaggaacctaacgaatgaaaaggaccggttcaacggatacgcaaagataatggatcagttaaacaacaagacgtataacaggatacgagttgcgttcaaatacttaaagaagggccctgctgccagaaacggtgtcaagattttcttgcccgatgctcaaaccgaagtcggtcttgtcacatcagggagtgcatcccccagtttaaacaacatcaatgttggtcaagggtatgtggagaagggccaccacaaacggggtacggagttgctggttcaagtgagaaacaagttttacccaatcgaacttgcgaagatgcctcttgtgcctacacactactacaaaaactag

SEQ ID NO: 2840 - DNA, 1776 bp, Saccharomyces pastorianus
atgtctcaacaagataacgttaagtccgccactgaaggtgtcgctaacctacacctcgatgaaaccaccggggaaatggtctccaagtctgaattgaagaagcgtatcaagcaaagacaagttgaagccaaaaaggctgccaaaaaggcaactgcccaaccaaaaccagcttctaagaaaaagacagacttattagccgatctggatccatcgcaatatttcgagactagatcccgtcaaatcaaagaaatgagaaagacccacgaaccaaatccatacccacacaaattccacgtttccatttctaatcctgaatttttggccaaatatgcccatttgaaaaaaggtgaaaccttacctgaagaaaaggtgtctatcgccggtagagtccatgctaagagagaatccggttccaaattgaaattttacgtccttcatggtgacggtgttgaagtccaggtaatgtcgcaattgcaagattactgcgacgcagcctcttacgaaaaggaccatgaccttttgaaaagaggtgatatcgttggtgttgaaggttacgtcggaagaacccaaccaaagaagggaggtgaaggtgaaatctctgtctttgtcagcagagtccaattgttgactccatgtttgcacatgttgcctgccgaccatttcggtttcaaagaccaagaaaccagatacagaaagcgttatttggacttgatcatgaacaaagacgccagaagtcgtttcattactcgttctgaaatcattcgttacattagaaagttcttggaccagaggaagtttattgaagtggaaactccaatgatgaacgtcattgctggtggtgccaccgctaagccattcgtcactcaccacaatgacctggatatggacatgtacatgagaattgctccagaactgtttttgaaacaattagttgttggtggtttggaccgtgtttatgaaatcggtagacagttcagaaatgaaggtattgatatgacccataacccagaattcactacctgtgagttttatcaagcttatgctgacgtttacgatttgatggacatgactgaattgatgatttcggaaatggtgaaggaaattaacggttcttatatcatcaagtaccatccagacccagctgatccagctaaagaactcgaactaaacttttctagaccatggaaaagaatcaacatgattgaagaattggaaaaagtattcgacgtcaaattcccagccggtgatcaattgcataccgctgaaactggtgaatttttgaaaaaggtcctttccgacaataaattggactgcgcacctccactaaccaatgcacgtatgttggacaagcttgttggtgaattagaagacatgtgtatcaacccaactttcatcttcggtcacccacaaatgatgtctccattagccaaatactcaagagatcaaccaggtctatgtgaacgttttgaagtctttgttgctacaaaagagatttgtaacgcttacactgaactgaatgatccatttgaccaaagagcacgtttcgaagaacaagctagacaaaaggaccaaggtgatgacgaagctcaactagtcgacgaaacattctgtgacgctctagaatacggtttaccaccaaccggtggttggggttgtggtatcgatagattggccatgttcttgaccgactccaacacaattagagaagtcttattgttcccaactttgaaacctgatgtattaagagacgaagttaagaaggaagaagaaaaatga

SEQ ID NO: 2841 - DNA, 606 bp, Saccharomyces pastorianus
atggagcaaatattatataaccaaagtttaaaagcccctacgatttctgtgtttcagggaatagcttttctgaaagttttaattttttctattttccagcagctgctttataacccaattttgcaagtatttcacacgaaagtcccagttgcgggactcgattcatctgcgtttttcaaaagcgattggagtgaaccctcgagttatattagtcttaaccaggactccctaaatgctaccaaatacacgttcatagtactctttaccctgttcagaatggcctcgtatattatttataaactatctgatcaagactgccggttgtgcgattctttggattttcgccgtttcaggtggagtgaaaagaggaatacaaatagaaagaggagtctttcgtttggtaaagtttatctaacgaaatcggatatactaccaatttcaactggtaacggcttaggaaatagatttattggcctggcatctaacagatctttaaaatgcttccaaaaaatggagcgtttgaataataacaatactgaaaggtattcggtaccaaaaactaaagcgataaacgcacttttatggcgagagcaacagacttgttag

SEQ ID NO: 2842 - DNA, 3108 bp, Saccharomyces pastorianus
atgatgggtgaaaacaaggataagaagctggatttatcttcattgaggaataagatttcttcgaaattacaagataataacaataagaaggcgaagaaggcccaaaaaaacaagaacgcaaaggaaagcatggtcgaaaagaaaatggacgaagatttgcgccgtgaagcgttggctttgggtgctaatgaagaggatctaaagttgattcaaggattaagtgatgatgacgaggacagtaaaagcgagcaggaattcgatgctgctgcggacgagggtgcaaacgataaagtgtttaaaaatgatctccaagacttcatgaagaatataggttttgacaaacacaagctcgaagacgcgaatgatgacgacgtagaaggaaatacctctagctccaaggaatttgaaaagcctgtacaggaaaagaaaaaagaacagaaacctgttgccgcagccgaacaagaggtaaaagaagaagaggaagaagaagaagaagaagaagaagaagaagaagaagaagaagaagaagaaaaaatagctaaccttagttcagaccaaaagtcagaaccaaaatcagcagaaaaagaaaagaaagaaaagaaagatagcggtttaattacacaaacaactatcatttcatctgataagctaaccatcccttatgacaaaccatggtatgaaattccattggattctaaagtagaacaaagtgaggacgttgcggaattatccaaggatcaaattgaaaagctttttgaaagaggtaaacaaactttggaagccgataatcaaacctactatgaagaattcacaaaagattcatcacaggcaaagtttatgtcccaaattttatcagatggtacacttaacgataaaatatcggctgtgacattacttattcaagattcgccattacacaacatgaaatctttagaaactttggcttcctattgtggtaaaaaatccagaaactcggctcttcaaagtttaaactctttgaaagatttattcttaagtggtcttttaccaaacagaaagctgagatactttaagaaccaacccggtttgtcaatgatgctaaataaaacaactttggccatcttctactttgaagactatttgaaaaaattgttcttccgtattttagaggttttggaagtgctatctcatgatcctatcatccacgtcagattacaagtattaaaccatgtttttgatctattaaccaatcaaccagagcaggaattcaacttgctaagattaggtgtgaataaaattggtgacattgattccaaagtttcttcaaaggcttcatatttattattaaagttggaacaggctcatccaaatatgaaatccattgttattgatgctattgttgatatctcattaagaccaactgctgactatcacaccacctactattctgtcattactttaaatcaaacaatcctgaaaagatcagaggactctgtagctaacaagttggtgaaaacatatttcacgctctttgagaaatttctaatcaacactgataaagatcacaccgatggcactgcaaagagcaaatcaaagacatacgaggaaaagaggaagaagaattttaaaaagggtaaacatggcggtaagtctgtaaaagttgaaaaaacagaaagtgaagtcctcgatgaaaagaactcaaaactgttcagtgctttattgacaggtatcaaccgtgcgttcccttttgctcaaatcccagcatcggtgtatgaagttcatatggaaactcttttcaaaatcacacactcttctaatttcaacacctctatccaagcattggtattaatcaatcaggtcaccgtgaaggctgcattgaatagtgatagatattatagaacattatatgaaagtttgtttgaccctaggttagtgaattcttccaagcaaggtatttatttgaatttacttttcaaatcattaaagcaagacgcatcaaatgtggaacgtgtagaagcatttgtgaagagaatcctgcaggtgtgttttcattggctgaacgttggaactattgccggtttctttttcttattgatccaattagctaaaacagttccacaaattaaaaatcttctgacgaatacaccagttgatcatgaatatgaatccgatgctgaagaggaacaagcaagtaaagatgatagaagaaagcaatacgatggccgtaagcgtgatccaaaatttgccaacgcagacaaatcttctttatgggaaatcaatcaattcaccaaccatttccatccaactgtacaaacatatgctagcgcctatgtcacaggaactgcagagcagataagcaaaccggatttaggtttatttacattatcgcatttcttagacagatttgtctacagaagtgccaaacaaaccaacgccacaaggggtgcatctattatgcaacctttgtttagtggttcacaggtcagcaactctgttttagtcaaggcgtctgatgtgacgcttgaccagaaccctgtaaacactgaaaactggttaactaaaaaggtagaggatataaagcctgaagataaattcttttaccaatatttcacaaccaagaagaccgctgacagaaaggggaaaaaatctgataaagaatctaacttcgatagtgacgatgaaatgaatgaagatgaaatctggagtgctttggtcaaatcgagacctgatgtagaagacgatagtgatgacagtgaagtcgactttggcgaagaagatttcggcgaatcaagtagtgaagaagaaggtgaactaaacgcaatcgaagaggaggatggtgaaggcgagcaggaaagcggcgacaaagacgccttcgatgaagatatattctacagtttcgatggtgaacagaatgctggagacaagaaacgtacctttgctgaaagtgaagaggatgatgaaaaagaagaagaagaagaagaggaagaagaagaagaagaagaagaaaaagataaggaagctgctgcgaaaagagctaagaagaagcaaagaaagagtatgctcaaaagcctaccggtatttgcatctgcggacgactatgctcagtatttagatcaagactcagattag

SEQ ID NO: 2843 - DNA, 1623 bp, Saccharomyces pastorianus
atgagtagcaagaagtttgttgtccgaattgcagatgcgcttttcaagtcatcattggctaagaatactccacctgtttatccacagaggattgagcattttgaaatcttacctagcgaaaaatgggtcatatggggacctggaaaagccaagtttttggatgtactaagtaataaatatatctgcgagcccccactatctttggcattcggttttttaaagaatacttcgtacattttgccgagaattgagcaagttgctttcaaaggcgttttacccactgctcatttgagtgccagatacgaattttttaaggatgactatgaccaaacgtgcaaacaattcatatttgataaggctagtggatcaaatgcagtttcgtataaagtggccacaaacaatcgtaggataaacatggagctgtatgatattctaatcgagaacttaagactaaccactttacaagataggtgggtaatgggattgagtaatggacaaatgaggagagcaagattagcccgtagtattcttaaggaacccgacttattactaattgatgacccatttttagggttagatccaagtgcaacagcgacaatctcacaatttttggcgaattatgaaagtatgccagtaaatagtagttgcccaattgtcattggtttaaggtaccaagattctattcctaagtggtgtacccatgtatgttgtgtcgatgaacagaatggtatattgttccaaggcccaatccaaaagcttcaaaataaaattgatgaaaccaaatcatgggcacagaaagaattacaagagtcccaaataaacagctattccaaaggagatatttctattaacgatttactttctgtacatcccatgtttgggaagggtgaccatgaaattatcaagatgcctcacgttatagaattagacggcttgagtgtttcgtacaaaggtgaggctattttgaaaagcttgcactggaaagtccaacctggctcaaaatggcatataagaggagataatggttcaggtaaatcgaccttgttatctctactcatggcagaacatcctcaatcgtggaactcaaaagtgattgaaaatggtattccacggagaacgggcaaaacaaactatttcgacattaatagcaaaataagtatgtcatcacctgaattacatgctatttttctgaaaaatgccggaaggaggttaaatgttagagaaagtgttgcaactggctatcgggatgcgtcctcaaacaatttcttaccggtatggaaatctttagacaaaaatgctcaaaaaattatcaacatgtatctaaggtatttcaacttagaccaaattgctgataatgttcccttcgaacaattaactgttagtgatcagaaattggtcctttttgttaggagtttgatcaagatgccgcaaatattgattctcgatgaggccttttccggaatggaagttgaacccatgatgcgttgtcacgaacttttaaaacagtggccagggacagttcttgtagtggcacacgttgctgaggagacgccacaatgtgaccattttttgagacttatatctccaggggactatgaagttggcgacatcaaagaaaactag

SEQ ID NO: 2844 - DNA, 2979 bp, Saccharomyces pastorianus
atgactgtaaataacacccagaaagattccaatgcgaatcaacaaacaggcagtagcataattgacgaaaacgattcagtttctgaaaaggacaacgatgataatactgtaaacaccacggaggtaactaaaccaaatgagagcactggttacttaccacaaccaagtagtgaagcaggcctccaaatagataaaagtgtaatagccgtaagcgatatggaagccgaagaagatggtaaagaagaagatgataaagaagaagaggctgaagacgatgatgatgatgacgatgatgaaccaccattgctaaagtacacaagaatcaaccaactcccgaaaaatttctttcagagagactcaatatcttcatgtttatttggtgatcatttttttgcatttggtacgcattcaggtattttacatctgactacatgcacattcgaacccatcaagacaataaaatgccatagatcttcaatactttgtatcaatactgatggtaaacattttgctacaggatctattgatggcaccgttatcattggatcaattgatgatccgcagaatataacacagtttgacttcaaaaggcccataaattcagtagcattgcactcaaattatcaagcatcaaagatgttcgtttccggtggaatggctggcgatgtggtattatcccaaagaaactggctaggtaataggattgatattatcctaaataaaaagaaaaagaaaaagatcaagaaagacaatcaacagccggatatgaagggccctattatgggaatatacactatgggagaccttattttatggatggatgatgacggcgttacgttttgcgatattccaactagatctgagcttttgaacatatcattccctacacagattttcaacattcagaatgtcagaccggatcttttcagacctcacgtccatttcttagagagtgatcggattattattggatggggatccaacatttggcttttcaaagtttcctttgctaaggattcacactcgaacaaatctagtgactctacatcgcaaagtaataatatgagtcatttcaaccctactactaatttcggctctttactgtcaagtgccgcctcaagtttcagaggtacgccagataagaaagtagagttagaacgccattttacggtatcgatgctgattgctgggttagcatcatttaaagatgatcagttattatgtctgggatttgatctagacatccaagattgcactgatgacaatggaaataacaactccaatctaggtaaccagtcaaaaaatttactgttcaagggaaaagccccggaactaaaaattgtcgaccttttcaatggtgatgaaatatacaacgatgaagtcataatgaaaaactacgagaaattatcattaaatgactatcacctgggtaaacatatagacgaaaccacgccagaatactatttaataagttcaaatgatgctatcagagttcaagaactttcattgagagaccactttgattggttcatagagaggaagcaattttacaaagcctggaagattggtaaatacgtaattggatcagacgaaagatttagtataggtttaaaattctttaacactttggtaaccaagaaggattggagtacactgatcgatcatttaaacattatcttcgaagaaactttaagctcattagattcgaactcatatgaaacttccaataaagtgttgctacaatgggcagatataatagaagtcttgatcaaatcaggaaaaatagtagaaattgcacccttaatccctgagaaacctgttttaagaaagtcggtatatgacgatgtattgcatcattttttggtgaatggaatgattaataaatttcatgaatatattatcaaatgggatctgaaactcttctctgttgcacattttgaagaagagctagaaacgaagatagagaccgccaatgaacccacagtcttacacgatgaagtggattccgatattacttatagaacagaattagtccttttatatctaaaagagaacaaatatacgaaggcaataccacatttattgaaagctaaggatttgagggccttagctattataaaatcacaaaatttgttgccgcagtatctagatcagatagtagatatcattctcttgccttataagggcaaggtttctcatatccctaaactatcaatattcgaaattcaaactatcttcaacaaacctattgatttattatttgagaatagacataccatacccattgatagaatatacaaaatatttgaacatgactgtccaaaggactttgacaagattctattctcctatctaataaaatttttagatacagacgactcctttataataaatccttacgaaaatcagcttattgaactttattctgaatacgatccacagagtctcttgccctttttacaaaagcacagtaattataatgtagagactgccatcgaagtttgttcctccaaacctggtctgtacaacgaattgatttacttgtgggggaaaatcggtgaaacaaaaaaagctttatcattaattatcgatgagcttcaaaacccacaattagctattgattttgttaggaactggggtgattcagatctttgggaatttatgattaactatagtctagataaaccaaattttacaagggcaattttaacatgttctgatgaaacaagtgaaatatatttaaaagtaatcagaggaatgtcgaatgatttaaaaattgacaatctgcaggatatcatcaggcatattgtccaagaaaattcgttgagcttaaaagtacgcgataatatattggtgatcattaacgatgaaaccaataagttcgccaatgaattcttgaagattagaagtcaaggcaaactatttcaagttgacgaaagtgacggtgaaatcaatgatgatctatataacgtgttttga

SEQ ID NO: 2845 - DNA, 1482 bp, Saccharomyces pastorianus
atggataggtacggacacatagctcataaagaaggcaatgtttgttattacataccaagactgttcaactacaacgactattataatgggttagaagacgtaagaatgtttattggcgacttgaaagaccagatgagatcttctccatttgtttgccaaaactattatgatgagcggctatcgatattattctggaaaaaccatcctttgcaacaaatacatcttctcgggtgcatcgttgggctccagtataaatggatcggccagcaggaatacattttctttcaactagatgactgtacatcgggctccacatcagagagtttcagtgatgacgcaaagtttttaacttgcaaagttaccaaggatgtcattatgtcatgtgggctgaagataactgatttggcaggtttaactctccacatttatgggagagtaagtttaaactatcaggagttgcaagttgagtatatgaaagtgtgttacactttaacggaagagatagagcactggaaaatgacaatgaatacgcgtgagaagcttaataatacgtggtccctaagcgactctgttgtagcagaactattcacgcaggagcaagagttgacgcctgagaagacccggtccgagatggcggaacagaattttgttaacttgggatacaagactcctgaaagtaaaagaaataaaaccactttcatcgagcaactgcaagaagaacgtataaaggatgaattggaaattacaagcccgtataacagcaccaacacttcaaatagcgttcattctttatcgtttcaatttgtatcatcgctcaaagatttacctgacctggatttcatgaactcttctaaccagatcgaaaatgatggcgaaaactctttgaatgtagtaggatccaaaagcatgaatcctccagtgacggtatcaaataaggcatctgcaaagtcaagcatgatgctaatcttatcagaactacgaatgaaagagatttctagcttcgatctttaccagttacaggaggtaaggagagtggtcgctagtttagccttgtttcaatttcagcagcaaaatttaggcatcatcaaatctttcactactctagagaatgaagcattccagaacttgattgacaaccttgtcaagctgggtttggtcaacttgagcgatatcaaaaataatgtactagacttgctacccttgagaaaacttttcgattacgctcagaaaaggatatcagtactagtgaagctacaatgctataccggtactatcgagctgtatcatgttcaagaaaagctacatctgccggatataacgataagtggtatcatcgatgtcttcaaagaatgcctcaaacagacaacaaaacagtatccacaaatgctgaagagctggtggattgatctaaatggcgagggagaactgaagggtcagaataatggaatatcactgcatttggaatatgtcacgaactcatga

SEQ ID NO: 2846 - DNA, 4845 bp, Saccharomyces pastorianus
atgtcaaatccctccaaacccacatctccctttggggatgatagcgagcatcaattaggatctgcatcaaacgggctaccgcccatgtcacccttcgatgatagttttcaattcgaaaacccaggtaaatctcatggaagtattgagttagcaaagaccaatggttccattctaaaacgacaatccaagccaatgaaagatattggtacacccgatctatcaaaagtgacctttgatggaatcgacgactacagtaacgataatgatattgacgacgatgatgaatttaatagtaaaaaaaacgagattcatgagcatgcaaatgaagtatatgatgatatccattcgttccaggcaacaccaatacctaattcaggaggatttgaggatgttgagctaaataacaacgagaataacaataatgactcacaaacagaacatgaattgaaaagagtacgcttcggtacaagaagaaataagttcggcagaatggatgtgaataggtcgaaaaccttaaaatgggccaagaagaattttcatgatgccatcgatgaattcagtactaaagatgataccctggataattcagcctttcagaacagatcagatgaattaagaactttgtactacaatttgcctttgccagaggatatgttggatgaagacggcttaccaaaagttgtttatccccgtaataaaatcagaactacgaagtacacaccgttaacatttttccccaaaaacattctattccagtttcataatttcgccaacatttattttctatcactgttaatcctaggtgccttccaaatttttggtgtgacaaatccaggatttgcagccgttcccttgattgttattgtcattatcaccgccattaaggatggtattgaagattctagaagaactgtattggatttggaagtcaataatacaaggacgcatattttaaccggtgtgaaaaatgaaaatgtggcctttgataatgtttccctatggagacggtttaagaaggcaaatactaaaggtttaataaaggttgttgagtatttttctgaaaatcttaccgctgctggtaaacagaagaaactgcaaagaaaaagagaggaactacgcaggaagaggaactcaaaaagttttggtcctcgtaattccctggattctatcggtagttatagaatgtctgtggactatgctcgcccctctctagattacgataacttgaaccaaacaatatctcaagcaaataacaacaagtacggtgatgacgaaaatttggtcgatagatcactgcaaccaagtcccgattgtagatttgccaaagatttctggaaaaatgtgaaggttggcgatatcgttcgtattcacaacaacgatgaaattcccgcggatttgatcttactatcgacttctgatgtagacggtgcttgttatgtggaaaccaagaatttggatggtgaaacgaatttaaaagttcgtcaatcactaaaaagtaccaaaagtatcaagagttcgagagatattgccaggacgaaattctgggtagaaagtgaagggcctcatgccaacttgtactcctaccaaggtaatgtcaaatggcaagatattcaaaacggtggtgtcaaaaatgagccggccaatatcaataatgtactgcttagaggttgttctttgagaaataccaagtgggttatgggtatagttatgtttactggtgatgacactaagatcatgataaacgctggtgttactccaactaaaaaatctagaatttcgagagagttgaactattctgttcttttaaatctcggaatgttattcatcttatgttttactactggtatcattaatggtgtttattatacgaagaaatctcaatcgagagtgttttttgaatttggtaccattggaggttctgcatccacaaatggttttatttcgttctgggttgcagttattctttaccaagttccaatctccttgtacatttctgtggaaataatcaagactgtgcaagctatattcatttacactgatgttcttttgtataatgccaaactagactatccgtgtacaccaaaatcgtggaacatctccgatgatttgggccaaatcgaatatattttctcagataagacggggacgttgacacagaatgttatggaattcaaaaaatgtacaatcaatggtgtatcctatggacgtgcttatacagaggccttggctgggttgagaaaaagacaaggtattgatgttgaatcagaaggtcatcatgaaaaggaggcaatagcaaaagaaagggaagtcatgattgatgaattaagatcgatgtgtgataattctcagttctctcctgatgaattaacttttgtctctaaggaaattgtagacgatttgaaaggaaccagtggtgatcatcaacaaaagtgttgtgaacatttcctgttagcgcttgcattatgccattctgttcttgtggaaccgaataaggacgatcccaagaaactggatattagggcgcaatcacctgatgaatcggctttagtgtccaccgccagacaactgggttacagtttcattggtaatgcgaagaagggatcaattgttgaaatccaaggtgttcaaaaggaatttcaagtattaaacattctcgaatttaactcatcaaggaaaagaatgagttgtattatcaaggtttctggtgccacatcgagcgatgaacctaaagcgctcttgatttgcaagggtgcggattcagttatctattcaagattgcaccgtactaaaaatgaccccacgctattagaaagaacggctctccatctagaagaatatgccacggaaggtctaagaactttgtgtttggcacagagagaactttcatggtccgaatatgaggaatgggtcaagacctacgatgttgcggctgcttctgtgactaacagagaagaagaattggataaggtcacggatgttattgaacgtgagcttatccttcttggtggtacggccattgaagatcgtttacaagatggtgttcccgattctattgctctgttggccgaagctggtatcaagttgtgggtcttaacgggtgataaagtagaaactgctattaacattgggttttcgtgtaatgttttgaataatgaaatggaactgctagtggtaaagactacgggagaagatgtggaggagtttggtagtgatcccacacaagtggtgaacagcctagtgacaaaatacttgagagagaaattcaacatgatcggctccgaagaggaattggcagaggccaaaaaggagcacggtttaccaaaaggagatttcgcagtcatcattgatggtgacgcattgaaggtggccttgaacggtgaagatatgagacgcaagtttttgttattatgtaagaattgcaaagccgtcttatgttgtagagtatcaccagcacaaaaggccgcggtggtcaagctggtcaagaatactttggatgtcatgaccttggccatcggtgatggttccaacgatgtggctatgatccagtctgcagatgtcggtgtaggtatcgccggtgaagaaggtagacaggctgtgatgtgttctgattatgccattgggcagttcaggtacgtgacaagattggtgttggtgcacggtaaatggtgttataagagattggcagagatgattccgcagtttttctacaagaatcttatctttttgatggcgttgttctggtatagtgttttcaataacttcgacgggtcgtatttgttcgagtacacgtatctgacattttacaatctggcatttacgtcagtaccggtcatcctactagccgtgtttgaccaagacgtctccgacaccgtgtcgatgctggtgccacaactgtaccgggtgggtattttaaggcaagaatggaaccaatggaagtttattttgtacatgcttgacggtgtgtaccagtccgcgatatgcttctttttcccctacctagtgtaccacaagaacatgatagtaaccaacaatgggctcggactagaccatcgttattacgtaggtgtgccggtcacggcaattgcagtcatatcctgcaacctttacattttcatggagcaacacagatgggactggttctgcggacttttcgtagcgttgtcggcccttgtgttctttggatggacagggatctggaccagtgcatcatcgagtaacgagtttttcaagggcgcggcccgaatcttcggacaacccacgttctgggcggttctctttgtcggcatactgttctgtctattgccaaggttcaccttcgactccttcaaaaagatcttctatccgagagatatagagatcatcagagaaatgtggcagcgcggtgatttcgatcgctacccagagggatacgaccccacggaccccagcaggcccagaatcgacggcgcactcgcatgcatggactttaaaaagtctatctcgctaggcgcccacctcgatgatggcattagccactcccaggaaaccattatcacagaggaaatccccatgagcatcctcgagggccaacagggcacactcaagggataccgcgtgtccacctcgatggaccgtggactgctcacacccaccacagcgcctatggacatgcccagacgatccatggccagcgcccgtggcagcaggcttagaacgtcgctggaccgtaccagagaggacatgctggccaatcgccagttggacacacgctactcagtagaacgtgcacgtgcctcgctagacttgccgggtatcacccacgcagagacattactcagccgccacagtcgcgaccagccgcgctag

SEQ ID NO: 2847 - DNA, 846 bp, Saccharomyces pastorianus
atgcccgatagcactgtgatagcttacttaggagccgggacgattgagattggaaggagcgatcttacacgcccacaagaaattactgcttggaaaagagagactattgataaggagaatgaacaagaactaagaaagatattcgaaagttattttcgaacaaacgactacttgaaaaaggaggaaatacacgttttagtactggaggatatatttatttccgtagcagaaaagagaattttttgtggcattatattagaagagctaggatgcgcttatgtgtctttcatccccagagtcctcatgtattgtctatcatatgatgttacgaatgcattagtcatagacgtaggtacaaattctactacatgtgtgcccatctttgaccttcgacctctgcaaaagtacattaggtattcaaaagggaataaaaggcgacatttactggctgatactccctccggcagcccgtacgcaacagcgttctttacaaaagaatatgacccaaaattttatgaagacgatgaagttcctgttataaatcttgcaaaatgcatcgtaaattcacttcctattgacttaaggaagcctttaagggaaaacatcattgtagtaaacgtcgaagaaaaatacaagacagtggtaaaagatttgttcaagaagcacatggatgaatctagtattcggttatctgatgattactggcgtggcgcttctatatacgcgcaaacaatcttgcatgctaaagaggaaaacgttgtaggagttggaaaagacgagtttcaaaataatcttcgtattgctccggattggtttgacttttactttaggaccggaatgaaatga

SEQ ID NO: 2848 - DNA, 3453 bp, Saccharomyces pastorianus
atgagcagtattaatgaaggtccctataactcgccaacgtttggaaaatcattatcattaaaagtagatggaggattcaacgccgtgtctatcaatccctctggtagggatgttgttctggccagccggcaaggtctttatattatcgatttggacgatccgtttacacctccaaggtggttacaccacattacaccatggcaagttgccgacgtgcaatggtcaccgcatcctgcgaaaccatattggattgtttcaacatcaaaccaaaaagcaatcatatggaatttagcaaaatcctcgtcgaacgcaattgagtttgtgctgcatggccactccagggcaatcacggatataaatttcaatccacagcatcccgatgttttggctacctgttcggttgacacgtatgtccatgcttgggatatgagaagtcctcataggcctttttattcgacaagttcgtggaggtctgctgcttcccaagttaaatggaactataaagatcctaatgtcctcgcatcatcacatggaaacgatatattcgtatgggatttaagaaaaggctccactccactatgctctttaaagggtcatgtaagttcagtgaatagtatagatttcaacaggttcaagtccacagaattaatgtcaagttcgaatgacggaacagtaaaattctgggactattcaaaaagtacaacagaatctaagagaacagtaacaactaattttccaatttggagaggacgctacctaccatttggagaaggttattgtatcatgccaatggttggaggcaataatgcagtgtatttggtaaacctatgcgacgacgatgacaatgaagaaaacaagaaaacaaaacttcagcccatatacgcattcaagggccacaatgatcgggtgattgactttctttggaggtcaaggcacacgtacaatggagattatgatgaccgtgaatttcaactggttacgtggtctaaggattgcgatttgaaactatggccaatgtctgacaatatttatgggaaggttaattttgatagaacaaaaagactcgaagaaaaactaccagactacgattactgttcgtacaataaggaatctgataatagagaaaatgttcaaaaaaatgaattcaagcgaatacgagaaaatttcataacgacttctggtttgaagaaaaataaggccaaccatattacttggctctcagggatcagaatgtataacgccaattcccaagaggatttattcaatgagactaaaattcaaaatctaggggaggaagtaagtgcaattggtcacaaattcccaaaagtggtatttgaaaagatttcagtctccacacgagaattatgtctgaccctcaatggcccttggtcagaggaaaatcctgatgaatatgttttcttgcgtataagcatcgacttttctcctaactatccaagcaaaggaaaccccccaaagtttataatagaggaaaatgcaaacctgacttcgagcaagaggcaagaaatactatccaatctggctactattggtcaaaaatataccgattcaaattattattgcttggaaccgtgcatacgttttgttttaggcgagaaggttagcttggatgatatcggagacggtcaggaacccttactaaattttgatattgctgatcatatagatttcgaagacttatcctccttagatagttcatattctgattcacaaaatttggagaacctttcttctcaatctgacacagaatcttacaaggaagcattggtattccctgacgcatcgaatccgggtttaaattttggaagaaacctagctttagatacaacaccggttccaaatggatgcggttcttgttggactgcaacagggcaacttttatgcttcttcgcaaacgacaaaaaacctgagaaaaagcaaaacaaaatagccaaattgtcccaaaaagacacagtattggaaaggcatccatttaaagtagaacctcaaattttttatgataaagaagccgatggtaatgaaaccactgctattgatgtaaaggctcgtcccaagcgttatgttgacacattgggtctaggaggcagcaataatggcgattcgagaacatattcagaagatgaatcatcttctgatgattcgtttgacagtgttgccgatgattgggatgatatattaagaaacgatataatagtaagaactaaaattccaattctaagaggtaacttcagagctttcagttcagtgcattctgaatctgggaaaacagtagaatctactaagaaaaataagaacgtgatagtttctaaagactttagtagtttactaagtgaccgcaaggaactagcattagaatacctattcatggatgttacgccagaagaattcgctagaaataacgccttagtggcagaaaagtatgagcttgacgaaattagccattgctggcaaattttatctgatatgctgatagatcaaaatgattgcgacccctataatacaatctggaataaccatcctatggggataaaatggtttataaaagaagcaatcatttattttgaaagacaacaaaacttacaaatgctagctatgttatgctgtgtgatcttgagcgcaagaaagagagtgaactcaacatataatgccgacggatattatgggcaagacttagataacacggaaggtatgattgtgtttaatgacaatgaaagccaaaacacatcgttctggaagggatcagacactttttcaaccagatctagaagtagcactgtaacaccaaattcttatgcttctcatttgagaggaaaaaacgtttacgcaggtgacaatgcttccataaggtctgatgattaccatgctcggctaaaatcgcataatacattaagtggtagcaacagattttccgagccagctcagaaacaaaatactcgtgcaaccccgtccggcgcctttcgcaataaaatgcctgatattaaggtcgagctcttacatgacgatatcatagacgcttatgaacaggaggatttcttgcacttggagccatcagacataccaaaatttcaaacttatatttaccagtattcaaaacttctttttagatgggaactacccttagaaagggttaaaatattaaaagtgagcacagactttaaaagttcttatagtactcctggaagtgtctctaccaataatgaaaacagtccttataatagaatacttactcattggatcgaaaacgagaagcttggagaggaaaagtttatcgctcgaaattgtaactattgtaatttgagagtgacaaggagtagttttatatgtggcaattgtcaacatgttttacattccgcgtgtgcgagaacatggtgggagattggcgacgaatgtccatctggatgtggatgtaattgtccagatatgtttgatgcctaa

SEQ ID NO: 2849 - DNA, 1665 bp, Saccharomyces pastorianus
atgtttgataaattaccatacgaaatttttgaacaaattgcctgcaaaatcatccaagaagataaaatctcggtagcatacgtgtctaaaagatcgtacaaaagaattgtaccttttatttaccggaacttattccttaacgaaacgtatcatgtcaagggtgattacaataactcatttggaacttgttattggtctgtcctgacctttccctttattaatgaagatgatacaaatattgaaaaccagacaccaaataaagagttagctaaaagaaaattcggttatttggtaaggtcactagcagaatctccgagtagattgtgtccgctgatcaatcgaatacgttgtacgtggcacctggatgaagatgtcatgtcagatttattgaaattactatcaaggtatggttccaatgtgaaatttgtcgaccaatttgttcgtcaatcagtaaatgacgggctagaacctttgtcaaaccaattaaagactctaactctaacaccaccaactattttaccaactcatggtagtgtatacagttcttatttagatcggattgaccatttgtacctgaaatgtgatctaactcaacttgaaaagctatctattcacgtcaatgcactgaaatattttaaaggcttaaaagctccaatgaaaatcaagtccttagtattgaatctgcgacctgacacacttaaccttccaaaatacgatgacataagtggaaatgttaaagagatacaatacagcgatatttttgatacttctgctctaaaacagctagaaatcttgtcttggtacagtcgtgatgatatccccaccgcgaatgaaggtggtcctgatagcttatacgtcaaatggggcctaagaggattctggaaatttttcaagcttgagaatctatcattagcatcattagtctacaatgaaaactttttaaagggttgtctggcagcttttcatgatttaaagaggttaaaacttgactatatgggccaatttgaatttgacgtatcgttgattagatttttatctaagcaaaaatgtggcaaaaagctacagcgtttggatatacattgtgaactgaatcaccaactctttttcccaacgacagataatccactaatgcgtttgaactttgacaacttctgtccttgttcgaggtgcaaagacaccattcatgaagtgattcttaagaaaatatttccggaaacgcgacagaaactcataaaaagctcaagcaagttccaggctcgtaacttcctatatcatatgtttttccaatacaaaattatgccatacacaaatattattgacgaaactcctgcgatggggtgggattgtgtcccgattgagacatttgtacgaaacttcaacagaaatttacaagaaaccatcaagattgagaaaacatcatcgaataacattactagagaagatgccattcggttgtatcacttatatcttcattatctaaaagatgtattcaacgtcttcgagcaaagtctgcccgacttagaatacttaacaattaacggtatacctaccaaaatcgtacaagtagacgagttacaaagctgcgcggtacctctattctataatgaaggttataagagtaattctgtctacgaattggtagatagtgactcactctttatgtag

SEQ ID NO: 2850 - DNA, 1863 bp, Saccharomyces pastorianus
atgagcgaaagcaaccaaggacaagatagaagcacgaatttatcaccaaataacatcggaaatggtggtgattcaaatggtaacggtttgccgccgaacacaaatgcggcctccactccactaaataatggaaccgaacaaacgagaaatataaccgtctccattcagtattcatattttactccagaaagattagcacaattgagcaatacgtctaacaatgaaaatagtggaagcagtaccacaacttcttcaaacacaatttctaatggtgcggggcccagctttggcattgggaacggtggtcaccaacccgacggtgctcttgttctctcttttcgagacgttcctgcatctactccacaagaccgtttgaacagctttatatctgttgccgctcaacttgcaatggaaagattcaatagacttttaaatagaccaaaaggtataacaaaagaagaatttgataagttgcctgttttgaaggtagctgatctgccggaaacggaaggacctgcgtgtagtatatgttatgaagaatatgaggaagaagacaaaatctccaaaaccaaaagaaaaagggaatctaaagataatgaggaggaatctggaaacattaaaaaacagaaagataaccaaggtggttcttttgtaggtagaaccggtactgctgacgaaagtacagctatttcggataacggttcaaactcaaatgcagcaacaatcaactcctcttcaactccgcttgaacctaaccagcctcacacagccaatgatgaggaaacaaacccaagctataaacattcgccaattaggttaccttgtgggcatgtttttggaagagagtgtctttacaagtggtcgaggttagaaaactcttgtcctctttgtagacataagatcagcgagtctgcaggggttccggtccaacaggacacagatgaagtagcggctaatgaggccgccttcgaaagaattagacgtgttctatacgaccctgctgcagagagtaacaatgatggaaccaataccgaaaccacaaacccaacagtaaatccgtccaatacaactgcacccactattggaaacgcaaattctggtgaacagattttatcaaggacaggttttttcttaatgccacaaaacggccaaactttacataatccagttcatgtgccatctaataatagtgatagaaacatatccaacgggacaaactcggcagctccaaatttaccttctaatgctaccgctcttaataacaaccaaaatccacgttgggttccgattcctctcaccttatttcaattccacagcccaaaccccagtgaccacccaacagactctacaacaaccagttccgcggacgcaaacgatacaggtgctgatgccaccagttctcagcataatagactaagagccgttttggatcacatatttaatgtagcccaaggaggatcatcagactcttcagacacagccgcttccaccactcaaacgagccaaaatcagggaaccaacggcacaacatcttctggtgcgcctcacggaagttctttcttggaaaacatctcacgcttaactgggcatttcagaaatagctcaagcgacaatcatagtagcactaacaacagaagtggccaagaagaacatgccgctacttccagcgacgatagaagtaacctgttttcctctggtgttgcaagttataggaatcagaatggtgatgttactaccgttgaactgaacgatagtagtgcttctacaaacggaaatccatctcaagaccaagaatcaaatagttcaaatacaactacccaaaacaacgcccctaatgataacaatgagcaacgttcaacttaa

SEQ ID NO: 2851 - DNA, 1611 bp, Saccharomyces pastorianus
atgtatagcaattattcacttgcgagcaacgacgcaatgacccgagcttacctggttggcacagcctcacccaaaagatccaagaaaaagcaccagcaagcaaggtatagcaaatcgccaaaaagggcgacccatctcatcaatgctgataatatttcagtactcgagtataagaatgaattgtcgacaatttcctctaatggagatgatgacatggcttcaggctcgtggaattcacaagctcctaacgattttatcaaattagcatacgtaaacgcaaagctagacccatcattatcatcagaatattttaagcaagacattataaacatcctccagagtttagaaatccatgggtggtccattaacgagcctggatcttcgttgaacagagatttattaactttgacgaagatcaaaggtgctctaacaaacgtcatttataagatccattatccaaacttgccccctttattgatgaggatatttggtgacaacgtggattctgttattgatagagagtatgagttgaagattatttcaagattgtcattttataacttaggtcctaagttagaaggatatttccaaaatggtagatttgaaaaatatattgaaggctcaagaacatcaacacaagctgactttatagaccgggatacttcaatgaaaattgctagaaagtttaaagaattacattgtaccattcctctaacacctaccgagagatctgatgaaccatcgtgttggaagacctttgatcaatggatcaagttgatagatacacataaagaatgggtcagtgataaagagagtataattgaaaatctacgttgttcaagttgggaattttttttaaagagttttaaaagttataaacattggttatataatgattccacctttacatcgaaactattaagaggagacgataaagattgtatgataaatactggcttaaagatggtattctgtcataacgacttacagcatggaaacctactatttaccaacaaggacggtgacaaggtctcgatgaatgatctaacaattatagattttgagtacgcaagcgctaaccccgttgtttttgatttatcaaaccatttgaatgagtggatgcaagattataatgatatacattcgttcaaatctcatgttgataagtacccaaagcaagatgatattttagttttcgcccagaattatataaaccacatgaatgatgaacatgtggaaattgattcacaagctgttaagaccctctataacctcatcatagagtggagaccttgtgcacaactattttggtgtctttgggctctcttgcaaagcggtaagctttcccctcaaccaccaataaaagacaagcatttgatccacgaaaaaaaagtaccgtaccgtgaatcttgtattgttacaggtgataatgacgaagttaaagaagacggtagttacgatgattgccaagatgactcgtttaactatttagggttttgtaaagaaaagatgtctgttttttggggcgacttaattacgatggggattatcagcaaagactgtgcagatgtaggaaagactgactacttagatacaaagtttctgctttag

SEQ ID NO: 2852 - DNA, 891 bp, Saccharomyces pastorianus
atgaacacaaatcagtccaatttgaacacagatttatccgatgataccaatatagaacacacgttgcaccgactgcttacccaggcaaacaatcattttgacgatacagtgaagattgatgggcacagtttggacttaggaaaagacttggaacaagttatgatggatactttggactgtaccgatatcttcgattccgatatagtctcagaaaagcatttgacattagattctctgtttcacgatgaacacaacaccgactctagcactgtcttgaatattcaaaagagcgctaatgatagcctggttgcaatagaccttgacgggcacaatcacaataatgattttattgacaagtcatcgttacacgaaaatacacatcaaaactccttacacaaagctgatagagaggccaagaaatataagatagataaaaatgttaccaagaaaaaaaagagtgtattaaacatcacaaatgaacccatgttatcgcctgcatccatatcaccttcaccttctttagcttcatccgataccaatgagtctcacttaaagatagaatctatgataactaatataacatctaaaatagattccgcaagacaagatatcgtatctgcaaccaagcctgccaaacttacaaatgagtttacaatgaaccaaatatcggaaatgaaagcaaggataattaatacgcataaattgttgctaaatttcaatttcattaaggaaggttacgccagatcttgtattcagctgaaaaagaccatggattccttaaaggatagtgaaattcatagggcacatttattagtcgaaaacgatgatttaaagcaacaagtctttgaacttactcaaaaactcaatgaaagacaacccaaagaaatctaa

SEQ ID NO: 2853 - DNA, 1647 bp, Saccharomyces pastorianus
atgtcagcacctgttcctcaattagtaaatatttctcatgccttgcaagcttccactatccagcaaattcgtttggatatggtagattttaataaagattgcaaactatcttcagttcaattggcaagaattgacaaatataccgactccttgcaagcagctttaaatcaattcaccagagacaacttgcacatcgaacggaaagatgaggatgtgactgctgcagatgttcaattatattccggcttaaaatcaatgtatttagactatttgaaccaattaataaaactaaaacaagacaaacaacaccactccgcaccccccattgccaatgatgtctcgctagacttcttcgttaaccaactacccaaatttcctatcgaggaaagaaaaaactatatcgataacttaatcctgaataaaaattgtcataatcaattatctaaaatggatgggttggtggatgctgttattaacctatgtgtcttggataatcccgttagtgaaaacgtacgatcttatatgaaactattggatacactgggttttcaaaagggtccaaacagcactaatgcaaaggcaaagctaaaaaagaaactaaccagttccaaagcaaaagtaaaagattcagaaaaggaaaaggaaaaggaaaaggaaatggacaaggacaaggataaggacaaggataagttgaaagctaaagtaagaacaaaactaaaaccttctcccctatttaataatgacggtaatacttcatattcatcatcgctaccttctgcatctgggtcttcggcaaagaaactgaagtcaggcttattcaataaaagtgaagccaaatcttcgacggacgctgtaaccgcttcttcttctaagaaaaaactatcattttctaaatatctgaataaagatgacacagataccactaaatctgggaccaaacggtcactagagttagatttcaaagttaatcccgaagtgccaacaacatctaccaatattgcatcatcgccgtcatcttcatcgtcattaaccacaacgggaggatatcctgtttcttctgaagaacccttgaagaagaaaataaaacagtcagtacaagaccccaatataaggtcaattctgagaaatggtaaatcaaagaaaacgcgtgtaagtagtattaaatttttggatgaccctcgactaataaaagtttatggtgatgacctaccgaatcacgggctacaagtttcgccagtacaactgaaaaaaatcctaaagccattcaaagaaggcgaaccaaaggaagttatactgtttgaagatatgtcaatcaagctacagcctttagagttgaattttttgaaaagcacagataatgaagactacatggatatatccgaaactaaaggtggaccaattcactgtgaaaccagaactccattaatctatagaaacaacttcaaccaattcagttcagaattaaataagagaccgccaagagagccaatagattttgatttgaatgggaacacaaattcaaacccgatcattgcaaaggcatttggtaaaaatagtctattattaaggaaggacagaggcggtttaccatacaagcatgtccccattgtaaaaagaaataagtaccctccaagacctgtacgctaa

SEQ ID NO: 2854 - DNA, 717 bp, Saccharomyces pastorianus
atgctagtagtggggttaacaggtggaattgcttgtggtaaaagcacagtgtcaaggagactaagagataaatacaaattaccgattgtagatgcggacaagattgctaggcaagtagtcgagccaggccaaaacgcatatgatcagattgtatcattctttaaagaaaaaatacctgatttattattagaggatgggcatttgaatcgcgcagccctggggaagtgggtcttcagccatgaggaggacttgaaagccttgaacggtgtaacacatccagctataaggcatgcaatgtttagggagattggatactactacctgaaaggatatagaatgtgcgtgttagacgtaccgctcctattcgaaggtaacctggattctatgtgtggagttactgtaagcgtagtttgtaaacaagaactgcaattagaaagattactgattaggaatccagaactcagtgaagaagatgcgaaaaacaggcttcgtaatcaaatgagtacggaggagaaaatggctaggtcagattatattctgcaaaatgacaccacattggtcgatttatacgaacaaatagaaagcgtcatcaaaaggattcaaccaagtaaattgagaactattttggagtacttcccacctttcggtattgcaagtgctagtagtatcattatgtccagattgctgatgaaaaagcttcagagtaagaagacctaa

SEQ ID NO: 2855 - DNA, 1437 bp, Saccharomyces pastorianus
atggatgtaaagatttgtgcactattagcgtggctgaaaaaatctgatagtttttatatagcacccaatatcaaaatcaatgattcaccagaatcgggtagaggaattgtcctaagccatcattccataaaaaaaaatgatattattatttcaataccaagctcaaaacaactaaacttccacacaatactgtatcatatttcaaaatttaacaatgatctcaatatttccggcgtcacaattgatagagacctggccgatcaagagaagaacagtgtcggcgtcggaagcagaggcccaattgatccgaggtttgagttatattctcagttgtcaaaagaatatctgctaaatttatcatcatttcaactggtatcgttatatatattggtggaaagatatctgatacccaaatggacgcacaatagaataatttcatattggaaaccgttttttgagatatggcccaccaaagaagagctgcgatccataccagctatatggaactgtgatcccaattctcagaaccgctcactgatagaatatctaccgatggctgcacgaaaccatatgactagaatcagcaaacttgtcagggaagattgggatgccatttccgaggttgttttcgaatggaatgaaatgtacggctctatactgggagttgaaaacgcaccgatctataccaatgatgaattattttccttgtttctacataattactttactataaattcaagatgcctctatgctgaaattccagtgaaaagaaatgaccgcttgagcaattttactatggtaccgtatgttgattttctcaatcacacttgcgaggtagatttgcattgctatcctcagttggatactttattaaagtcggaagcaaacgagaatattggcattgggcaatttagcattagatgcggcgagcgtctgtacaacaatatcaatgaggagctctttttgaattatggtgcacattctaacgactttttattaagtgagtatgggttcgtagtgaatgaaaatgagtggaactacctagacatctcgaacgatgttatcgaattgataaacgatgataaaatggaagtccaaacatttctatcaaaacacgattattggggcgactatacaatcaacaagaatgaaatcagctataggataatagtggcattaagctattacgtaactagagatgaaaggagggttcagaaatttactgaaggctatatatcagaggactactttaaaccaaaaattactccagttttgcaaatgttattaacttctttagttgcgacttatacaaagactctaaatcaactagaaaaaaaagcaaataccgctgaagataagctgtgtttacagaacataatcaccatttacaaaggttatataagaattcttacacatcatttaaataaccatgattaa

SEQ ID NO: 2856 - DNA, 1251 bp, Saccharomyces pastorianus
atgaaggattattcagtgccggaaaaccattctctgaatagagatgaactaagacgtcgtaaagggtacaaaaagggcctacagttatcaattttactgctgggagaaaaagggagcggtaagctaacatttctcaataacctgtgcggccaagatgtatcgctgtcagatgttgacgatagtgatatagctaaagatgcggccataaaaaacggccattcaatagaagatacgaattccgagtacaagacggcccatctaagtcctgggttaaaactcgtaactaaaagagtttacttaaatgatgaactcggagtgccgattaccttagatgttatcttattccccgggtgtggtgacaacgtcgacaattcgcaaagttcgactgtaattaaaaagtacctagaacagcaattcgaaaatgttttaaaagaagaagtcagaataatgagaaacacaaaagatactgatggcagacctcatgtttgtctatattttctcaagagcactccaaggggagtcaaaaaatttgatatcgaactaatgaaaacgatttgtgataaagtcaatttgattcctataattccaaaggcagacggtcttacagaaacggaattagccttacacaaagacatagtacgtcaggaaatcttaagaaatgatatacttgtttttgatttcaagaatgataatttgggagaaacgctgactctttatgatatggatattgatagtgatacaaaaatatcaaattactctcctaccaccaaaattaaggacatttcaccgttttcaattgtttgtagtaataccgtacatacaaacacagaaaatggtgtaaagcatataagagaatatgaatggggtagtttggttgttgaggaccaaaatacctccgattttatatacctgaaggcaatattgttagggtcacaccttcaagaattaaaagatgtgacaaacaacgtcttatatgaacgttacagggccgatgtgttaactgagaagaatatccattatgatattcctagttctagttgcatcgatgagggttctcgaggaagtattagcaatgtttccactagaagaagcaccccaagtaagacactcgggaacttgggtatgagtgatgagaacacttataacatatacaaagagatagacgaaaagaataaaataattgaaaactaccaaaaaaagattgattcactcgagaaaatgctaacaagtcccagcaagaacagagcctaa

SEQ ID NO: 2857 - DNA, 1635 bp, Saccharomyces pastorianus
atggacaagtatacggctctaattaacgatgggaagttttcaactcttacattgaatgtctcgagatatcctaaaagtctggtatattgggaaaagttattgaatcatataataaacacttccacaccaatatgcaaatccatcgaacctcaactgttagagctaataagatatacatattcttccatgctaaatgaatttccctacttggagaactactacattgatttcgcactactagaatacaagttggggaacgtttccagatctcataagatatttcaacatggattacaagcatttaaccagagatctttattattgtggatatcatacctaaagttctgcaacaacgttgtcttgaaccaaaagcaattattcaagaaatacgaaatggctgaagagttcattggtttgcattttttcagtggagaattttgggatttatatctggaacaaatccaattgagatgtgtatcctccaagagatattggagcgtcctaagaaaaatacttgagattccgttacactcctttgccaaattttatgcattatggttatatcaagtagatgatataacggatctgaaacaactatcgcaactgacaagtgaagacgaattatccaagaaactgaagataaacatcaagtatagcggaaggaaaggtccgtatttacaagaggcaaagaagaaactaaaaaagataaccaaagaaatgtatatggtagttcaataccaagtgcttgaaatttactccatttttgaatcgaatatttattccaactattacacatcatcagaaactttggtctcttcggatgaaatagaagcatggataaaatacctcgattacacaatcaatttccaaactgattctttaacacatttgaatttccaaagggctttactccccttggcccattacgatattatatggataaaatactgtcagtggttaattactgcaaaaaatgaccttgtgggggccaaaaacgttttattaacaggattgaaattttcgttgaaaaagacgaagataataaacctgctgtattcagtcctctgtaaattaaacgattacgagcttttgcgaaccctttttgaaaaaatcgaatcctcgtattctgaaaatattgaaaatgttgatgattttgaaatattctgggattatctccaattcagaatattttaccaaaattccgtgtctccaagtcgatattctgattcacaattaagtggacttttgaataaagagctatttgacaaagtttggaagcgtttgagtctcaaagaaaagaaaacgggacaagaaatcctgttgaatagcttgatacagttttattcaaaggacacaatagagtttgtagaaaaaaatgtgtttagaaagatattggcatccaattgggagtactatttacaaaacggtattttttggtcctgctattgccgcttaatttattttgatacttcgagatcgtatttagagaaaagacagtatattgtcaagacaatctggccccagatagataagaaattagcccagaatgtcttaccgtcgttaacggaattctgccagtcctactttccagaagaactggatacactggaggaaatatttaccgaaaaagcttga

SEQ ID NO: 2858 - DNA, 1371 bp, Saccharomyces pastorianus
atgaagttcgaagattgccgaattaacagctatctgataacttcgcaaattggcgaaggcgcgtatggtctggtttaccatgcaatagatattcacacccacaaagaatacgccataaaggccgttgttcaaagttctagtgctagccgtgacgtggatgtcgatggtggcggaacattcgagaagagcgccagattgcaaggaagactcgctagactctttaaagagtcaaataacattgttagactaccttccatagatctggagtcgattgaaaatatgtcggaagaaaacttccggaaactaccccactataaagagatttgtctgcatttaaaggtccatcaccacaagaatattgttactatttacgaggtcctgcaatcttcaatctgtacgttcatcgtcatggactactaccccaccgacctgtttacatccattgtagacaacaaacatttcaccaccaacggtttactagttaaaaaagttttcttgcagatctgttctgctatcaactactgccatgagcacggtgtctaccattgtgatgtcaagcctgaaaacctactactggatgccgaggacaatgtctttctttgtgattttggcctgtccaccacttccacttacatagagccaaacgtttgcattggtagttcgtactacatgccgcctgaaaggatctcatttgatagcgggaaatatcccggccctaaggtcaggggccataaattgaaaaaaaactgcccttcatgtaacggtgatttatggtcgttaggcatcatcctcattaatttgacttgtattagaaacccttggttgaaagccgacaaaaaggaggacaacacgttttactatttcaccaaggacgtcactgtcttgaaacaaatattgcctctttctgatgcccttttcttactactgtccaagattttacaattggatccgaaaaaaagaatgagtctgcaaaggatgatgaaagaagtcagttcaattacgagctttaccaatggcgggcctctgtcaaaagtaccccctctccctaggtccatctacgaaaaattcactgaccctgtcgataccaccaaaaagaatccatcgttcaaacaatacacgcatacggacgagaaaccattctattcctcgtcaaccgacgaaattgaccaagttaaagaacaagaacaagaagacagcgacagtgggagtgggagttttggaactttggatacagatactgggttccactcttcattcacaaacacatcgtgtgactccgataacgacctcaccaagcttcccaataagatgtctttgttcgaaaaaaaatttaatgagcttcatatgaatgcctcttccttgacgaactag

SEQ ID NO: 2859 - DNA, 450 bp, Saccharomyces pastorianus
atgcctgtagatcaagaaaaattagcgaaacttcaaaaattgtcagcaaccaacaaagttggtggtactaggaggaaaataaataagaaaggtaatctatttagcaataacgacaaagatgatagcagattacaaacggaaatacacaaactacatccgttgactattgaaaatgttgccgaagcaaacttcttcagaaaaaatgggaaggttttacattttagcaataccgttgttgaaattgcgcctcaatgtaatgttacaatgattcatggccaaccaaaagagaatacaattaatgggttgtaccctagtatagcctctcagttaggtagccaagagcttgattatctaacagatctagctcacaagctagaaaatgagcagacaaatctcgaccaattagttgacaatggtaccgaaacaaatgggcaaacgacaaatggttag

SEQ ID NO: 2860 - DNA, 1140 bp, Saccharomyces pastorianus
atgcaaaaccctccactgatccgtcctgatatgcatgctcagggaaataattcaatgagcgcgtgcagcacctctgacaaaggcgtaaatgaacaatcgtctcctcatactgtgcagtcaagcgtagcccaaaaattccctcataaattgaatcatactactaataacaatgacaccgatgtctctgccgtcaataatcctactcagaccccgttaccaaacctgttgcatttacctggtccaccggactacagatcaatgcaccagaaccccatacatccatcttacgttatccctccgcattcaaacgaagggaaacaatcagcttcttataacaaaccctcaaatgcccatgtaaatatgcaatcatccatggtgtttccaccaaagaattatcctgtaacctacccacatcatcaaataaatcctcccttaccaaatggacttccaaacaagaatataaattcaaacaaagactatattattgaaggtcaaccatcgtatttccaatcgcgtaatactagtattacatctgtaccccttcattttgaaaacagtgctgctagcgctactaacctagctgctagtactagcgtaagcgaaccccttgtagataaagaagtaccgccggcaggtagttcaggaaagactttgagaaatacaagaagggctgctcaaaacagaactgctcaaaaggcatttagacaaaggaaggaaaagtacatcaaaactttagagcagaaatcaaagatattcgatgatctgctagcagaaaacaattacttcaaatcattgaatgacacgttgagaaatgataataatattttaatatcccaacacgaagctataaggaatgcaatcacaatgttaaggggtgaatatgacgccttgtttaatgaaaataatatgttgaagaatgaaaataacatcgtaaaaaatgaacataatatgtcaagaaatgaaaacgaaaatctgaaaattgaaaataaacgttttcatgctgaatacatacgaatgattgaagacattgaaattacgagaagaagggaacaggatcaacgaaatgaaagagagcacctgattaaaaaaattagatcgttagaggaaacagttaaaaatcagcccagtaaaggcccgtga

SEQ ID NO: 2861 - DNA, 831 bp, Saccharomyces pastorianus
atgttcaacctaccgattagcatattgctttatttttctgtgttatgcgcagtggagcctacttttgtaagaggcaaaaatgttgtcagcttaattgcctttaaggattcagatggcaaactacataaaaggttagcacctgaagaaatccctcgccgggaacgtggtcatcacctaggttttgacgagttagaatatatgtatgaaaaaaatctgggagcgcgcgactcttcaagattatcgataaacctggacaatgttttgggaacacaacaaacaaagcaacaggaattttcagctgacttatttcctttatccttggaatcaaaactctcattattaaaggaagtcgaaatatttgcaggatatgtaagaaatgatgtggaaactttcaataaaatcagtaatcctaatgaagatttaataattattgcaccaacgaataaggctgtttcccagcttacttcgaaaccatggcaatttccgaataatattgaccagcttgaaaggaagggagcgacagaaaaggaactagatgccgcaattcaaaacaatatctccaagtttgttaggtcacatatcatcgcatacaacggtgataaaaattcctacagaataataagtccaggttgtacgctattgcagagtatcgactttatggaaaatcggaaaagcgatggagagctttttggtgatattttagtcaaaaaagatggcgacgcatattatgtggcatctacgcgagacaagaactttcacgttgtcgagaatattgaaagtggaagtaacggtatcattttgacggttgatttttctttagtttggccttga

SEQ ID NO: 2862 - DNA, 993 bp, Saccharomyces pastorianus
atgtcatctattaatttaatcaaatctctaaaactttacaaggacaagatatggtctttggatttttctcaaggtatattggctacaggttcaactgaccggaagatcaagctggttaatgtgaaaaacgatgattttgcgttaattgatgtgctagatgacactgctcacaagaaagcaatcagatctgtggcgtggagaccccacacttcgctgttagcggcgggctcctttgattctacggtctccatctgggctagagaagagactgctgacagatcgtttgaaatggacttattagccatcatcgaaggccacgaaaatgaagtaaaaggtgttgcttggtctaacgatggatattatctggcaacttgttccagagacaaaagcgtatggatatgggaaactgatgaaaatggggaagagtatgaatgtattagtgttttgcaagaacattcgcaggacgttaaacatgtcatatggcatccctctgaagcactactggcttctagttcatatgatgacactgttaggatatggaaggattacgatgatgattgggaatgcgctgctgttttgaatggtcatgaaggtaccgtttggtcttcagattttgacaagactgaaggcgtgcttagattatgtagcggaagtgacgattccactgtacgggtatggaaatacataggtgacgatgaagatgaccaacaagaatgggtttgtgaagctattctcccggatgtacacaaaagacaagtttatagcgttgcatggggctccaatggcctaattgccagcgcaggcgcggacggagtactagccatctacgaagaggtggacggagaatggagagtccttgctaggcacgaattagcccatggtgtctacgaagtcaacgttgtgaaatggctggagttgaatggtaagactatacttgcaacgggtggcgatgacggaatcgtgaacttctggtccttagaaaagctaacataa

SEQ ID NO: 2863 - DNA, 918 bp, Saccharomyces pastorianus
atggctaaagacattgaattatctgaatccgaatccaaattcatcttagaggccttaagacaaaactataggttggatggccgttcctttgaccaattccgtgatgtgaaaataaaatttggcaaagagtatggtgatgtcagcgtggaaatgggcaacaccaaagttcattgcagaattagctgtcaaattgcacaaccatatgaagataggccatttgaggggctgtttgtaatatctactgaaatatctccaatagctggttctcaatttgaaaatagaaatatcaccggggaggatgaagttctatgttcaagaataattgaaaaatctgtcagacggtcaggggcactagatgtggaaggactgtgtattgtggccggtagcaaatgttgggcagtgagagcagatgtacactttctggattgcgatggtgggttcattgatgcttcatgtattgctgtgatgacaggactaatgcatttcaagaaaccagatataacggtccatggtgaacagattatcgttcatcccgttaacgaaagagaaccagttccactgggcatactgcatatccctatttgtgtcactttttcgttctttaacccccaagatactgaagaaaatataaaaggtgcaacgaactcagaaatttcgatcatcgatgcaacattaaaggaagaattactgcgagacggtgttttaactgtcactttaaacaaaaatcgtgaagtagtacaagtttctaaggctggtggtttaccgatggatgcgttgatgttaatgaaatgttgccataaagcgtatgccatcattgagaagataactgaccaaatactgcagcttctaaaggatgactccaaagaaagaaataaatacgccgcgatgctcacatctgaaaatgcacgtgaaagttaa

SEQ ID NO: 2864 - DNA, 309 bp, Saccharomyces pastorianus
atggatacatcgaaaagctctgaagtactgaaaatggaacaacaggagaaagaaactctaccagtaaaactagttacaagccgaggggaggaggagaaggtcaagtctggtgattatatgatagatttagaagcaggtcttctaccgcacgaagttagtgagaagggtagcactttcaagcaatatcgtgatgcctttgtaggatttattgaggaactcgtcatcattgttgttatcgtattactgctgtattttttgaccatgattggtctcttctatgtgatggcgatgacaaaagttctgttttaa

SEQ ID NO: 2865 - DNA, 876 bp, Saccharomyces pastorianus
atgaacataaataggctttcctttatgaggacgccctttaacatagcgcctaagtggagagtggaggacgttttgcttctcatcattatggtggtattaaactaccccatatattaccaggaaccgttccagcgccaattttacatcaatgacctcaccattgcacatccttatgcaacaactcagcgtgtcaatgattttatgctttttgtttatagtttcgttgtgccttttttgactatactgattgtaggttccattttgggcgatagaaggcatttggtctttattctatacacgtctcttttgggtttatttctcgcctggtttagcaccagtttcctcacaaacttcatcaagaattggataggaaggctgagaccagattttctagctcgttgtgaacctcaagaagacctaccgttcgacaccttatttaccgcaatagaagtgtgtactacgaaaaaccacgaacgtttattggatgggttcagaacaactccgtcaggacactcaagtgagagttttgcaggattaggatatttgtatttttggctatgtggtcaacttttaactgaatccccagtagtacccatatggaggaaaatggtagcctttatacctttgttaggagcttcgcttatcgctctttctagaactcaggactacagacaccatttcgttgacgtccttttgggatccatactgggctatgtgatggggcatttcttttatagaagaacctttccggccattgatgatcccctctccttcaagccattgatggatgattcagatgtcacactggaagaaacgattaaccatcaaagaatttcagacgaggagctacaccctttgtctgatgacggtctttaa

SEQ ID NO: 2866 - DNA, 351 bp, Saccharomyces pastorianus
atgtcgagaatgaaagagcttttccgttctatgcacacctctaggatactattgcaagatgcaaaggtaaaactgacatttttctcaaaacccagttgtgggttgtgcgagcaagcaaaggaagtgatagatgatgtgtttgaaaaagaagagtttcataataagggaattcagttcgaggtaataaatatcaatgaccgaaaaaatgcaaaatggtggaaggaatactgctttgatataccagtacttcatattgaaaaactgggcgaccctagatcgtgtacgaagattttacactttctggaagaagacgacgtcagtgaaaagatacgaaaacagcagtcaagctga

SEQ ID NO: 2867 - DNA, 3234 bp, Saccharomyces pastorianus
atgcagcaggaaccgcctaataagaaggctaagttggtgcatgagggaaccaaaaaaagtgatgatttcaagaactttgaacagttttttttccgcctcaatacactttacacatttctaatttgcagaaagcatgttgtacctaccttcaagacgctttgtgatcctataggagctgccttgaagagagccattacgaaagaagatctagctagggtgatggctcttatgccaagggactgtgttttcaagtacatcgacgagaaccagatttataccgaaactaaaatctttgattttaataatgggggtttccaacagaaggagaatgatatatttgagctgaaggacgcggaagatcaatatgaacgtggaagatccactcagctacttatattcgagtttatagatgggacgatgcaacgttcttggtcggcaagtgataaattctctcaggtaaagatacccacctatacaacggaggaaatgaaaaaaatgatttcgaagagggaagtcctctttgaatcgagattacaggagttcatccttgagaatgaaaagcttgggcttgatccattcttcgagttgacgaaactggcgcaaaagtatattccaaaggaaagagattatgaggatcctattgaggcaatgatgaaagctaagcaagaaggtgctgagatggttatccccgatgattctggtaatccgggtatagctacaatccctcaaatgattgaaaagttgaagcatactgaattctacgcttctcagataaaacactgctttacgataccatcaagaatagctgcgtataaagacctcagttttgaactcgcaccagaagtgtatcagggattggagcacaaccgcttctatagtcatcaagcagatgccataaatgcccttcaccgaggcgaaaatgttattattacaacttcaacgtcttcaggtaagtctctaatctatcaattagcagccatcgatcttttgttaaaggactcagaatcaacgtttatgtatatatttccaacaaaggctttagcccaagaccaaaagagagctttcaaggtaatactttcgaagattcccgagttaaaaaatattgtggttgacacatatgatggggacacagagtcaagcgagagagtctatattcggaaaaatgccagagttattttcactaatcctgacatgatacatactagtgttttaccaaatcatgccaattggagacactttttgtatcatctcaagctggtggtggtcgatgaattgcacatatataagggtttgtttggatctcatgtagcactagtaatgagacgcttgctaagattgtgccattttttttatgaaaacactaacttgcaatttatttcttgttcagctaccttaaagtccccgattcagcatatgaaagatatgtttggcattaacgaagttactttgatacatgaagacggatcacccacaggtgccaaacacctagtagtgtggaaccctccaaccctatctcaacatgaacgtaaacgagaaagttttattcgagagagtgctaagattttagttcaattagtattaaacaatgttagggccatagcgttttgttatgtccgtcgtgtctgtgagctattaatgaaggaagtgcgtagtatttttactgaaattggacgagaggatttaatcacagaagtcatgtcatatagaggtggttattccgcttccgataggcgtaagatagaacgtgaaatgttccacggaaacttgaaagccgtcatatctacgaatgctttagaacttggtattgatattggtggtcttgacgcagtcttaatgtgtggttttccactatctatggctaactttcatcaacaaagtggtagggctggtagaaggaataatgattcattaacgctcgtggttgcaagcgactcgcccgtagatcaacattatgttgctcacccggaatctttattggaagttgacaattcaaattcttttcaagaattaattctggatttcgataatattctgattttggaaggacatatacaatgtgcagcatttgaactaccaataaacttcgagcgcgataaggaattttttgctgaagctcatcttcgcagaatttgtgtagagcgcttacatcacaatcaagatggataccatgctagtaataggtttttaccatggccatccaagcgtgtatcgttgagaggtggtgaagaggaccaatttgccgtcgtggacataacaaatggaagaaacataataattgaagagatagaagcatccaggacaagttttaccttatatgacggtggcatatttatccatcagggatatccgtatcttgtaaaggaatttaatcccgatgaaagatatgctaaagttcaaagagtagatgttgactgggttactagtcaaagagactttacagatgttgacccacaggaaatcgaattaatacgttctttggaaagcagtgatgttcctgtgtactttggtaagatcaaaactacgattgtcgtgtttggcttttttaaaatggacaagtataagagaattattgatgcgattgaaacacataatccccccgtcattattaattctaagggtttctggatagatataccaaaacgagtactagacatttgccaaaagaaacaattgaatgtggcaggggctattcatggggctcaacatgcaatcatgggtatgctcccacgatttatagtagcaggtgtggatgagatacaaaccgaatgtaaagctccggaaaaggaatttgcggaacggcaaactaaacgaagacggcctgctagattagtattttatgattctaagggtggtaagtacggttctggtttgtctattaaagcattcgaacatgttgatgatataatagaatccagtctgaagaggatatcagaatgtccctgtagtgacggatgtcctgactgtgttgcggcttctttttgtaaggaaaacagtttggtgttatcaaagccaggtgcccaagttgttttacattgtatcctgggacatatggaaaatgattttatagattccatcaaagatggtccggaaccaaatatgccagaaataaaagtggaaacagttgttcctgtgtcagaacatgtcaacttttcagaggatttcaaaatcattgatgtgagaaaaacaacggaagatgttacttcttctagtgatgttattaaagaagaaaaatag

SEQ ID NO: 2868 - DNA, 1050 bp, Saccharomyces pastorianus
atgaacgtgacaccgaacgcgactgctgccgctttcttcccaccggcctttggtttgaagacctcttttggattcatgcactctgcagaggcacctgcgattaatctacacatgaaggaatccttgttaccggagatgagcgatggagtgttggcgttgatcgctcccgttgttgcctactgggcgttgtccagtatatttcactgcatagacaccttccatttggccgaaagatataggatccatcccagcgaagaggttgccaagaggaacaaggcctccaggttccacgtcttcgccgaagtgatcctgcaacacatcatacagaccattgtaggatacatctttttgcacttcgagcccacccacatgactgggttcgaagagaacgctatgtggaaactgcgttccagcataccccaaatcgttccggatgtcgccctctactacggctacatgtacggaatatctgctttgaagatttttgctggctttttgttcgtcgacacatggcagtatttcttgcatagattgatgcacatgaacaagactttgtacaagtggttccactctgtccatcatgaactatacgttccatacgcatacggcgctctttttaacaaccccgtcgaaggttttctgctggacactttaggaacaggtatcgccatgatgttgacccatctgactcatagagaacaaatgttcctttacacttttgccaccatgaaaaccgtcgatgatcactgtgggtacgctctgccactcgatccattccaatggcttttccccaacaacgctgtctatcacgatattcatcatcagcagttcggtatcaagaccaattttgctcaaccgttcttcactttctgggacaacttgttcgagaccaacttcaagggattcgaggagtaccaaaagaaacaaaggcgtgtcaccatcgacaagtacaaagagtttttgcataagagagaactagaaaagaaggaaaaaatcaagaacttcaaagctatgaacgctgctagtaatgacgtcaagaaggaaaactag

SEQ ID NO: 2869 - DNA, 1287 bp, Saccharomyces pastorianus
atggagaatactactgagaacaaatcgtatactttagtaattaaactgggttcttcatccttagtcgatgagaagaccaaagagcctaagctggccatcatgtcacttatcgtcgagactgtagtcagactgagaagaatgggacacaaagtcattattgtttccagtggtggtattgctgtcggtttgaggaccatgcatatggataaaagaccaaaacatttggcggaagttcaagctatcgcagctattgggcaaggtaggttgatcgggagatgggatcttttgttttcccaattcgaccaacgtattgctcaaattttaataacaagaaatgatatattggactggacccaatataagaatgcccaaaacacaattaatgaactgttgaatatgggggttgttcctattgttaatgaaaatgacactttatccgttagtgagattaaattcggtgacaatgacactttatctgcaatcacgtcggctttgatcggtgcagactatcttttcttattgacagacgtggactgtttatatactgataatccaagaacaaacccagatgctatgccaattttggttgtcccagatctgtccaagggtttaccaggcgtgaacaccactggcggttcaggctcagatgttggcactggtggtatggaaacaaaattggttgctgctgatttggcaacaaatgcgggtgttcatacactgatcatgaaaagtgatacccctgcaaacataggaaagattgtagaatacatgcaaactctagatcttgatgatgtgaataaggtcaaaaaggcgtacgatggtgatttaaaggaactacaaaaaacagaactcaaaaaattacaagcccttggcgtcccattgcatacaaagttcattgctaatgacaataaacaccatctgaaaaacagagagttttggattttgcacggccttgtttctaaaggtgctattgttattgaccaaggggcatgtgctgccttgacaagaaagaataaagctgggctgttgccggcgggtgttattgatgttcagggtactttccatgagttagaatgtgttgatataaaagtggggaggaagttgccaaatggtgaaatagacccagaatttcctttgcaaactgtcggcaaggcaagatgtaactacactagtacagaactaacgaaaattaaaggtctgcacagcgacctaatcgaggaagagttaggttatagtgacagtgaatatgtcgcacatagagaaaatttggcattcccacctcattga

SEQ ID NO: 2870 - DNA, 1203 bp, Saccharomyces pastorianus
atgatcagtgccagtacgacgaacgttgagcacagtcacatgaacctcccacaaatgcggtcgatttggctggacgaagacgaagaggcagagaagctatacggtctgcaagcgcagcaattcatgggctctgacgatgaagaaagtataggtatcactttcatcaacagtgataagcctttgctcagcaataagaagaacatcgagttgcctccgctactgccaaagacgcacccatcgagttaccataggaaaaatacttccaattccgcggtttccaggaagccttccactcccagcgccgacaagacaaagcacaagaagggatttttcaagttcaactccttgaagaaaaaacttctaggcccaccattggacgtaagagccaagggtatctccactccatttgatttccaacacatttcgcatgctgacacccgaaatgggttccaagacgagcccgaccaacaacaacaacaacaacaacaacagcaacaacaacaaccgccactgccacttcccattgcggtcgaagacgacgccgcttcctctccaagcaaaaaccgtttaagctcactaagtaaagcttttgtcacagaaaggatccctgctaaccgtgaaagcaaactcaattcgaggtcgcacgacacgaggtcgcacgataaaaagacatcatccaggttctccgtcgctcgttccatctcggtcacttcgtccaattactctaaaaacacacagggcaacaaccattcaatcaacggcagggtcgtgtccacttccaccatggccacatccctctttgaggattctccaaatacatcaccaaagcagttcaaagccaagctacatagtctggggcataaacataccgattccacggattccagtgaatcttcgttggattttttgaaaaactacagttttcccacattattagaagacagaccaattttggatttcctgcctcgctcgcaaagatcaagcgcctaccgtagccttcttttggagactccaaacttaaataaaaatactgggagagcatttgcttccccagaacatagcccgctccccatgagaagaaactcgatagcgacgccatctccccagtctaaatcctcgtacaccgactccccagccaacttcagaaggtcttttgatgatatcctttgtttttataatcaactagaacctcttcaagtttga

SEQ ID NO: 2871 - DNA, 3231 bp, Saccharomyces pastorianus
atgatgtctgagagcaccgtagccccttcagataataatagcagtctgcaaagacttccgtctgcattaagggacgaagaagatgtcctgccatctaccaacgtccaaaaccaagctgaaaatgtccatgaagcaaacacagaaacaaatgataaagttttgccatccatcactgaaattccaattagtgacgattctgatatgaagcgacacgatgcctcggatttggttttaaatcattctcatacgataaactacaaggatcttcctcacccatcaatcagcatgttgaaaaatgatgtagaagaggtctctaaacaatgcaacgatttgaagtcagctttgctttccaaggacacttccctgactgattccgtgcaggatttgttcagttccttgaaagtcttgtcacataatcaatcggttttggaaagcaaattagataatgttatgaaaaaccaagtcaatacagatatattagtcaataatatgaacgaacgattaaataaaatgtcaacactactgcaaaacacttcaaaagcgaacccctcaaacgtttcgatagaacaatcatcacacaacacaaactcacagcataattcctcttcttcccgtagaggtcccggcagaccaagaaaagatacctcaacttccacaatgaacaaattgatgtcaagtgcggcctcagccaattccaaaagtttgtctaatcacaatgcacccctttcaccagtaaatgtttctttaccgacgaatgtagttcaaacctctaaatctaaaagatatttcgttgagccatcgacgaaacaggattcgctgctattatctgccccgtcgtcgtcaagggatgatgctgagatcactctaccttccataccacaaatagcaaactctgaaaatgggaaagaacaaacttccactgcgaattctagttcaatgacaccgacccctgttacaccaaacaatttaattcaaatcaaaagaaaaagaggcagaccaccaaagaagagaacggtggaaacaatgatctctaactccactgatacgatagaaaaatctgacttgtcaactcgaattaaaaatgagatcccgcttaactcgttgcttcctccttccaaattccatcaaattccatcatctccatcgaaccctacatcacagcaggtatcggttcgtattccaagaccagccacaaatgaagcggattcgaaaagtttagagcctctttctcccattttgaccaatgacgacgccaacgctaaagacttaaataccaatgaaactgtttataatagtattgaagaaatgattgatggcgaagccaataaaacccagaaagaaaagacaataaccatcaaagttggtgacagcagtagcaatagcaaaaacaatagcaacaataacaatgacaatatcataaagttttctgcgaactcagacatcaatagtgacattcgtcgattgatggtcaacgagcaattttcattaagttacgatgccagcggtaacatcacagttaagctgccacccgtttcctctcctgcagccgcaacggcagccgcagcagccgcagtgacttctgaaatgaatagacaacaaagagaactggataaaaggcgcgattcaagagagaaaatgcttgttaatatgaaatataatgatcgtgataaggccaagtcatttatggaatctaacaagaaactattaaaggcgatgaaagaagaagaaaggcggaaaagaatgacttcaataatacacgacaaccacttaaatttgaatttaaatgacatatccacacgttcaaagataaagaatatggaaaagccaactaccgtaggtagctcgatgtcaccaaaggtaaggccccattctcccgccgccatatccgatcttcaacgcgaagaaagcgaatcatcggaacaagaaaagtcagctgacattgacaacgagggtacgaacatgaataacgagacgcacaagatgggtctgactatgtctgctacgggagcaattcacaaagtaggaatacagtcgatgctaaattccggtgaagaagcaatagcgaacgacgatgcgttggaatatgaaagaaagcgctcaagagatgaagaaacaactacttttgttcccttagaagaatcgtcttcgttagatatggtggggagaagaaacttggacaaagccgaacaagatgatcaaacggaagatcagggcagcacgaagaaaagacgtttatctgatgaagcaaaaggcgaagaagaggaaaaagaagaagaagaagaagaagacaaagaagaggaagaaaaagacggagaggaggagagagcaactagtcataatgaaccattagccactgttgagaatgcctcaggagacgtctcaacagatttgcctgaggagactccatcgatccataatgacaccgagaatgccaacggaaatgggaacctgggcttgggcacagagtcacgcaacacactattaacggctaccccaattgaattgatttgccgcgaagggttcttctatcgaagagacattcctgacgtgcccatcaccaccggggcctatctagaattcaagttcaaggccaaagaagaggaactgatcaattcaagtatcaacgaagaagattacgccacaaaatccaagcatgaaaaaatgaacgcccattttttcaagcccgatattcaagaggagactgaacttgcctttgagatcttgagtaaaactaccttaacagagaaatacgttaacagtttagaatactttttaatggaattcagatgggaaaataaactagtcgggttaggtctcaagctcagagaatctaaaaggacttggcaaagaagaaaggcactgtttgcccttttcgaattctggagagaccaatcaagagacaaaaggaagttccataactacaccatcttgcatgcggtgaaggaaatggaaaactacaggattttcatcaatcgctccgtttcgtggttttacaaccatatcacgctgttgaaaatgatcctctatgatctctgtgacaacgtagatacccaatggagagaatggatgttccctcacagcgaggcactgccaaccttaggtcaagagggaatcaacgaagacaacttgaacgagaccatcgacaacatgctaattttcgatttccttgacgacggctcggagaacaaccaagtgaaatattcccgaatcataccgccggatgtccgctag

SEQ ID NO: 2872 - DNA, 1932 bp, Saccharomyces pastorianus
atgtcacattccggtgctgccattttcaagaaggtttcagggataatcgctattaatgaagacgtgtctcctgcagaattgacgtggaggtctacagatggtgacaagatccatacagttccattgtccaccatcgacaaactgcaagctactccaacttcaagtgaaaagatgatgttgaggctgattggtaaagtggacgaatcaaaaaagcaaaaagataacgaagggaacgaagtcttgccgaaaccgcaatctcatatgttttcgttcaacaatagaacggtcatggataatatcaagatgactttacagcagatcatttcccgttataaggatacagacatatatgaagagaagagaagaagagaggaatctgcgcaaaacacagagacaccgatgagcccctctcccgcggagacagacactccaacgccacatctggatacaccacatctgaataatggagctccgctaatcaatacagccaaactggatgattcgttgtccaaggagaaattactgattaatctaaaactccagcaatctttgttaaagggtaacaaactactgatgaaggttttccaagaaacggtcatcaatgctggtttacccccactggagttttggtctactagaattccgctgttaagagcctttgctctatccacttcgcaaaaagtagggccctataacgttttgtccactatcaaaccagtggcctcgtcggaaaataaagtcaatgttaacctgtcaagggaaaaaatcttgaacatttttgaaaactatcccattgtaaagaaagcatacactgacaatgtcccgaaaaatttcaaagagccagaattttgggcaagatttttctcctcgaaattgtttagaaaattaagaggtgaaaagattatgcaaaatgacagaggtgatgtgatcatcgataggtacttgacgttggatcaagaatttgacagaaaggatgacgatatgctattgcatccagtgaaaaaaattatagatttggacggaaatatacaagacgatccagtagtacgaggtaataggccggattttactatgcagccaggtgtagatatcaatggtaacagtgacgggacagtggacatcttaaagggtatgaataggttaagcgaaaaaatgattatggctttgaaaaacgaatattccagaacgaatttacagagcaaatcgaataatgcgaacgatgatgaagatgaagatagggacgaaagaaatgaactaaaaattgatgacttgaacgagagttacaagaccaattatgccatcatacacctcaaaagaaatgcacacgaaaagacaacggacaaggatacagacgacgtggcaccaaagaaaaaggcggatttgaatgtttctaaccaacaaatgctgcaacaattatcgttggttatggacaatttgatcaataagctagacttaacgcaagtggttcccaataaagaggtgagtaacggtatcaacaaaagagtcataaccgcaatcaagatcaacgctaagcaggcaaaacacaataatgtcgactcggcactcggcgcttttgtaggcaccacctctcaggcaaacgaatcggaagtgaaaagtgacctcccagtagacttgttagagagttgcagaatgctacacaccacgtgctgtgaattcttgaagcatttctatatccatttccaaagcggtgagcaaaagcaagcctccaccgtcaagaagctttataaccatttaaaggattgcattgaaaagctgaacgagctgtttcaagatgttctcaatggtgacggcgagcctatgtcgaatacatgcacagcctatttgaagccaattctaaactctatcactcttgccacagacaaatatgacgagtgttacgacgagtataacagctcgaacggtgctacataa

SEQ ID NO: 2873 - DNA, 3102 bp, Saccharomyces pastorianus
atgcataattctgacgggaacgacattaatacaaaaatctttaactcagttgctgaggtgtttcagaaggcacagagctcgtatgcgggacacaggaagcatatagctgttttgaaaaagatccagtcaaaagctgtcgagcaagggtatgaagacgcttttaacttttggtttgataaattagttacaaagattttgcccctgaagaaaaatgagattatcggggacagaatagtaaaattagtcgctgcgtttatagcctctttagatcgagagttgatcttagccaaaaaacaagattaccagctcacgaacgatgaagaaggtgtattttcaagatttgttgaccaattcataagacacattttgcgtggagtagagagtctagacaagaatgtcaggtttagggttttacaattattagctgttataatggataatatcggtgaaattgatgaatcacttttcaatttgttgatactttctctgaataaaaggatccacgatagagaaccaactgttagaatacaggctgtgttttgcctaaccaagtttcaggacgaagagcaaactgagcatctaaccgagctttctgatgatgaagataattatgaagccacgaggaccttggttgctacgattcagaacgacccgtcagctgaagtgcgtagagctgctatgctgaacctgatcaatgataataacaccagaccctatattttggagagagcaagagacgtgaatatcatcaatagaaggcttgtgtattcgagaattttgaaatctatggggaaaagttgttttgatgatatcgagccacatatttttgatcagttaatagaatgggggttggaggatagagagtcgtcggtaaaaaacgcatgtaagaggctcatttctcatgactggttgaacattctagacggtgacttaattgagttgctagaaaagctggaggtttctagatccccagtatgtatcaaggctatagaagccctattccagtcacggccagatgtactctccaaaatcaagttccccgaaagcatttggaaggactttaccgtggaaatctcctttctctttcgggccttttattcgtactgtttggataatgatataacagaaatgttggaagaaaactttccagaagcttcaaaattatctgagcatttaaaccattacattattcttagatttcatcaagaagatgtgcccaatgattctccagtaagtttagatgacagaactttagaatttattattgaacagctattaattacggcagaaaaatatgattttagcgatgaagttgggaggagatcaatgcttacagtcgtaagaaatatgttagctttgactgcactatccgagcctctcattaaaattggcatccgcgtaatgaaaagtttgtcgataaacgaaagagactttgtaacgatggcaatagaaattatcaacgacattagagatgatgatattgaaaagcaagaacaggaagagagaaagaaaggcaaaaaaaatgatctgtctgctaacggagacgatgatgataataacataaacgatgatgccgctaatgacgatgacgaagacgataatattgcgtccttccactctgcagtagaaaacttagtgcaaggaaacggcaatgtttcagagagtgacataatgaacaacctcccacctgaaaaggaggcaagctcagagacaattgttctttgtctcacaagatcgtcatgtatgttagagttggtcaatacacccctaacagaaaacattttaattgcatcgttaatggacactttaattacacctgcagttagaaataccgcaccaaatatcagagagcttggtgtcaaaaacttgggtttatgctgtctcttggacgtcaagttggctattgacaacatgtacattttgggtatgtgtgtttctaaaggtaattcatcattaaaatacattgcgctacaagtcatcgtagacattttctctgtgcacggtaacactgtggtggatggtgaaggtaaagtagactccatatcattgcacaaaatattttacaaggttttaaaaaacaatggtctaccagagtgtcaggtgatagctgcagaagggttgtgcaaactttttttagcagacgtgttcaccgatgatgatttgttcgaaacgttagttttatcatatttttcgccaatcaattcctcaaatgaggcattggtgcaagcatttgcattctgtatcccagtatactgtttttcacatcctaatcatcagcagcgtatgtcaagaacggctgcagatatacttttaagactatgcgttctttgggatgacatgcaaagtactgtagaaactggagctaatcgtgaggcaatgctaaagcccaacattatatttcagcaactaatattttggaccgatccgcgcaatttagttaatcaaacagactctactaaaaaggatatagtgcaactcacattcttgattgatgtgctcaagatatttacacagattgagaagaaggaaataaaaaaaatgatattaacaaacataaatgctatatttttctcggctgaccaggactattctactttaaagaagattcttgagtattctgatgatatcacagagaatgataccttagacagtgtcagcaaaaatgctctggacaaattaagaaacaatttgaatgtagtcatcgaagagattaacgaaaggtcaggaattcaaacaaaagatgaaaacaacacgacgaatgaccaatactcatccatcttaggggattcctttaataaactggcaaatggcacaccagataacagtatcgatacaactgccgaaaatgacacgggaaccaccaaagcgcctgaaaatattttagtggcagataacgcaggagaaaagaaccaaaataattccaggaaaaggacaaggtctgaaacggaacaagatactacatccactaatccagaaactactttcattcaaaacacttcagctgtaacaaagaatgtgagttttatcttacccgaagaggaagcagacgcaatgtcggtagacgaagaagataatagtccagattcctttacggatgtttaa

SEQ ID NO: 2874 - DNA, 1323 bp, Saccharomyces pastorianus
atgttgcccccaaaccaaaggccacgctcgcttctgcagaggcatcgaggcaagttgcttgtctcgctgacagggatagctgctctattcaccacagggtcggtggtgatgttcttcattaagaggtggttgtataagcagcagttgcggattaccgaacagcatttcatcaaggagcagatcaggaggagatttgaacagacgcaggaggactccctgtacacgatgtacgagctattgccggtgtgggagatggttttgaacgaaaacgacttggatttagacagtattgtcactcaattaaaggaccagaaaaaccagtccgccagatcaaacgctgacaaaagcgcagagagtctaccgttgaagacgaaagccgagttgtggaacgagttggagcttaagagcttgatcaagctggtaacggtgacgtacacagtgtcgtcactaattttattaacaaggctgcaactaaatatcctgacaagaaacgagtatttggactctgcgataaagctgaccatggagcaggaaagctccaataagctcaacaataagctatataactgggtcacatcgtggtggagtagtccagaggacaacatgggcgatgcaacggtggcgaagaagacaaagaaagatggccaggaagcgtatatcaacgagcaagctttcttgtcgctgtcgtggtggattctaaacaagggctggctgaactataacgaaataattacaggccaaatcgaaagtgagttgagcggcattaacccaagggatactttaaccctagaagagttcagttcgcacctcaccagaatcttccagaacataaactctcaaatatttcagcagaataatgatagcctgatttcaactttcctacccagaagctctggcgaacaagaattcctgctttcgcaaacgctcgacccgcaagcactagccggcttccactccaacacactggttttcaaacagctaataaacgagttgactcgatgcatcgaaagcaccgcaacgtccatagtgttggaatcgctgataaacgagtcgttccactacataatgaacaaggtcggagtgaaaaccatggccaagaagaagccggagcaagaggaccagcagcactaccaaatggccgttttcaccatgtccatgaaggactgctgccaggaaatgctccaaacggcggcagcgtcaccccacaccggcagcgtcaacgagttcttggccacactagactcagtgcagccgctggacgacctgagcgccagcgtttacagcaacttcggggtctctagctcgtacgcctttaagagctga

SEQ ID NO: 2875 - DNA, 1497 bp, Saccharomyces pastorianus
atggtggaaggaaagatagacgagtttaaggccatcacgggcgctgacgacgctgccattgccacccaattcatcgagatggcagacggtaacttggatactgccatatcattgtttttcgagaacggtggagctgccttgctgagcagtaacaatacccctgccccatccaattcggcttcagcggttcctatttctgcagacgcagattcagatgcacaattggctgagaggctgcaacgggaagcttaccaacagcaacagccagatcacgattacgtgaggccccctgatgaagcgagacacgaagtactaaccgagatagcagggttccagacttcttatcccggtatcggcggagggttcgagccattgcatagagtcaacgatatgtttgatgaaagaagacccgagagtatcttcaatcagcgattggacgatacaactaccgatacttacattaacgatgactcttcagactccctggaggtatctgaagatgatgacgacgatgaatacgagtacgtggaagaaccagttattgagctcgacgaagacggcaacatcaaggagtacaccaagttggtcagaaagcccaagtttatctccaaggagcaaaagctagctttgttattcaagcccccattctcaatcatgtccaagctagacttagacgcagcaaagcaaaaggcaagaagtaagcaaaaatggataatgattaacatccaggattcagggatctttcaatgccaggccctcaacagagacctgtggtcgtccagacagattaaaactttggtcaaaaaaaatttcattttcttgcagtatcaatttgaatctcgtaatgctcagccttacctacagttctaccacctaaataacaaggatgatttaccacacatcgccatactggatccaattactggtgaacgtgttaagcaatggaataggaccgtccctgctgcagaacaattcatttcggaaataaatgagttcttgacttcattttcactggacccgagggtttccaatccaacggtcaatgagcctttacctaaattagatccaacaactttaaccgaggaacagcaaatggaactagccattcaagagtcgttaaataataataccactcaatcagacaaagaacaagtaccgaagacggatcaagagctgaaagaaacacacgagatcgatccattcgataccgtagaggccaaatcgcatcccgaaccgcccaataaaccaggaatcaccacaagagtccagatacgtaccggggacgggtctaggctagtccgcagatttaacgctctggaagacaccgtgcgtactatttatgaagtcatcaagacagaaatgggtggttttgcagatgcaaaattcgccctgaacaatcatcaaagagaggatttgattgacaaattggacatgaccatagccgacgctggtttgaaaaacagttccctgctactagagaaaatagagtccgagtaa

SEQ ID NO: 2876 - DNA, 2064 bp, Saccharomyces pastorianus
atgatttcaagagcccccattaaaatcccaacgtatgttatcctgcgaaatctacttcgtaagaaagtcataaaacgttgttactcagtccccgtgcttagggattatcagcaagatgctatagatgcatgcgtgaattctatccagcaaggaaccaaaaggataggggtctcactagccactgggggtggtaagacagtcatattttcaaaccttatcagccaattacggcaaaagaattccaggggcaatgaaagaaattttagatctttgattctcgttcacagaagagaattggccttacaagcaacgaatactctcaaaaggatattccctgacttaaaagtccatatagaaatggggaaatatgattgtgatgtagaggattctgacgttgttgtggcgtctgtccaaactttgattagaagacttgacaaatacgatactgattcgataaatctcattattatcgatgaagctcaccattctgtagcaaattcctataggagtattttggaacatttcaatgcttcaactgcagatacgaaaattcctgtcattggatttagtgcaacttttgaaagagcagataagagagctttgtcaatggtaatggatgaaattgtataccatagaggaatcatagaaatgatcgatgataagtggttatgcgaggcaaaatttacatcagtgaaagttgaggcagatttatctactgttaaaagcactacggatgattttcaactggcaccattatcgtccataatgaatacaaaggaaatcaatgaagttatcatgaaaacttatttacacaaaaaacaagaaaagtctttaaaatccacattattgtttggagttgataaatctcatgtacgaacgctacataaactattcaaagataatggtattagcacggactatgtcacatcggatacaaagcaagtggaaagagataatatgattcagaaatttaaaaatgggaaaactgaagtactgatgaattgtggtattttcactgagggaacggatatgccaaacattgattgtatattactatgtagacctacaaaatcacgttcacttttgattcagatgataggaagaggtttacgattacactattcaaaagatcattgtcatatcattgacttcatcggagcctctaatgtcggggtggtttctgcacctacgctattaggaataaagggtgatgagatcgaattcgatgatgcaacgatggaagatctaagggctattcaaggcgagatcatatctaaacaacagaaaatcgacgaaaagttaagggctctatttcagagtaacgaaacaacaatggaagctatatctggaaaaaatgaaaccaaaaattggatacaaaatgcaaactcactggacttgacgctgtgttcatttgatagtttcagaaacttcacggagaacaataattcactcccagccggtaaagagctatacgagtcttctgaagcaattaaagaaatggaacttttaatgaactcacaatatccatgggtgaagtttgcttccaatgcatggggcctctccttacaaggcaaaaatcatttgagaatatataaggaaaaatccgaaaacaaatcatcagcactgtatcatttgaaaatgtaccggcaattgccatctttcataaccaataaatacgccgagtatgtccctaaaacaataataaaggattccagtctttggaatgtgatgtcaagcgtagaaaagattataaacactttaaactcaaactcggaagggcaagtcatgaagtatcaagcaatatccagaaaatttacgaaatggagatctgcagctcccacgccgaagcaaaggaattttgttaacaggaaattgcaaaaagtgcatggggaatcttcaaaagacttcaccaacttatctttggatgatattaacacatacacagatactaaaatgacgaagggagatgcctcgaatttgatatttgcaagcagcttagcacctgtctacccgttgaagtcactattacgaatcctacaatatcaaaaaagaaaatcaacataa

SEQ ID NO: 2877 - DNA, 2163 bp, Saccharomyces pastorianus
atgagttctagagcattgaggaaattacaagatgacaacgccttgctggagtcgctactatcaaatgcaagcgcgaataaggtatccggtggtaggagtactgccaataacagtcaaaaacagcaaaacatgttttctttaatggagaatgcaaacgattcaggtagtgccagtggcgaggagcaggaatctgaacacgatgaagaagctggtgtaggtagtcagctaggtagctcaagcaacactcaacctgaaaaagtcattttagtatcaaaatcttctagaaggaagaagaacaagaagacaaagaagaagcaaaagacccagactaccgcagcatctggagatgaagattctgacgatgaagagtttgataagattatccagcagttcaagaaaactgacgttttaaagtatggtaaggcaaggaaaaatgatgatgttaaggaagaggattttttcacggctcctgaatccgaagagacattcaacataccttggagatcattcttgagtctggaaaatgacccgggcttcactaagttccccgtttcgagtttaaagcattcttgcaagtttttccagaacgatttcaagaaactagaccctcatacagaatttaaactattgtttgatgacatttcgccagaatctctagaagacatcgattcgatgacatctacgcccgtgtctcctcagcaattaaaacagattcaaagacttaaaagattaatcagaaactggggtgggaaagatcataaactggcacccaatggccctggtatgcatccacatcatctgaaattcaccaagatcagagacgattggattccaactcaaagaggtgagctatctatgaaacttttgagctctgatgaagtattaaattggcaattatgggagagacctttagattggaaagatgttattcaaaacgatgtcagccagtggcaaaaattcatctcattttacaaattcgagcctttgaattcggatttaagcaaaaaatcaatgatggacttttatttaagtgttattgttcatccagatcatgaagcccttataaacctgatttcttctaaatttccataccacgtacccggactattacaagttgctttgatactgatcagacaaggtgacaaatcaaacactaatgggctactacagagggcgcttttcgtttttgatagagctttaaaagggaatattgtttttgattctttaacatgtcaattaccttatatttattttttcaacagacagttctacttggccgtttttagatatatccagtcacttgctcaaagaggtgttataggtactgctagtgaatggacaaaagttttatggtcactaagtccactggaagatcctctggggtgcaggtatttccttgatcattattttttgctcaataatgattatcagtatatgatcgaactatctgactctccattgatgaactgctacaaagagtggaatactttgggattttcgcttggtgtggtattgagttatttaagaataaatgagaaggaatcagcacgcagtgcacttctaaaaacattcaagcatcatcccttgcaattgtcagaacttttcaaggaaaagcttttaggagatcacgccttgactaaggatttaattattaatgatcacttggcagaaattttagagttcaaagcttatatggctcgtttctcttcactttggaccaaaagtgaagagatatcattcttacataatgaattatcgagtattttaaaagattaccaaactggaaacgtcacaatcgattcaaatgacaaaaaacatggcgataatgccgatgaacctcaatcacctttctttattgaaggcatcccaatcaacctattaagattcgccatattatctgaagagtcctcagtaatggcttctattccatcaactatctggtctaattatgaagtatatgaatttgatgtattacctccaacgcctacgtctaaggagtccattgatgtgattgaaaacatcaagagctttatcaatgaaaaggatttgactgctcttcaaatggaaagattgcaagacgaagatttattgaaccaaataagacagatttctctgcaacagtacatccatgaaaatgaggaaccacacggaaacgaggactaa

SEQ ID NO: 2878 - DNA, 2028 bp, Saccharomyces pastorianus
atggcgtcagtacctgtaaagaagagaggaagacctaggaaggccgtggtacctcaagttgcgttggatggttccagtggaggcgcatctgatgattcgagaagtaaaagacctaaaagaaacgcctcgaagaaggcaatcgcgaacctggcgcagttgatgacggttgatgtggatgatacgataaatactcagcgtctcagtaaccaggacgacggcggcgatagtgatttcaccgtgaacgaggaaaacaatagcgaggacgattatgatgttgacttggaagacgataaggagctggaggcttctaaagaaggagtgtcagatttaaatagcaataaaagtggcaattctgatcaatcaaatggtaagagaaaggcttcgaagaaaacaaatgcaaagaagagctcagctgataaagtaccgaaaaataaacgctctcatggatcaagtttggaacagaaaggtcgccctatcagacttttaaaggatctttccagcgcgagggataagattgaaagaatttatggactcaacagagaaaaattattgcagttggcaaaagtcaaggaaggctttgagacaagcatttttgattttccactggagaatattcagcccgattccccatattttgtatgtccacaacctccttatacaaaggaaaatgtatatgacaaagttataggagataaaaacaagactatataccacgagattactaagatagagtttgagaatatggtgaaattgagaaaagaaagattgaaattacttgttggcgaagtcgatgcaacgatgtctactgatgacaggatggagtttccgatacttcctaatggcaaaagaactggattcgtttacaatgtaggaggtttagtaacagatattgcgtggctcaatgtagacaaaggtcttgatacaaatgaaaattatcagtatctagccgttgcaatttcacaatacatggatgaacctttaaatgaacatttggaaatgtttgatagagagaagcactcctcctgtatacagattttcaaattgaatacctttactttacagttcgtaaaggatcaaactattgtacactcatttggtgaagtgtggaacctaaaatggcatgagggatgttacgcatctcatttggttggctgtttatcatttgttagccaagaagggtcggttaattttttggagatcattaaaagcgttagtgatattcatgtctttaagatatgtgagaagccgtctttggttttgtctttggcggacagtttgataactacttttgacttcttatcttcaaccacggtggtttgtggcttcaagaatggatttgtggcagagttcgacttgagcgatccagagttgccatcgttttacgaacaactccatgattcctatgtattatccatctcggtagctttttctgattttgaggataccgttatcagtacagtttctgtagatggtttcttttatgttttcaatccaaaagacatagctacaacaaagacgacgatctctagatttaggggaagtaatttggttccagttgtttattgtcctcaaatatactcgtacatctattcggatggtgctagttcgttaagggctgtcccaccgagagctgcctttgctgttcatcctttagtatcacgggaaacaactataacggccatcggagtttcaagattacatccaatggttcttgctggatccgctgatgggggtctagttataacgaatgcagctaggcgccttttgcatggtattaaaaacagttcgtccactcaaaagtcattgagactttggaaatgggattacagcatgaaggatgacaagtacagactggatagtgcttatgaggtttatccattgacagttaatgacgtgagcaaagctaaaatagatccacatgggattaatataacgtgcactaaatggagcgaaacaagtatggggggtaaattttacgcttttgctaatagtgctggttttttgacacttgaacatttagggaaataa

SEQ ID NO: 2879 - DNA, 1329 bp, Saccharomyces pastorianus
atgtcacctaaacaagatggtgttgttgaattaacaaaggatttaaaaggcataaatctgcgtgacgcacctaacgcagtgaaagagcaccaaaagaaatcatccaaatggagcacaatttctgctccgtcttcaacaaggccgtcttcacaacaaggaaatgaccatctagaaggaagccctaaatccacacgtatcccatatacttcgtttttgcatacgagtatacgcagttttcctacaaaatcaccagcagatatattttatgaaagtaaagaagtggctttgttcaccgacagccagttgtatgccgctacacgcaaagacgttgtacccaatttgaaaaaggacatttctcacctatatgaaagtccgcttcttgaggcaaggaagctcaagaccccgtatttgggccatgatttattttccaatatcgcggagcttgtccccatgacgatatccgaattagatagtgtagcaccatgtatctcatatattgaggattggaggctaaataatcctggtaaacccttcaaaataggtaaaaaatttaccgtcgttaccacaaggcaccatatcgtggatctaaccatgcatccttttgatagacgaaataaacataagtcattaattgctacatatatggggaatggttttatttcactttctagaaaccctaaatacgatcatcagatatccaaggagggcatttattcaggcgatccaaatatcaaaaaaatttgctattcaggatttgaacttgagaattgtttgactgaaaataccaagaactctcgttctaacgcttcaaaatgtcctgtcttttctattgtggagagcaaactttcagaggatattggtctattaatgcgttgtgagatggatgcattcaaccctgtttcgaaaacaaatacggaactaaaatgttttggcccattatcaatgcaaaattctaaccataggaaaaaactcctgaaaacttggatacaaacaggtttattaccaaactcagatattatgataggtttgagggacagttacagcggccaactactggacattcaatggtgctcaagggaatcactattcagaaaaatcaatcatccaggtttacctttgaataaaaaagaaatgaattataacgccaaagttgcggtggaatggtgcaaccattgtatcaaatcgacttgtgatttggtagaggcaaatatttcccattacaactgtgataaaccggaatctttcgagatcaatattgatgcaaacggcactatcattattactaaacttattaccattccaaggaatgtggaaatattcaagacttaa

SEQ ID NO: 2880 - DNA, 1536 bp, Saccharomyces pastorianus
atggtaaatcactcgcagcaccacagatcaaacaccagcctcatatcacatttgctaatactacttatcgtcataacaatcatcattgaaatgtgtttatataacaaactttttaaaaaccaaagatccgaagatataaaggacagctttcaaaacgacggacaccaagtgcccaatacggctcaaaaccagaatcctagtggtgatagcgatggctatgtatcgggtgtctattattcaaactggtcaccatacaagccaagattccatttccctcacgacattaacctaaagcaagtgtcgcacgtatattatgcctttttcaagatagatcccaaaactggctgcataggaagcacagatagttggtctgatttggacatgaacctatataaaccgttggcgatcaaagcttcgcaattggttgatgataatctgaatgacaacaatatgcagaatattttgcctttaggctgtataggcgaactgttttatctgaaaaatgcttgttctggcaggaagttcaagagtattatgtctatcggaggctggtcggatagtgaaaacttcaaaaccatagtcaaaaatgaaaaactgctacaaagtttcgttgactcatcagtggaaacgatgtttaagttagggttcgatggtattgatatagattgggagtttcctgaagacaataaaatagaaccccaaggctatttaaagttggttaaaatgttgcgatcgaaattaaataatctagaatctgaaattttcggcgagagccctaaggatcacttccaattatccatcgcagcacctgcattcaaagataaactgttttttctgcaaattgcagaaattgatcaatatatcgactattggaatatgatgacgtacgattattacggttcatggtctgaaacaaccggatatcacagcaatttatttagtgagacagaattaagtggaaactttgccatacactatatgattggtaaatttggtgtcaatcccagaaaattagtgttgggaatggcagcttatggtaggagtttccatattaaggataacaaattccaaccttttactaaaaatactgttttaatcaatcaacaatttaaaggggtagggaagcctggtaaagaaatagataaagcagatggcaaagaaggtatatggccctacaaaaaattgccaaagaaaggcactacagaacaatatgaccctaaatacgtttcagcatattgttttgatgaaaaaaactcgatatttattggttatgataatactgaatcagtcaaaactaaggcagactacgtgatgcatactaagttaggtgggggattttggtgggaatcatgtggtgaggattatgcagataaagcaaggtcgttaaccaacgcgttcaatgaagcccttcactttaacgtgttatcgaaaccgtccatgttccaagacaaaagagttatgaaatactacttaagtaagtatggcgatggcggatttttagctccatatctaaagcatttggaatcactcaaatag

SEQ ID NO: 2881 - DNA, 1971 bp, Saccharomyces pastorianus
atgccaaatagtgctctgaaacaaggcccaaaaaatgaaaatgcttctccctctaaaggtcacgtcccaagtttttggaaacagttcataaacaaccccaaaagtatgtcatcagagagtatcagtgtccccaggtcaccaacttcactttccagaagtgcccaaccaacgactttaaagaggcctccgctgtcttcgagaccatactcatataatactccaacgaaagataggaaatccttctccaaatccgcaaaacagaacagtagcagcaacaacactaatgcggggacatcgccccacgcagagtttaaaaattatagagatatgtttttatctaatagaaatggcttcactggcagagtttttggtgtcactttagctgaatcgttaagtgttgccagtgcggaagtcattgttcaaagcgaactagttagtttcggtaggatacctatcgtggtggctaagtgcggtgcttacttgaaagcaaatggtttagagacctcaggtatatttcgtatcgcaggcaatggcaaaagagtaaaagcactccagtatattttttcttccccccctgattacggtaccaaatttaacgattgggaaacatatacagtgcacgacgttgcatcgctcctgagaagatacctcaacaatctagcggaaccattaatacccctagcgctatatgagcaattcagagatccgctaagagctaaaccgagaatcctaagacatatgctgacccatgaagtttctcatcccaatgccaataaactgaataacgcgacagcgaaatccagcagacaaaattataatgatgaaggcgctaatgatggtgatattgaaaaggacgaaatcaaagatgacgaagaaaaaagaagaagaaaaatacgtcacaagaggagactcacacgtgatatcagagcagctataaaggaatacgaagaactatttgttacattatccaacgacacaaaacagctgacgatatacctgttagatctcttaagtcttttcgccagacaatcacaactaaatctgatgtctggaagaaacctagccgccattttccaaccttcaatattatcacatcctcaacatgatatggaccccaaagaatatgaactttctcgactggtagtggaattcttaatcgaatattcctataagttgttacctcatcttctgaagttagctaaaaaggagcagcaagaaaggctatcgaatgaaaaaaaagatatcgacgcaaataaacaaaaatctgatcctataccaataccgaagatcacctcatcagatgttccaccaatagccccttcaaacccatatccgccaacaattgacaacagtaataaattcaatcatccaacattatcaccaatatctacttcaattccagaaaactcatcagacgtacagacttctaaaatgttgaaacctccgaagcaaagacgacctcactcgaagtcttttggttctactcctgtgcctccagatgtgattgctagtaataaaaggcggacaagcctattcccatggttacacaaacccggtatcctgagtgacactggtgacaatggcgatttgaccggtactgaagctgaaggcgatgactatgaagacgaaaatattgatccatacagtcaatctccatcaagtatgcagtcgggctctttaccaaagcaacatcatttaccaattccgcagatgaacagatcgttgagtgggaacagtacctcgtcgtcattcaacactaggccaatctcgatgatattgactggtgccaataataattcagcggatcatttagaattactagacaatgctcacagcaataatggggagcgaaatcatgcttctccactaactgaagacgatgatgaggaaaggaattcaagatcacggaagagggaatcctggtttcagagattaacaagccgatcaggctcagcaaacagagctcaataa

SEQ ID NO: 2882 - DNA, 663 bp, Saccharomyces pastorianus
atgtctgcaaacgataaacaatacatttcgtacaataacgtacatcaattatgtcaagtttccgctgaaaaaatcaagaacttcaaaccggatttgatcatcgcaatcggcggtggtggtttcatccctgcaagaattttacgtactttccttaaggaacccggtgtaccaaccatcagaatctttgctattattttatctttgtacgaagatttgaacagtgtaggcgctgaagtggaagaggttggtgtcaaagttagcagaacccaatggatcgattacgaacaatgtaaattggacctagttggtaaaaacgttcttatcgtcgatgaagtcgatgacacccgtactactcttcattacgctctaagtgaattggaaaaggatgctgctgaacaggcaaaggccaaaggtatcgatgttgaaaagtccccagaaatgaaaactagtttcggaatctttgttctacacgataaattaaagccaaagaaggcagacctacctgctgacatgttgaatgacgagaaccgttacttcgcagccaagaccgttccagacaaatggtatgcctacccatgggaagccactgatatcgttttccataccagaatggctattgaacaaaataatgacatcttcattcctgagcaagaacaccaataa

SEQ ID NO: 2883 - DNA, 1470 bp, Saccharomyces pastorianus
atgtccattttgaaactcataggatttattttattaatcataatttcctacatcgccttcgtggtggttgttcctcctttaaaatttcctagaaatatacctaccattccgttctacgtggtgtttttacccgtcatatttccgatggatcaaacagagctgtatgatctttatatcagggaagcaatggaaaagtatggggccgttaaaatattttttggttcacgctggaatattctcgtttctcgttccgagtatttagcacaaatatttaaggatgaagacatttttgctaaaagtggtaaccaaaaaaagattccatacagcgctctcgctgcctatacgggcgacaacgtcattagtgcacacggaaaagtttggaaggactatagaaacgcagtaactaatgggctgcagcatttcgatgatgcacccttttccaaaaatgcgaagattttctgcaatttaatcaagaagagggctcaaaatggagaatcttcaattcaaatgggacctttatcccaaaggttggcattggataatatttctcaggtggctcttggatttgattttgctactttaacaaatgataaaaatgctttacatgagcatttagttcatatcaagaagcaaatatttcatccattcttcttagctttcccattccttgatatgcttcccattccttcgagaagaaaggcattcagggacgttgctagcttcagagagctcctcgttaaaagagtccaagaacaattgatcaataactacaaatttgaacaaacaacttttgccgccagtgatttgattcgtgctcataataatgaaattattgactacaaacaattatccgataacatcgtcattatcctcgttgctggccatgaaaacccccaactgctcttcaacacttcgttgtatcttttggctaagtattcaaacgaatggcagaacagtctcaggcaagaagtagaaagtgtcactgattcgaaagccttagcggacttacctttattgaatgcatttctttttgaggcagtcaggctatatcctcctttgagcacgattattaatagatgcacttcaaaagtatgtgtgctaggagccgacattgtgatacctaaggatgtatacgttggatataacaattttggaacatcacatgatcccaaaaattggggtccaacagcaaatgatttcaaaccagatcggtggggctcagatatcgaaactataagaaaaaactggagacttgccaagaataggtgcactgtgaccggatttcacggtggtcgaagggcatgtttgggagaaaaactagcgctaacagaaatgagaatcactctagctgaaatgttaagacagctagaatggactcttgatcctgaatgggaagaaaaactaactcctgcaggaccgctgtgtcctttcaatttaaagttaaaatttaaagagagggcaccaaactaa

SEQ ID NO: 2884 - DNA, 729 bp, Saccharomyces pastorianus
atgtcccaagaccatccagatgttgatgacgaacgtgaatatccagacattaaacgcaactcgctgcacgaagtaaccaaaacctcctatacgttggggattatgctgggcgtattcgtaggtttgttaccacaagctaggttcaagaatttcaatctttatattattgccctatctctatttcattttctggagtactatattacagcgaaatataaccctcttaaagtacattctgagtcatttcttttaaataatgggaagagttatatggcggctcattctttcgccattctagagtgtcttatagaaagtgttctttgccctaacgtgaagacattcagttattctcgaattaccaaagcctgcaccataattggatggctattaattattttgggacaatatactagaaccgttgccatgcatactgcgggacggtcgttttcacacatagtgaagactaaaaaagagactgatcatgtcttggtaaaaactggcatatattcctggtcgagacatcccagttattttggattcttttggtgggccatcgggactcagttacttcttctaaatcccatatccctgcttatttttattactgtactttggaaatttttcaaggacagaatttgtttagaggaaagatacttaatagagttcttcgggaccgattatgcagattataaaacggaagttagtgtcggaattccatttgtttcataa

SEQ ID NO: 2885 - DNA, 1026 bp, Saccharomyces pastorianus
atgccaggtccaaggaacgtgcgtacactgcatggaaacggaggccgtaatggcaacggtgacgtcatgggcccaaaacaattatggttgagtatccccccagtgacaagaactttacttactttttcaatagtcatgacgatcgtcgctcggttgcagtttatcagtccgatgtacttcatttacatgtggagttggaccttcaagaagtttcagatatggaggcttgtcacttcttgcctgattctttcgccacaagccatgccggcgctcatggaactctatactctttacgataggtccacgcagttggaacaagtgcattttggtcccggtttgtccaacagacaaggtcccatggtgtcactccactacgtctactatttgtgcttctgtatactaactatcgccatgacggctacgatcctgtatggatccggctaccctttcgtactcacctctggtttcatttcgtgcatcacatatacgtggtcaattgacaacgcgaatgcaaagattatgttttatgggctgatccctgtttgggggaagtatttccctctgatccaattgtttatctcctttgtctttaatgaaggtaacttcgtgatctccttgatcggtttcgccacaggatacctctacacatgtctagacacacgtacactgggtccactatgggggatgatatccagaaaagccgacccaaattacggtgtcttgcccaatgggaaattccctaccccgtggtggtttactagcctttatgctcgcataacgggtgcacacaatgcaccaccagcacccaacaacaactttgccgacgtgccggtaactccaagagaaacaagatcgtttagtggaagaggtcaaaggttgggcacctcccccattacactacctcagtctgacgactcaggcttggccagaacttcaggtactcggctgaggagcggctcgtccaacctgaacgagtttcagggtcgtggccagcgcgtaggccacacagacggcagtgctaactga

SEQ ID NO: 2886 - DNA, 372 bp, Saccharomyces pastorianus
atgttaccactgtgcttgacgttcttatccttctttctgtctcttggtggttccttcaaggcagtaatgaccaaagaagaagcagatgggacaacagaagcagcagcttgtctgttttggattttcaattggacggtaaccttgatacctttgaattccttggtggccttggcgatatcttcaccgaccttctttggggacaaacccaatggaccgatctttggagccaaagcagcggaagcaccgacttcaccaccgacagctctcaggtacaagtacttaacttcatttggatcaaactttggaggcatattgactattgatctatccttttattgggcacttatgattcttccaaccaaaagtatgtaa

SEQ ID NO: 2887 - DNA, 1896 bp, Saccharomyces pastorianus
atgtccaagttctcctggaaagacttgattcagctcggctcacctaacaaagcgtatgagtctagcttagcatgtatcgcccacatagatatgaatgcattttttgcacaggttgagcagataagatgtggcttaagcagagacgatccggtggtttgtgttcagtggaactccatcattgcagtctcttatgcagcaagaaagtatggcgtatcgagaatggatacgattcaggaagctctaaagaaatgtgataatcttataccaattcacacagccgttttcaaaatgggcgaggatttctggcagtatcatgatggatgtggatcttgggtacaagatccggccaagcaaatacatgtggaagatcacaaggtgtcattggaaccatatagaagagagagccgcaaagctctaaagatttttaaaagcgcatgcgatttggtcgaaagggcaagtatcgatgaagtatttctcgatctaggtcgtctttgcttcaatacgctaatgttcgatgaggcatacgaattacaaaatgatatgaagctcaaggacatattaagtaccattcgcgagatattcatagggggcgattatgatataaattctaatttacctcctatacctgaaaagataaagtccttaaagtttgaaggccacgtattcaatcccgagcacagaaacctcatcactgattgggatgatgtagtactagcgctaggttctcaaataactaaaggaatcagagatactataaaagatagtctggggtacacaacttcatgtggtgtgtcaagtaccaaaaacgtttgtaaattagcttccaattacaagaaacctgatgctcaaacaattgtgaaaaatgactgtctgtctgattttttagattgcgggaagtttgaaatcacatcattttggaccttaggaggtatccttggcaaagaactaatggatatcttgaatcttccgaatcaaaacagtatccagtacatcagggaggcctggcctgacaaccctggccagcttaagagttttttggatgacaaagttagagaagcagatttcgatcgttcagcaagcaatgtcgaccctctcaggacagcagatttggcaggaaaattattcgagttgagcaggggccaataccatttgcctctgagttcacgccctgttgtgaaaagcatgatgtcaaacaaaaatcttagaggtaaatcgtgcaattcaatagtggattgtatttcctggctcgaagtgttttgtgccgaacttgcctccagaatccaggatctggaacaggaatatagcaagattgtgataccaagaacagtatctgtctctctgaaaacaaaatctaatgaagtatatcgaaaatctggtccaattacttacaagagcatcaaatttcaaagtcatgagcttctaaaagctggtgtgaaatttgtcactgagcttgacgctaaaggcaaaaatacaagatactaccctttaactaaattaagcatgacagttaccaattttgatattttagatttacaaaaaactgttgttgacatgtttggcaaccaagccaatacctttcaaagatccatagacaaagaacgcgacaagaaagattccgggtctagagatgttaaaagtggcccaagatttgaatgttcgaaatgtcagattacttttgctgatgaaagggcttttcaagagcatagagactaccatctagccttaagattgtccgaaggtctgaacggtgctgaagaaacgtccaaaaatttgtcttatggagagaagagactgctcttttcaaagaaaagatcaaatccacaaaactctgatacccctcgaaagaaacaaacttcatcctcgaaagatattctttcgtttttcgcaaaaaaatag

SEQ ID NO: 2888 - DNA, 1605 bp, Saccharomyces pastorianus
atgtccaatgcaaatttaagaaaatgggttggtttttgttttattgccatttatctttttgtaggggttccattgtggtacaagctaaccaccgtgtatagagcctcattgccaataaattacatcgaatcgctacaaaatgataaatttcaagatattcatctcgtaataccagtgtatgttaagtctgatacgtatagattcccagacattcatgatgctgttcaagtacaagttaaccacttattgaattcgaaagagcaacgggtgccatggtcgctacagattcttccttataacgagactgtgcagaagttagaggataaagacaaccagttccatgtcgttaccttaatgttagatgaattcattggttacacatcagcttatgatactaaggagacagtggtgtactatgatgacgcggctgttttaagtaatgatttgccattttttgttgcccaaactttagtggaacacactttccagttggagtggatgcatttaaacaaaacgaacgaagacgtatctacgaataaccaagttgccatttcttatgatccaaatatccatttaagtataactttgctatcaggtgatggaagtcccgttgcgtgggaaattgagcctactttaaccgattatttctcaccctttaggaagttcttgtcacctttggtaaatttcacagtagactcctctattgtctaccataatgatttgaatttacattctttgaatgggtcatctgctaacgttacttggtttgatctatcccatacaattgacctttctgaactctcttctatgacgtactatccagaggattctgcactaaatttagccatagtcttccctagtgtttcatcaacacctaacggcttagcgtttgttaacggtacccaaatcgccaatagtgtaattgcgttggactggaatagttatttagtgccacaatggggggtcataataataaacaaaaacccgctccaaccaaactctgtcatcagtgaagattatttagaacctatgatgtaccgcttttcaactgatattttccaattattaggattaaccgaaggttcacaagaactattatcaccttatatcactatagattcgtttaaaagactgacgatcttacaaaatctagacaaagccattgaaacattatggtccctagtgaaattaacccaacaatttcaaggcatgtccattcctcgcgaagtgtccgataatgtggtagaagctctagacttgagactagaaattatagatttattgaatggcccagaaaagggcggcgatatagtatggaacaatgccctacgtttgagcaatgagctggtcaaactttgcgaaaaggcattttttaatggagaaatggtccaacagaattttttcccacaggaacatatgattgccgtatatttgccattattaggcccaatatcagcagtattgttctttggtttctacaatgtaatgaaggagaagaatgacaagaagaatgggaccgagagagaagttgctaaagaaaaatcagagttggaagaagctgaaaaattgcacgctatcgacggtgaagatgaaattgtgggttga

SEQ ID NO: 2889 - DNA, 1152 bp, Saccharomyces pastorianus
atgtctttatcatgtaatattcgactcaggcgcagatggtggtttaggttcgtctttccaggaattgtttttggtttactctgctacggtacatgggcttactgtcataagttgtgctatgaccaaatctacaaacagctccatcacagatctatcgctattggtctcatttgcgtggtatgttttctagatgctattgtggttttcatatggtgccaaatggtgatctgggtcggtccaggtacacaaccccatgtagcgccctacttaatccttcccacagtatccaaggagggtgctgacgacgagggttctcaagacgtttcaatggaatacgacgcagtgattccaccaagttgttaccagtgtgacccccacggatatccgatatggtgtagtccatgtcagagtttgaagacggaacgaacgcaccactcttcagagctgggccattgtgtcccccggttcgatcattactgtctgtgggtgggaactgttattggtagggacaattacagacttttcatccaatttgttgcttatttttcgagtctattactcctgatgtggttgccaatctgcgtgtacataagggacattactcaacggcatcgcggccatggtcctcctttaaacgtgaatgtcatcttaacgttggctttggccatctttggttggctaatgaatacgagtacgttggccgcgactgtcttttacatgggtcaaaaccaaacgtcactggaagcgatcatggatagcaagaggaaaaaattcgggacaagaaagatattctgctactactcagtgcccaacaagtcacggtttgtagtagaattcgatagaaaggagtttcacgccttttggagtaagaaaacagtgcttgccaatttgaaagatttcatgggttcgaacatgctgatgtggataatccccctaggcaagccatacacgtttcattgtagaacagagctgtcagactccggaaatcatctacttccaagtggtcagagagtcacattaggcgaaatcctgggcccatatgaagagcgttttagtgactacactattcaagccattgaagacaagatagccaagggtaactacttgaccactctacgagcctttggcgatgaaataggtcctaaacgctag

SEQ ID NO: 2890 - DNA, 114 bp, Saccharomyces pastorianus
atgcaaccaatcgccaccgtctccgccgcttcaaaagacaagaccagcaacgaaaagaaggacaactacatcgtcaagggtgtgttctgggccccagcctgtgtcatcgtctag

SEQ ID NO: 2891 - DNA, 4482 bp, Saccharomyces pastorianus
atgccttatgatgatgatcacgatgatggagaaataaactttaatgaacttgtggggaatttattaagctcgcataatcaagaagagcaagcacaagagcaagcacaagagcaagcacaagagcaagagcaagagcaagagcaagcgcaagagcaagagcaagaacaaggcgaagtacaagcacaagagcaaggcgaagtacaagtacaagtacaagtacaaaagcaagaacaagaacaaaagagacaagatcttgacaaaataaatacaaatgtcgaagacatagaatccaaacacctacatagcggccaggctgaccatgatcatccggatcaaaacatcgaactacccgattttggcgatgaagaagatgaattagtatccgtcgtcgcaaatgctgttcaggatatcaacaatgacagtggcagtaaacccagcagtcatctaggaaatgaatcggaacatgaagtgtccaatacactagatgataaccacgaaaaacagcaacatcaagaatgggctcatatcttacagcaaggaatattacaggaggaggaagagtttgtaccggaacatacagagagacgtatcagctctagtcatcaccatcaccatcatcaccgtaccgatgaccagcttgaccaagatgatgaaaatttgagaatggctatattagagtctctgcaagaattaaacacagatgatggcccagaaaaagaacaacataaacacgaacacggtacttccagtgggaaattgtccagcaagaagtcttcaaagaaaaagaaaaaggacaaatccaaaaataaagaattatcaaaggaaaaatcctcaaaaaagagcaagtcttcaggtcactccaaaaagcacacaaaggatcgttctaaagaaaagtcaagtaaaaccgctagcaatgataatgcactcgatttcagtaatatattagataatcttattcatgaaaatggagatgctacagcagacacacgtaaatcaatatcagacattcaagaacaacccctcactgacaaaaatcgcgaagacgtggaagcacaggctctcgtggaagctacgctaaaggcttttgaaaatgaattactaagttcagcgccaactgcgggccccacacaagaccaatcaaccgaaccttcaacttctactaagacagccgaaccagcacggaaaccgactgctgatgatatcccgttggctatgttgcaagctttcaagcccaaaaagagacctcctcaagaaaaaaagaaatcaagaagtaagacttctaaacctgcatctacaacaaataaatcatctgcatctgaaccagcttccaaaaaaaagaaaaaaaagaaatcagccaaagaaactaataagactcaagaaaattacgaagaagatgaattctctagggtactagccgaaatggttaaccaagtggtcaatacttcactaaaggattcatcaatcacaacatctcccgccgctcaggataacaaaccggagacgacagctggttttgttgcgtctacccaaaaccagtacccatctaccataacttctaccacagattctggtgcagctaatgacgacacccttgatttaaatcaaatcatgcaaaatgctatggctatggtttttcaaaaccaaaatgacgctgatttcgatgaaaacattgtcgaagattttaaccgcggactaggtgatctgagcgttttggatttgttgcctcaagataacctttctgggttggataagaaatcatctaaaaatctgagcaaatctgaaaagaagtcatctattttgagtaaaaagtcttccaaaaaagcatctaaagatgtgtcagatacggaaaaggctagaatttcttccaaaccaaagaaaccttccaaatcagaattatctcaggaaaagaaactacgcaagaggtacagttccattgccagcgaggctgcatctgtagctagaaagaagagatgggccaagaacaaagaattaaaggaaaaagagaaacttgaacgtcaagccgcaagagaagaaagaaggcaaaagaaaaagttggagaagcaaaagctggctgaagagcaagaagaactgaccaaaatcgttgaccgtggcccaccctatcctccggatttaagactgaccaaaagcggtagaccaaagaagccgtataggagatggactcctgaagaattgttaaagagatcacaggaggcagaaaaaccaaggaaagtgaataaagaaagaagaaaaaaggacaagaaagttaagataccttcatccacattgaggaagattcctttattcaattttgttaaagataatgttcagccaggagcaagacaccgcttaaacgatattgaaggctcgctgtcctccattggtttacacagatcgcctgacggtgtccgcagagtcatttcaagacaaaaaagtgaagataacgaatggccattatcagactcctccacatcccaaaattatgatacgcatttaaaaaccgttgtgcataaagaaaaaatctctttccaccctccctggactataccatcccaaccaccatttgctttacctgttgcaagaaggaagaaaataccaaatatcaaaaaatacaaaaagagaaacaacaattctcctcgcatttccaaggaaagtatgctgagtgcaagaaacagaattataccagctattttattaccaataataaacacattaaaggcagccgcgaagtcccaaactgctgctggagcaacccccgaagaagcaagaaggcgcttggcagctattattcagcatgctaagtccactgttattaaggctgctttacaagcaagaaaaaacagtattcaagcttctagcgccaaggaaactacaccaggattggccgtaattccgcctcaaaagaagaatccactgagaatgattccaattttcaatacgtctcgggtgaaacaacaaccagagaagtgtccgattattgtaaagggagtcaccagttcagtgtccgctgataaaaacacccctggtttctactctaacactacgagtaatgaacaggcactcaagagtattgctgccccagttaagatagaagatggtgattcacatatacatcctattccaataatgcctataacttcaaaaccgacacaagatagtgtcgaagatattaataacgcgaaggagactgctaatgttgttgacgcaaaagcctcgtcagacgctgctggtactggtgacactgaactagcgaatgacactgatactgtagaagatattaaagaggttaccaacgtcgagactgtagaagatgttgcttcaaccgaaaataagatgaacgtggaatcaaatgatcaaaagagcactccaatcgacttttctggtgttgacaagatagacgaagaaaaaccagaagataagatgaacacagaaaaagatctaaataaaaataaaagtgcgcttggtaaggaaattgagaataagcgcatactggattccgaagttcctcaaactactggcacagatcgtacaactgatgttggcgagaagcctagatcgattgctcttactgataaaccactaaatgaatcgaaaccgagaatacccatcatatttcctttgaaaagaccgcaaatcaaacctgaagttaatgtcattgatttagttcagaacttggtgaaaagtaaaatgcctgaagtgaaaaacgaatcaattgacctgggcagtaacatcacagacattctttcctccactatcactaatatcttgcccgaaatcactgctgctgatgtaaaaaattatcaatatgaagacgaaaatgtcaaatatttgaaaaagacaccaagacaggttttaaatctagacggactagttcccccatcaggtagatgcattactaaagctaagcgcattcgtcgtatcaagaaaccctctcctgacgctaccgtttcgcaggaaactaacacgaaggcaagtaatgaaaccattacttacactttcgacatcccttctccagaagaaatgcaaagcaaacgtagcgtggtgctaaagtatgccaaggcgagattaacggagagtgaattaaactctttaaaaaaggagattaataatgtaaggaaaaggagatggagagaaattaactccacaaagaactgggaatacgacgtaaaatctaggttaaggaaacgtgcgagtggattttttggagaagaggaatctgaagcgaagtccaattggattgaagaaagattccgagaaaaggctagccaggaaaaatacaagagtcgccttgaaacaactgaaagccaagcaaacaatacgaagattgtgattgatgacaaggagattttgaacattcttgctgtaaacatgaatagtctcaacacggcacgttgcattgaaaaggacattcaagagtcattcaaagaggaaaagttagcctctatacaaccaaagaagaaaaggaagaaaagcatcttaaactga

SEQ ID NO: 2892 - DNA, 186 bp, Saccharomyces pastorianus
atggtttcattacttgccttcgtgttagtttcctgcgaaacggtagcgtcaggagagggtttcttgatacgacgaatgcgcttagctttagtaatgcatctacctgatgggggaactagtccgtctagatttaaaacctgtcttggtgtctttttcaaatatttgacattttcgtcttcatattga

SEQ ID NO: 2893 - DNA, 1233 bp, Saccharomyces pastorianus
atgtcagaactgcatagcttgcttactttcccagagaggcccatttctaaaagttattatgtgccaaaactgcagcatttcttagagtgtggtatacctgctacgtacactttggagcaggttgctgcgtttgagcgtgaagaggatgataaatgcaatcccacgctagaagtatgcagtgacgatgataagacttcaaatacgacgccattgcacgtgttggcaagatcgcttcccttggatatcaatgatgaggaactgcaagtggtgttggaaatgatgaatattctttttgaatatggtgccgggtggaacttcattgactacgaggacaaaacagtaggagatttacttttagagagaaaccaagatagggaaagtcctctttataggtgtcttgtggaagccggtatctctgcagagttgctgttgagaaaactcaatggcggtgacgtcgaattcttagacacggatgagtcggaggaagcgaatcctgaacaaaccactaaactcccattcgatagtgaggaacaagaaccggttgccgataatgatgctaccgctgcaaaccaaaaagtgtacctacagacaaaattagagtacaaagacgatgcgctcatcacaaaggataataaggacggtgttatgatggattgggaaactaaaattatggaaattgcctccaagactctattccccgaccctaaggccactggatccgccacaattttgaacattggcttcggaatgggtatcattgatacttttattcaagctcaaaaaccttaccgtcattatatttgtgaagcccatccagacgtccttgagaaaatgaaagaagacggttggtacgaaaagaataatgtggttattttggagggtagatggcaagatactttgaataagttactagacgaaggtgaagttttctttgatggtatttattacgatacatttagcgagcattatcaagatatgttggacttatacgatgtcatagtaggcttaatcaaaccagagggtgttttctctttttttaacggattaggtgctgacaggtcgttatgttatgatgtgtacaaaaatattgttgagattgatgtcggtaattatggtatgaaatgtgactatacaacgtattctttatatgaacagctaccagattggaatgatgtcaaaaggtcttattttaactgtaattattactatcatccacacatcacatttgtctag

SEQ ID NO: 2894 - DNA, 528 bp, Saccharomyces pastorianus
atgaatggagatgagaacaaaaatcgctacaatgaagttgcgacccctatagcgggggatgcttcaagtaagcatggacttaaagcagagcaaaatcaaggtgagaacaacaataactacagtaatcgtgataatggcattacagatataaatagtaataagaataacaactataataactcacaaacgggaagtataccatcctttccaacaaagggatcgaaaaacgttgaaaatacgggcaatcaaaacataaaaatagaagaatctagtggttcgaacttgacgatggaagagtcatctgattctaaaacttccaaattagaaaatgtgaatctcgcttccacagtaggcggttctcaaactaggaagtatttgaatgcaaacgtaacgccacacctattagcgggtatgaggctcatagccgtacaacaaccggatgatccgttacgtatgttaggggaatatctaatcaatcaaagcgaaattcagaaaagcggagaaaatgggaacaatgttagcgtatga

SEQ ID NO: 2895 - DNA, 855 bp, Saccharomyces pastorianus
atgcctcaaggaatcattcaaccaagtacatctgaccaacaattccaaggtaaatcggatgggtatgaatatacagtagggcctaaacaggttattacaagcgaggcctctgccgcttatgtgccttccaagatatattctgagtctcttcttttcaaaaagcaagaagtttctttatcagcaatggctttcttgttccaagaaatgatttcacatctgcacagaacgtgcaactctacaagtgactttgaaactaaattaagtgattatggacataacattgggatccgtctcttggaattgctaaatttcagggcatccgtctccccaagttccctttccaggacatctgccttcctctcacaaaacgaatcctcttcaaagtcactaaatgcatcaaattcatcaaacgttttgtctaacgccaatacaacaacttcatcgtctgccaatgaccgatttcaagaaaagcaaatggaatccttatccaattatatcacgaagatgagacgccgcgatttgaagatcctcgatatactacaattcatccatggtaccttatggtcatatctttttagccacgtaagtgacgatttagtcaagtcgtcagaacgtgacaatgagtacatgatagtagacaacttccctaatttgacccaattcattccaggtgaaggtgtttcttgtgagtacttcgtttgtggtataatcaagggatttcttttcaacgctggcttcccatgtggtgtaacggcacaccgcatgccccaagatgggtatagtcagcgcaccgtttatttgattcaattcgatagacaagtactactaagggaaggtttaagatttggttcgtag

SEQ ID NO: 2896 - DNA, 1698 bp, Saccharomyces pastorianus
atgatgactcacgcattagcaggcgaacagacacgtcttgtttctgggtctacctcgagatctcgtccaaacgggagacgtatctccaagaggtccaaagtagtcatagccacggtgatctcgattggtttgctactagcgttggtccacctggcctttcccagcacatttgcattgcgttctacaccaaacaaaaagaagaatgtcatcttcttcgtcacggatggtatggggcccgcctctttgtccatggctagatcgttcaaccaacatatccatgatttgcctatagataacatcctaatgctggaccagcattttatcggttcctccagaacaagatcttcggactcgctagtcactgactctgctgcgggcgccaccgcatttgcatgtgctttaaagtcttacaatggagccatcggtgtagatccacatcaaactccatgtggcacggtgctagaagcagccaaattggcaggttatttcactgggcttgtggtcacaacaagaatcacagacgctactccggcgtcttttagctcccacgcagacttcagatggcaagaagatctcattgctacgcaccaattgggtgaataccctctcggtagaatggtagatttgctaatgggtggtggtagaactcacttttatcctcaaggtagtgatgcttctccttacggccaccaaggttccagaaaagacggtagagacttgattgacgaagctcagtctaatggctggcaatacgtgggcgaccgtaaaagttttgactcgttgctaaatgcccatggcgacaatgttactctgccgctgctgggtctttttgcagacaacgatatcccattcgaaatcgacagagacgagaaggagtacccttccctcaaggagcaagtaagtgtggcattgaaggcattggaaaaggcttccgacgaggacgaagactctaacgggttttttctaatggtagaaggctccagaattgatcacgccggccaccaaaacgaccccgcctcccaagtgagagaagttcttgcgttcgatgaggcattccaatatgtcttagaattcgccaaaaattccgacactgaaaccgttctggtatccacctcggatcatgaaacaggtggattagtcacctcgaggcaaatcactgctagttatccggaatatgtttggtatccacaagtactggccaacgccacccattcaggtgagtttttgaaaaagaaactagtggactttgttcacgacctaggcgccactggcaagctagaaaatttcatcaaacatgaaatcttagaaagagatttgggtatcttcgactacaccgacgatgatgtgaatacgttgatccatttgggtgataacgcaaatgccattcaagagaagttgaacgacatggtttctttcagagcacaaatcggctggaccacacacggccacagtgcagtcgatgttaacatatatgcatacactaataggaaaaccacatggtctcgtatattagagaaactgcaaggtaatcatgaaaatactgaaatcggtcaatttttggcagactacttggagctaaatttgaacaaagtcactgatttgattcgcgacaccaaacactcattgaatttcagtgctacagaaataactaatgaagttcctcactacgatgaatactatcatgaattgtccacctga

SEQ ID NO: 2897 - DNA, 951 bp, Saccharomyces pastorianus
atgagtattactgctactagaaggagaaatcaagagaccgtctgttgcaagacaacaacgacttccatcaaggtagaagcgctcaatagtaaagccaccttgaggaaggagaagctgcttcacgattttcatgagctgccggattggcaaagagataacgataagattcttactgggtacgtacgcgagacgctgtcgtggaaaaagtgtttgtattccatgttttactggaataacgagactgtgaacatctacacgcacttagtgccagcaatcgtgtacttcgtgttcggtgtcacgcttacaaactatttcctcattcccgtgttcccctccaccacgtggtccgattacaccgtgatcaatatttttttaatgggtgcgttcctgtgtctaatgtgcagcagttgtttccactgcatgaaacaacactccgagaagcagagtgatttctggagtaagcttgactacttgggaatcatcagcttgatctcatgctcgatgattcctataatatacttcggctacttcgaccacgtatcttacttcagtctcttcacggtcgtcacgctggtcctggccactttttgcaccatctgtgtcctacatgagaagttcaacacttctactttccgtccctttagggccatgttttttatattattcgggttcagtgggctcctcccattgactactggtcttttcaagtttggtcttcaaggtgtgcttaacaggataagagtgagctttgtgttctgggaagcgctcttttacatttcgggggctctcatctacgggttcaggattccggaaactttggcgccaggaaagtttgactttttcggtagctctcatcaaatattccacattatggtcgttctcggttccgtttgccatctaaaggtcattatcgattcttataaattaatgcattctcatttccattcttag

SEQ ID NO: 2898 - DNA, 372 bp, Saccharomyces pastorianus
atgagcacaagattaaaggctttggatgcatacagacacggcctgagagctactcgaatagcattccagaatgatacgaaagtactattagctgctagagccaaaatgcggtcagggatggtgtctccgcccaatccaaaactcaccacagaggagcaggttcaacatttagaagatgtggctattttcttgagacgaaacttggttcagggtcaaaaagttgatgacaccgatatgaaggagcccaggtatcatctgaacattcataaagacactgaattgggtgacaatgagactatcgcggaccccacagcaagagtgaaaacaaacttgaaggcaagaccattcaagtgctccgatagaaagcactga

SEQ ID NO: 2899 - DNA, 3018 bp, Saccharomyces pastorianus
atggcaaaaaagaagataaaggtcaataacacaaaggtacaagataacgatgaaagagaatctaaaataggcatcgaacccccccatgaagaaaacgatgagaccggaacgaaagataatggccaagaaaccctcgaaggagaaaatcagcagtcgagtttacacagtgctaatcaagagggtgtagaggaagctgacaaattctctcaagaggaaagtcgatcaactgacaattcaagtttcgacaaggatacaacacgggaagccatagaaaacgacgtcacaaaagaagatacttcaggaacagaggccggaatgtccacaaatgataaccagaaagaagacttgtcactcaagataaacgaaggccctttcagactctccaccgtattagaaaatgtaccatcagacttggcatacacatgctgtgaagcatatgacaaccatatatttttggggactactactggtgatcttctacactatttcgaactcgaacgtggaaactatatgcttgtctctcaaacaaagttcgacgcagattcagatgcaaagatagacaaaatcttgcttttacccaaggtagagggtgcgctgatattatgcaacaatgaactagtattgtttattcttcctgaatttgcgccaagacccaatacggtgagactcagaggtatcaatgacgtccttgtctgtaatttttctcgaagctcaaacgcttatagaatatacgcatttcacgcagagggaataagactgcttaaaatatctgcaaattcattggtgttcgccaaaacctttaatttcaaactgatagataaagcatgtgcacacgaacaaacattaatgatttcaaagctaaacaattatgagctcgtaaatctaaaatcatcgcaggtaattcctctgtttcgaataagcgaaaccgatgaagaactggaacctataataactaatttcaatgacgataatgaatttctagtttgttctggaggaggatcatacgaaaatggtgctatggctttggtagtaaatcatcatggagatataataaaaggaacaatgctactgaagaattacccaagaaaagttattgtagagtttccctacataattgtagattcggggttccaatctgttgatatatattctgctttgtctagtgaagaatcacagttattacaaagtataaccaatccaaaaatagatctgaaaatttcaaggacagataaagttttcacgaacgccaacacttctgaagaatttagaaagaaaatatccaataagctacgattacagcctttaacccacagcgacaacaagtttagaatagaaagagaacgtgcattggtcgaagagtcctatgaggagaaatcttctttagtcatttataataatctaggaattcatttactagtaccgaaacctatggtcctaagttttacatcctatgatgaatctgaaattgataatattgaagatcaactgaaaaagctttcaagaagggatttgacgaagtttcaaaaaattgaagcaaaatatcttatatctcttttattgttcctaatgatgctacattatgatcacatagaagatgaggtaatgaaaaagtggtgcgaattttctgataaggttgatataaggatattattctacttacttggctggaaagtttacagcgaaatctggtgtttccgtggattagtagatatagttgaacaattgaagagtctgaaactgagtaataaatgtgaaaacgtcattaaaatgattttgatgataaaatctgatctgaagaaaagagacaaaaatggaattctagtaactgattttagtgacataatgaaatccatcgatataaccttgctcggcttgcaattggattcagggagcgaagtaactatagacatgtttgaacaggaaagttttgacgaaattataaaggaaatttattcacgtggagacgatatttctagaagaagattattaatcgatatccataaagaaaagggagagtatgtcgaaccactgaaacttttgaaaagggcaaaagattataagtcgctgatatcatttattgaagaaaacataagatgtcttcctgaggaatatgttaaagaaacactaaatgatgatcttattatcagccttagacaaggcaataaaaatgcagacagcaatagtatcaaacaggttctaaaaatattagacattgctggcataagtaagaatgagtttttagacaggataccagaggaaggtatatcattgaaagtatcgttcatagaggagctgggggttcagaatagtaaggattcaaaatttctttttaactattatttgacaaaattacaagagataatcagcaaagataaaatatggtttatacttgacgatttcataaaggagtacaaggacgatttggcctatgacaagacggatataacaagttttattgacatcaaattaaaacatagcgtgaagtgtgagaggttctcaaaatactatggaaaatgtgaaaacctgaaaatagaaaatatagaagatagtgaatttattaaatttactttcggggaaatttcaaagatcgatagagatcacatattatgcctgctattcttttccaatgatctcataaaatggatttcgcctaaagagttattgaaagtatacctatcgttcaatgactttagaagtgtagagaaattcacggataagccggatctgattgcagtcatgaaacaatatttgaagataacttctttaaactactcagttgagttgatttctaatttactacgaagaaattttagcctcttagatgacatagatacacaattaatggtgcttgaaactataccttctgactttcctatgcaatcaatatccgaattacttttaaagatgattatccagtaccaggataagagagaggattctaacttacgaaagttcttactaaaaaatcaaatttctatttctgatgaactgaatcggaatttcgaagctcaagaatga

SEQ ID NO: 2900 - DNA, 1158 bp, Saccharomyces pastorianus
atgacatttctagaaaacttagcggttttacagaatgcgctactagaccatttgcaaaagtggagcacgatctcccgcaaaaaggcattcggagaaggtaaactatatcacaagggcggtattgcgcttgatgacggcaatgacggtgaagaagaagaagaagaagttgagtttggcgctttgctgggcacaatagcgagcaaactacttgatttcgagtcgatactgagatgcagtattgttgagatgacgtacacatatccaggattgaaacttcagtgggagaaaagttccagatacgaccaatgcgataaattgaacattgtgaagctagataaacagatggttgcggaattgtatgcccagttgatggaagagctcgattctgtattacaattcatcgattggttttactgctaccgccttaaggtcaaagagatcctacgacaacaccatagacgcgaccttgcctggaatgacgaggaaagggaccaggccataaggtcacatgctgtggattacgagaagatgcatcaggggagcgaccgcgaagcgtcgtcgttgacaactccagcgtccatgtcaatggaaaatgcaagcacgaaggataaactcttgagcaagacaaaattactgaccaacaacctcgtgagaggcaatcaaattctacagtcgggtattttacaaagcgacctaaacctggacgagctgagagcccaaacgcactcactgatgcaagtcgacgacaagtacacccagtttgaaaccgttttcaagaaaacggcagacttggtcaaagtcttggaaaatgcctcccaccaggagaagcgagacgtatacctgtcactcggctttctcgtgtgctgcgtctcctgggttctctggcgtcgtattttcaagctgcccgtgaaagtcggcctatggctgctgttcaagtttttcaagggtatactgatgaccttaggcctagtgaagggctacacggcctcctcttcgtcaccgcaggtccccagtctcgtactgaacgcgccatttcttgccactacgtcttccacgtccacgcttgtggaaccatcagcgtctgaaccagttgtcagcaacatccaacgagctgtcgatgaagccatggatagaattatctcccacgacgagctgtga

SEQ ID NO: 2901 - DNA, 399 bp, Saccharomyces pastorianus
atgatcaacaaactgatgtaccgctccgtcaggctcgccagccataacagccagcccttgctacctcccttggttctatacagaagaatactaaggcagcacaagctgctacccaccgtccagaaagaaatgggcgaccagtacgtgcggaacgaattcaaactacacaaagatatcgacaacccattgcacgtggtcgggttcctggcttcgtggcaagactacctacacatgatttccaacaataagtggaaagatgcgactttatcttcggagactctggagaaactgtcccctgagcagactgttcagctatatgaactgatgaaggaaacgcagaagattaaccacgatactgaaacgacgccaaccaagaatataaaaccaactaaggactag

SEQ ID NO: 2902 - DNA, 1773 bp, Saccharomyces pastorianus
atgacgaagcctaaacaggagactgaaatagaagagaaacacatgtacactgagccggcctcaacgttctttcatgacgtagaagcttctcaaacaaatcacagacgtggatcattatcgctgaaagatgagaagagtaaggagatgtacccattgcgctcctttcccactagagtcaatggccaggataccttctctatggaggaagatatccaggacgaggacgaaggcgaagtgcagaacgctgaagtgaaaagagaacttaaacaaagacacattggtatgattgccctcggtggtaccatcggtactggtctgttcatcggtctatcctctcctctaatgaacgccggccccgtgggctctctgatatcttatttattcatgggttcgttggcttattctgtcacacaatcactgggtgaaatggctaccttcattccagtcacatcctctttcacagtcttttcgcaaagatttctgtcgcctgcatttggtgcagccaacggttacatgtattggttttcttgggcgatcacgtttgccctggagcttagtgtggttggccaagtcattcaattctggacgtacgctgtcccattggcagcatggattagtattttctgggtagttatcactgcaatgaacatgttccccgttaaatattacggtgaatttgaattctgggttgcctctatcaaagtcatagccattatcgggtttttaatctactgtttttgcatggtctgtggtgcaggtgtcaccggcccagtcgggttccgttactggagacacccaggtgcatggggcccaggtattatctccaagaataagaacgaagcaaggttcctgggctgggtttcctctttgattaatgctgcgttcacattccaaggtactgaattagttggtatcactgctggtgaagccgccaacccaagaaaatctgttcctagagccatcaagaaggttgttttccgtatcttgaccttttacgttggatccctgttattcattggtcttttggtaccatacaatgatcctaaattaacctcagccacttcttatgtctctacttctccatttatcattgccattgaaaactcaggtacaaaagtattgccccatatattcaatgctgttatcttaaccaccatcatttctgcagcaaattcaaatatttatgttggttctcgtgtcttatttggtttagccaaaaacaaattggccccaaagtttttttcaaggactactaaaggtggtgtcccatatattgcggttttcgccacttccatatttggtgctttagcttacatggaaacttcgaccggtggtggaaaagtattcgaatggttattaaatatcactggtgtcgctggattcttcgcttggttatttatctcgatatcacatatcagattcatgcaagctttgaaataccgtggcatttctcgtgatgaattgccattcaaagccaaactaatgcctggactggcatattatgctacttttttcatgataatcattatcatcatccaaggtttcaccgctttcacaccaacattcaacggtattaatttccttgccgcgtatatctctgttttccttttcttggcaatttggattttatttgaactgatattcagatgcagatttttctggagaattgaagacgtggatatcgattccgacagaagggacattgaagccattgtatgggaagatcatgagccaaagacactttgggacaaattttggaatgttgtaggataa

SEQ ID NO: 2903 - DNA, 3084 bp, Saccharomyces pastorianus
atgaccgggaaagtcaatagagacctattcttcaaattagcttctgatcttcaagaagaacgcctacatgcagctgtcgctttgatcaaggacttatctgctttagaattacccaatgattcagaagaatggtcatatgtattaaatcgtttgatcaagggtttggcatctgatagaaatagtgcaagattaggattttcgctatgtttaacagaagtaattaatctagctatgaatatgccatccggtcagcgtccgaagggtttggaatcaatgaatgaatttttggacacactgtcatttattctagatataaatgtcaatgacggcggtaagaagcctatcaagggtaaagacgaacgtgggattttatttgggaagctatttggtttgaaatcactattgaatgaacctttgttttcagaaatctttgtggaagacttaaaaaagggtaatactgaattcattatacgctttatggaacagttgatcgatttagctttgagaaaaaactggattaaagaaccatgcctttatagtcttttccagacaataaaaatgctactaccaactatgaatggaagcactgccaccgaaattcttttaacgtatgataaatatgatctaacattaacaaatgaaggactgtcaacctacttgttattgaagtatgaaagtgataaagacctagtttcttcggcactagatttgaagaacttgggctggaaaaacaacgatcctttagcaaaaggaaatctacctctattaacgaaagtcctaagggattctggtgtcgctccagataccaatggaaaggcacaagaaaataccaaaaagcaaaaaaatacaaattggaacccaagacttcattttgtttggaacattttgttgcctttattcggtagtgggaaactagagaacgcagagcacatctcgaagaaaagaaagaaagtcagcaacaaaaaagtccaaagttcgattcaatttccagagttttggcaaatggctgtggatgaatcatttttcaatgaaaaagcatcaagtgaaagaaaatatctaggtttcttaatcataggtgcaactttcaagactgtgcctggctcttgcattggctcttgctttagccgaaatgttatgagaactttaatcaaccaatctatagactcacaaagaattttgaataagattgctcagataactctagactctataatcaaggcctgtgaagaagatcccattaataagttagtcccttgtttaaactcgatgttatttggaccccatggttctataaactttgataagctaacgaaatctaacatcacctccaaacttatcgcgattaaggaattacctgcaactgttcttactcaattattcgatttatttgtactacaattgcaggagaagaaaggcgatataccccatacacatttcgtccttgattccttacttcatataatccgtgctcacaaagcagagattaatgatgtcgaaattatcaagcccgtgttgtcgccaattgtctctatggcatttttcaagcaagcaactgatgaccaggagttagagcaattacatgaactagcaaaagaaaggctatactccattttaggtgagctgactattaataaagaaatgcgttccgaagatcctgagataaactcgtggcaatttttgacattgaggttaattttggacatggaaaaatcccataaagatgatttaattaacccattagatgaaagactggaaaagactaaaaacgaagctatatcatccttgatcgaactatccaagtcaaacactagccaatcctggggcttaagcactttgctatctatgtgtttaatacagttatatgcgggcgaaacagactctatttccgtgattgaagagctgtgcgaatttgctaaagacgaaaatagttcaatggttggtattactgaaatactgttatcactactagctcaaaagaaggcattactcaagaagttgagtttaataatatggcaacagtttatcggggatgttggattgaaagaattgcaaatattattggatgttttgaaagccagagagaacaaacaagggtttgcccagttattcgaaggcgaaggagagtttgaagaagttgatgaagaagaaagtgctattgaagacgactcgaaaagtgaaagcgaaagcgaaagcgaaagtgaaagcgaaagcgaaagcaatgatgatgaagaaagggatgaagaagatgaagccaacgaagacgtcgtgaatatcgataaggaagctacaagtgcactaatcaaagcgctaaacttacctgataatatagtcaacgataaaggggaagtcgacatggaccagctcgatggaatttctgatgatggcgacgatggcgacgatgacgaagacgaagaatcaatggatgatgaaaagatgatggagttagatgatcagttatctgaaatcttcaaacgtcgtaaagaagcattatcgagtatatctaccggaaaccagagaaaagtggaagtaaaagaatcaagggaaaacgttatatctttcaagcatagaattgtggatatgttaaccgtttacgttaaacactgcgaaaaattggccattgctaataaaggtgaactttctagtgaaataggaggtccattgagcaatctgatttactttatcatccccatgatcaaatgtatcaaagagactcttgataggccacttgcggacaaaatttctaaattattaaaaggaaaaatcttcaagataaaaacgagtgcatttaaaaatctggacaaaactattgggcttctagatttattaaaatcaacacacaaagagatattaacttccaagccaggccaacatgctaatgtgttcttttccgcatgttcgacaagttcattatttttgagcaaattatatgtcgatattgacggcgaagataaatttgatgatttgatcgacttgtatgctagcactactaaagagtggacgcaaaagggaaaattcggcgtcaatgttctcattgatttcgttaattggttatcgtcgaaaaaggaaggtgttgaaaaaaaatga

SEQ ID NO: 2904 - DNA, 1536 bp, Saccharomyces pastorianus
atgatgatatctttgaagccaaatgttgttcgaatcttcagacaagtgcagcattgcagcatccgcatttgtcggtatcaatctacgaatccgaagaagtccctgacgcccttgcaagaatatgacaagctagtaaaaatggggaagctgcaggacgatacatatcaacgtggtattatctcctccttgggggaactgtatgattctttagtccgatatgtacctccggccgtcaaaacgcccaaccctgtggaccaattgggtggttggtggttgaaaggcctcaaatctgtcttcggtcgtggcaaatccaaaaaccttggagcagacgtggacgtatccagaattggtaattcaatacctcgagggatatatttatatggagatgtcggttgtggtaagacgatgttgatggaccttttctacactacagtccccaagcatttatcgaaaaagagaatacatttccatcagttcatgcagtatgttcataaaaggtcgcatgagattgttaaagagcaaaacttaaaggagttcagcgatgcaaaaggcaaagagattgacacagttccatttttggctgcggagattgctaatagttcgcatgttctttgctttgatgaatttcaagtcactgacgtggcagatgctatgatactgaggagactaatgacagccttattatcggatgactatggtgtggtactctttgctacttcaaatagacatccggatgaattgtatattaatggggtacaaaggcaatcgtttattccatgtatcgagttgataaaacatagaactaaagtcatatttttgaactcgccaacagactaccgtaggattcgaagaccgatctcatccgtttactacttcccagcagatagcagcataaaatattcatcaaaagagagtaaaaattgtcgggaaacccatatcaaggaatggtacgactacttttctcaggcttcccataccgatgactccacagattttcattcagttcataagacattttacgattatccattgaccatttgggggagagaatttaaggttcctaaatgtacgcctcctcgagtagcacagtttaccttcaagcaactgtgtggtgaaccgttggctgcaggagattatttgacgttggccaagaattttgaagcttttatagtgacggatattccttatttatctatctatgtccgcgatgaagtgagaagatttatcacgtttttagatgcagtctatgacagcggtgggaaactagcaaccacaggtgcagcagatttcacttcattgtttgtggaacctgaacaagtgctaaatgaatttgaattacgcccagcaattaaggaaaacgatgcagtcgacagtgaactactagataagatggtcgaaaagcacggattttcgaaagagattgccaagaaatcgcagatgtttgccctcgatgaagaaaggtttgccttcgctcgtgccttaagtagactgtcacagatgagctccaccgattgggttaccaagcccaaatactga

SEQ ID NO: 2905 - DNA, 876 bp, Saccharomyces pastorianus
atgtccgaatatcagccaagtttatttgctttaaatccaatggggttttcaccattggatagtttcaaaccaatcaacgaaaacacttctaccttcacctcatcttctatcgctaaaccagtcgttggtcaattaatcttcgataattttatcaaggctgaagaagacccaatgatcaagcaagatgctccttcaaaccttgattttgattttactctacctcaaacagcaactgcttccaacactgagactgctttaccaatttcagaactagacgccgctgtggtagaatctttcttctcttcaagtactgattcgactccaatgtttgaatacgaaaacctagaagacaattctaaagaatggacttctctgtttgacaacgacattccagtcacctccgatgacgttttatcggctgacaaggcaattgaatctactgaagatgcctctttggtaccatctaacctagaagtatcaacaacttcatttttgccaacccctatactagaagatgctaaattgagccaaaccaaacgtgcaaagaaaccaaattctatcgttaagaaatctcatcaccaccaccatcataaccacgatgaagatgaagatgatgaagaatcgagactagatcacttaggggttgttgcttacaaccgtaaacaacgctcgattccactgtctccaattgtgcctgaatctagcgatcctgctgctctaaaacgtgctagaaacacagaggccgcaagacgttcccgtgcaagaaagctgcaaagaatgaagcaactcgaagacaaagttgagcaactactgtccaaaaattatcagttggaaaacgaggttgaaagattgaagaaattagttggtgaaaattga

SEQ ID NO: 2906 - DNA, 1011 bp, Saccharomyces pastorianus
atgaatgatgaagacaagacgatattagaaaatcaaagtagttcgtcactagcgaacgacaattgtacaaccacgatcaaaacaaaaagtccgaaaaagaatagtgatccgagagttactgctattgcgggcgctctatctggtgttttatctggaatattagtttgtcctttcgatgttgcaaaaacaagattacaagcacaaggtcttcaaaacattagtcatcagagtaaacattataatgggttttttggtacgtttgccaccatttttaaagatgaaggcgccgctggactttataaaggtttgcagcctacgatcttaggatacataccaactttgatgatttacttttccgtctatgattttagtagaaagtattctgtcgacattttcccgcacagtccatttctctcaaatgcttcctctgctattacagcaggtgccatctcaactgttgccacaaatccaatatgggtagttaaaacaagacttatgctacagacaggcattggagaatactcaacccactataagggtactatagacactttcaaaaaaattattcaacaagagggatttaaggctctttatgctggtttagtacctgcccttttggggatggtaaatgtggccatacaatttcctttatatgaaaacttaaaaattaggcttaaatattcagaatcgactgacttaccaacagatttaacaagctcgaactttcaaaaattgatattagcgtctatgttatcgaaaatggtagcctctactgtgacttatcctcacgaaattcttcgaactcgaatgcaattgaagtcagatcttccagatgctgttcaacgtcatctgctcccgttgattagaattacgtataaacaagagggttttgctgggttttattccgggtttgctactaatttagttagaacagtcccttctgctgtggtaacattggtatcatttgaatactctaagaaatatttaagcaatctttttgataaagtataa

SEQ ID NO: 2907 - DNA, 2295 bp, Saccharomyces pastorianus
atgttggcacttcggagatttatattaaacaggaggtccttgaggtcatgtactataccaattcttattggtgctgtaatcattattttaggcctatttcaactggtaatgcgccgagatgatacactcatacagcctgtcgattcaaagaacgggaacaatgcaaaagtaaagagcgaggaccaaaaagtgctagagaaagcctttgggtctcctgtaaaagatccggtatacagtgttccagtatctccactagaactagtcccattttatgacaggttcatagattctaaaagaaaatctagttggttgattaataaaaatagttactataaacatttcaatgagttaagcctggatgaccgatgcaaattctatttccgtaccctttacacattggatgatgactggactaacagtgttcataaactggtgtacggcatcaatgacgatatatctgatgaagctaaagaactcaaaaaagattccgatggaaacccctttccagatgaacaatccgagaagctataccacagaaaatacgatatgtttttatcctttgaaagaatcagagcttacgataagtgctttatgcaaaatagtccgattaatatccaagacgttttcccaaaaaaggatagtaagccacaaagggagagcgttcaatcgaaattaatcaagacactaaatgtcacatttccatcaactgatacgcagaattacaagaagtatgaccaatttgaattcgagcgcaagatgtttcccttcgtaaatagttttaccgctgaaacattccacgaaataatgccaaagatcacatcgcctttcggaaaggtattggagcaaggtcagttacctaagttcaaccatgagacaggtaaggtcgatgaattctttgaatatgaatatgacccaacaaaaaccttctgggccaattggagggacatgagcactaaggtatgcaagcgtggtatcgtgttgagtttaggtagtaaccagtttgcattagccgttaaattcattgcttctttaaggtttcaagggaatacattaccaattcaaataatttatagaggtgatgaactgccacaagatatggtagaaaaactcatgtacgccgctagaagccctgagttcaaaccagttgaaaatagttacgacaactctactaatgttccgcaagaactttggtttttagatgtgtctaataccgtacatccggattggaagaatgacttcggtagttatagaagtaaatggctggtagtactgttcaatcttttccaggaattcatatttttggatatcgatgcgattagttaccaggaattagataaatatttcgaaagtgcggaatatcaaaaaacaggtactgtattctacagagaaaggtcactgaatgaaaacgtacacgagagatgtattgccaggtatgagacgcttctaccgagaaaactggaatctgaaaacttcaagaattcacttatgttcgatgctgaaaatgttctcaatgaatgtgacaagctcttaacaacagaggagtacatattcaaagcattctttcgtcatagaagacagcaccagttagaggctggtttatttgctgtagatactgcacagcatacaatccctctagtgcttgccagtatgattcatttagccaaacatacaagccactgtacacatggtgataaagaaaatttttggttaggattcttagcttcaggccatccttacgcactacagaaagtgtattccggcgcgattggcgattacgtcaagaaaacggacttaaatggaaagaggcaagaagctgcggtcgagatatgttccggacaaatagcccatatgtccactgatgacaaactactttgggtaaatggtggagggaccttttgtaagcacgaaaatgcagccaaaagtgattggaagaaagacggtgacttcaataaattcaaagaccaattcaaaaacttcgaagaaatggaaaagtactattatataactccaattagcagcaaatacgtgatcttacctgatccgaaatcggatgattggcatagagcatcagcaggtgcttgtggtggttatatatggtgtgcgacacataaaacgatcttaaaaccatacagccataatgaaagaacgactcacggtcgactaatcgaaatcgatgccgaccagcaggcacgtataaacgctgtcaacactgtttggtcacatgccaataaagataatacaaggtcattaactgaggatgagataaaaaagttagatacttcaagtcacgagtag

SEQ ID NO: 2908 - DNA, 438 bp, Saccharomyces pastorianus
atgatgggccccgacacaaaacactccgcaaaggccaagatctttaccaagaaaagctcgccttcgaccaaggaacacatccggcccaggaagcctcaggtagccgttccgccggcgcaaaatctgcccaacggcgacagaccaaacttcggcaacgctatcaagcagcatcgagagccgaggggccgcgccgccagggcaagacacgaagacgccgaggcgacgatggttactgtcaacatcgacgggttcttgagcgataagacccctaaaaaaaagtcatccaggaataagaagaagaaatcaagacacccccaagatgctgcggtgacaatagattccaaagcacgggaagctacccataccgttttcgccggtgcctctttcactaccgatatcccgcacgagaaagcactgcccaagcctagttttgtttga

SEQ ID NO: 2909 - DNA, 1497 bp, Saccharomyces pastorianus
atggactataaaaatgattttattgcaagccctgacccacttctaaatggcaggcataactcctcagtgtatacagatttgctatctgcaagcaatgcttcaaaagagcacaaatgcaagcaacaacagcaacaacagccagtgggccttataaatgctaattttaatccttaccatcaaaatactttaaacgaccgctccgtgcaaaaaaatttgggcccaatgtttcaaccctttggtatagatgtcactcatatgcccatcaccaaccctcccattttccagagctctttgcctgcgtttgatcaacctgtgcataaaagacgtatatcaatctccaatggacaaatcagtcaattgggcgaagacttggaagccgtcgaaaacctttacagcattgagcctcctttcctatcgtcaaagacggaacacaatcctgagccgcaactagtcgcaaatccaagtacagccacgtatccaagtttcggctctagcgaactgccgaacttggcacaaccacaagctaccgctgtacccgaggttgttcctcaggcaagtggccaaaatatttttcctcccccaacaccattcgatagtaacagcagtcttcatttatccgcagcaactgccgctgctgccgctgccgctgccactgctgcctctcctgttccacgcaataacgccgctattaaccaagcatacattaatatgcaactccgattacaagcgcaactgcaaagccaagtttggaagagtgcgcaggtaagcgtaaatccatccaccccggcgtcttcttcttccgtctcttcttctacttcatcaacttcttcttcttgccaaaatagtcatgatcaaaataacgaacccctacctatctattcttcaatacctcacaacggtaataacaatacagcctgtaataacgcaataaaaaacgacggtacaagcggtgcagctgatattaactcaacaaacgtttacttaaaacaggaatataacgaaagaattcctgcggtcggtgataacacaaataacaagttagccataccaaaccaatctgtttcatcaccggccttagcgtctgtgactactgctagctctcagtttgtacatgagccttttctgcggaaaagtggcaccagttctggtgacgttgaaactactgccaaagcatggaaacgcgcaagactactagaacgaaatagaattgctgcgtccaaatgcaggcaaaggaagaaaatgtctcaattacaattacagaaggaatttgatcaaataagcaaagataatagcataatgaagaaaaaattagaaggctacgaaaaattggttcaaaaaatgaaaaaagtctttaaagtgcactcacaagaatgtgcgctacccattaataccaaaggtaatccagaggctagaaacgcacattatcacactagcgatggttgtgtgtctttgaagatgattgaagaattgattgaaagctcgggtctggatggctga

SEQ ID NO: 2910 - DNA, 1578 bp, Saccharomyces pastorianus
atggactttcatactacatcgagccattcaaactgggtcgtacaaaagttcggaggtacttctgtcggtaagttccctatccaaatagtggatgacattgtaaaatactactccaaccctgacggtaccaacaatgacgtcgctgttgtttgttcagcccgttcctcatacaccaaggcggaaggtactacttctcgtctcttaaaatgttgtgatttagcctcgcaggaatcagagttccaagatattattgaagtcatcagacaagatcatatagataacgctgatcgttttattctcaatccggccttacaaaccaggctagtcgacgataccaataaagaattagaactagtcaagaaatatttgaatgcttcaaaagttttaggtgaagttagttcacgtactgtggatctggttatgtcttgtggggaaaagttgagttgtctgttcatcactgccttatgtaacgatcgtggttgcaaggccaaatatgtggatttaacccatatcgttccttctgattttagtgccagcgctctagacaatagtttctatacctttctagtccaggcattgaaggaaaagctagtgccttttgtaagtgctaaagaacgtattgttccggtcttcacaggattttttggtttggtccccacggggcttctaaatggtgtcggtcgtggttacactgatttatgtgctgctttaatcgccgtcgctttaaatgctgacgaattacaggtttggaaagaagtggacggtatcttctccgccgatcctcgtaaggttcctgaagcacgtttgttggatagtgtgactccagaagaagcttctgaattaacatattatggttctgaagttattcatccgtttacaatggagcaagttatcagagccaagattcctatcagaatcaaaaatgttcaaaatccattaggtaatggtaccattatctacccagataacatagctaagaagggtgaatctaccccaccacatcctccagagaacttatcttcatccttctacgaaaagaggaagagaggtgccactgctattaccaccaagaatgacatcttcgtcattaacatccactctaataagaaaacattatctcatgggttcttagctcaaatatttaccattttggacaaatttaaattggtcgttgatttgatctctacttcagaagttcatgtttccatggctttacccatccccgacgcagactcactaaagtccttgagacaagctgaagaaaaattaaaaattttaggttctgttgatgttacaaagaaattatccattgtctcattagttggtaaacacatgaagcaatacattggtattgctggtaccatgttcaccactctggcagaagaaggtatcaacattgaaatgatctcccaaggtgccaatgaaatcaatatatcctgcgttattaacgaaacagactctataaaagcactacaatgtatacatgcgaaattgctaggtgggcggacatctactccaagccaattcgaacacgccgttgatgaacgtttagaacaattgaaaaggctaggaatctaa

SEQ ID NO: 2911 - DNA, 1659 bp, Saccharomyces pastorianus
atgtatattaaggcagagcagaaacccccacaattcaaaaagaatgatgagaaatcacacagaaataaaaatcagcggctaccggatctcgaaacggattttaaggaccacggggttaatttggacttatacaggaaggatatgaatggcagcgctgaggagacgttaaactctctgaaatttttgcataaacctcaacgagtaacacagatgagagccaacaggttcccagaagaagaagtacaaaggaacactaacttaaacaagaggatttcttcggcaaggaacgatgaaaactctgaaaacgatgacgatagttccagcggtggacccgccacgggcaagactgaagcaacatcaaatagcagtgcaaagtatccattcaagatagagctgcctccgctttctccaagatcattcttagctaccccctcttacgaaactgaatatccggagaccaagtctcctggcaatgatatgaactttgaatacgatgaagagattctgattccatttgcgcctcctgtatataagaagtctggcgaactgctaaaaagctcactgaagagaagatcaaagtcgcttcccacaactccgggtataagggagagcaggggggacggttgccgaaggggaggtgatggtcctgtgttacttagaagtaaaagtgtccatttcaatcaagccactccggtaaaatacttcgcagaagacgaaagccctataaatgtcaataaaactgaacagtacgataaccgcttgagttttaagcataaaccagtgaacttgatggtagacccagatgaggaggaaaaactgttatctttgggattagaaactacttctattggtgacgatttgacaacggttgcacccaagggctttactaaccctgctaaaaatccaaatgctagtaatggcaacagtattaataacactaaattaaggaaaagtaaaagattccagagtctcgtaaaaaataaaacggtaattccaccacccaaactcaataaaaatttcacgaatggtggtagcattgacgaattccagaaccgggattcgactaactaccacgttgtcgggctctatagtaagaatttccccattttgagcaacaagaacccaaaaagtttaaagttaaacatttttattaacttgtcacaaaacaaaaaagtcttcctacaagaattatcactatacattcacagagacagcaactttctttttagtaccccatcatttaataatattcccgaaggtcacaacaacaacaacaacaatgaaggcatcatgaacaagggtaataacaccggctgtacaagattaattgtgggaaggatattggtgaaaaatattttctatgataaaagagtggtgatacgatatacatgggatgggtggaggacggcgcacgaagtggaatgcgtttatattagcaatggagatggaatcttgccgggcaccgatatggacattttccatttcattatcgacgacgccagcaaacttgatcctcggggcaggctggaattttgtatccactattccacacgcaacgactataaacgagaggaatactgggacaacaataacgggaaaaattataaagttgaggttgtcatggatggtttcaaagatccgttcgcagtagtcggttga

SEQ ID NO: 2912 - DNA, 324 bp, Saccharomyces pastorianus
atgagtagagccagcaaaataacctttacagtatcctgtctaataacggcagtgacagtggtcggagtgcattatgttcaagaaatggaaagggaaactctacatcagggtccgataaaagatgccaaacgagtcgaagagaagagactgagaaacctaaatggcactgcaccaatagatcctacaaaagaaagaaaaagatatttcaatatgagtgagcatgaggaacagaaagagctgcggaaaaaatatgaggccatgcaaccgttaagtggagaagttgttacgaaggacggagaagtggtaaaggaatctaaggattga

SEQ ID NO: 2913 - DNA, 1329 bp, Saccharomyces pastorianus
atgtcaaaaagagtggttgtaacaggactgggttgtgtgacaccactaggaagaacgttaaatgagtcatggagaaacttactctcttctaaaaatggactaacaccaatcacatccttacctgactacgaaaaggagtacaaacccagagagaagagcattccatcgacgataaccgtagggaagatcccagaagactttcatgataaggaatccgccatctccaagttactatttacaggccaagacgaaagaagaacctcaagcttcatcaaactagccgtacgtacgacatatgaagctcttcaacacgccggtctcttacgcccaaatgaaataaacattaacacatcactttgtaatttggaccactttgggtgcctgataggatctggcataggatctattcaggatatataccaaacctctttgcagttccataatgataataaaaaggtaaacccttattttgtcccaaagatcctcacaaacatggcagccggtaacgtgtccataaaattcaatctgaaaggattatctcacagtgtttctacagcatgtgcaacaggtaataattccattggcgacgcattcaatttcatccggttgggcatgcaggatatctgcgtcgctggtgcaagtgaaacgagtttacatccgctaagtttagcaggatttatcagagcgaaatcaattaccactaatggaatatctagaccatttgacacagaacgctctgggttcgtgcttggtgaaggatgcggcatgctcgtcatggagtccttagaacatgcccaaagaagaaaggcaaatataatatgtgaaatagtcggctatgggttaagtagtgatgcctgtcatatcacctcccctcctgctgacggaaatggtgccaagagagcgatagaaatggccctcaaaatggctcacctaaaaccgagcgacgttgattacgtcaatgctcacgccacatcaactttattaggcgataaagcagaatgcctggccattacgtctgcacttttgccaggaaggcccgaaagtaaaccattgtatatatcaagtaacaaaggcgcaattggccatcttttaggtgcagctggtgcagtagaaagtgtgtttacaatttgttccctgagggatgatatgataccacatacattgaacctaaagaatatactacatctggaaaatgacgagtccgacagactatattttgtaagagataaacctatagaaaaagctaatccgaaatacgcattatgcaatagcttcggatttggaggaatcaacacatctcttctttttaaaaaatgggagaaaatctga

SEQ ID NO: 2914 - DNA, 1524 bp, Saccharomyces pastorianus
atggctacccatatcaaaatccaaccggatattgactccctgaagcaattgcaactggaaaatgacgatgtttccataaatatgtacccggtgtatgcgtacttgccatcgttggacctgactcctcacgtggcatatctgaagctggcgcaactgaacaatcccaacagaagggaatcgttcctattggaaagtgccaagactagcaatgaattggaccgttattctttcatcggtatttccccacgcaaaatcatcaaaacaggccccactgaaggcttggaaaccgatcctttggagatcttggaagaggagatctcttcgtttaaagtggcagaaaacatccccggtttacccaaactaagtggtggtgctatcggttacatctcttacgattgtgttcgttatttcgagccaaagactagaagacctttgaaggacgttttgaaactcccagaggcatatctaatgctctgtgataccattatcgcctttgacaacgttttccaaagatttcaaatcatccataacattaacactaacgagacttcgctagaacaaggttataaaaatgcagtggaaataatcaccgacgttatatccaaactaacagacgactcttccccaataccatacccagaacagcctccaatcaagttgaatcaaactttcgaatctaacgtgggtcaagaaggttacgaaagccatgtctccactttgaaggagcatatcaaaaagggagatataatccaaggtgttccatcccaaagggtggcaagacctacttcgttacatcctttcaatatttacaggcatctgcgtaccgtgaacccttcgccttacctgttctacatcgactgtctggacttccaaatcattggtgcgtctccagaactattatgcaagtcggattctaagaataaagtgatcacgcacccaatcgctggtactgttaagcgtggtgctaccacggaaaaggatgatgctttagccgaccagttgcgtggctcgctaaaggatcgtgctgagcatgtcatgttagttgatttagcaagaaacgatatcaacagaatttgtgatccattaacaacaagcgtcgataagttgttaaccgtacaaaaattctctcatgttcaacatttggtttctcaagtgagcggtactttgcgccccgaaaagacaagattcgatgcattcagatcgatcttccccgccgggacggtcagtggtgctccaaaggtcagagctatggaattgattgctgaactggaaggcgaaagacgcggtgtgtatgcaggtgccgtcggccactggtcatatgacggtaaaacaatggacaactgtattgctctacggaccatggtttataaggatggcattgcctacctgcaagctggtggtggtattgtttatgactccgatgaatacgatgagtatgtagaaactatgaacaagatgatggctaatcatagtaccattgttcaagctgaagaaatgtgggcggataccgtggggaccgtttga

SEQ ID NO: 2915 - DNA, 957 bp, Saccharomyces pastorianus
atgcctacgaatagtatcaaattacttgcaggtaattcgcaccctgggttagctgaacttatctcccaaagattaggcttaccattatctaaagtcggagtttatcaatattcaaataaagaaacatcagtaactataggagagagcattcgtgatgaagatgtgtacattattcagacgggatatggagagcatgaaataaacgattttctaatggaactacttatccttattcacgcctgtaagaccgcctctgtaagacgaattacagccgtcataccaaatttcccttacgccagacaagataaaaaagataagtcccgtgcacccattactgcaaagctgattgctaatctcttagaaactgccggttgcgatcatcttatcactatggacctccatgcttctcaaattcaagggttttttcacattccggttgataatctatacggagagccaagtgtattgaattacataaggaccaagacggatttcaagaatgccatactggtttcgccagatgctggtggtgctaaaagagttgcctctattgcggataaactagacatgaattttgcactgattcataaagaaagacagaaggccaatgaaatttcacgaatggtgcttgtcggtgatgttgccggaaaatcgtgtttactaatcgatgacatggctgacacatgtggaacactagtaaaagcctgtgatactttgatggatcatggtgccaaagaggtaattgctattgttacacacggtatattttctggttcagcaagagataaattaaaaaatagtaggttgtcaagaattgtttgtaccaacacagtgcctgttgatttgaatttggacatactcgaccaagttgatatcagtccgacgatcgcagaagccattagaagattgcataatggtgaatcggtctcttatttatttacatatgcacctggttag

SEQ ID NO: 2916 - DNA, 942 bp, Saccharomyces pastorianus
atgcgagaaaaaaactatagtaataaaacattttctaataataatgtaaactacttaaagttcccgaacaaactgcaaagatattctcgattcttaaacaacaaaaaatttgatagaagcccatcaaaaaaatctaaattcagatatgcagagagaagtccgcctcgtctcgtcgacgaccacatgaacaactcgacaaataggaaggaaaacgttaacaattatataccagaagaaaataagaatactcaagagctacaaacggacgacctggaaaacggcgtcagaacgaaattgacaaagagtagtttaaaaaaactacaaaaagaagtattcgacaaagaactcaataacattgcctgccaccatggcctttgcagtaccaaaaatagaaaagatatcaaatattcacgactctggtttctgttcgagttagaaatgagcgaagattggaaagaaaaccttcggctcagctgttataataaatacgtgtattctgcaattgatgaatcttggaaaatggaaaatatactattaaaggaacaagaaaagtgttatgagtattttcctatacagcaattacttatacccgctatttctgaatcttccaataggcgaaagagcttggaaaacattcaagacttaacagtaaatgttgatagcattatagaaattaatcatgaaaagcaaagattattgccaagaagctttttgacaagaagggaaaatgaggttgcgtttaatgacttccaattggacgccaaaaagattcttgaagatttgagttcaacttctgaaaaccccttcggctcatttaactcttccccaagtacaaatatggttgagtcagagaagaaaatattaaacacagttcccaaaaggagaaaagagaaaaaaatcctgggtgcgctagaaaaaaaactatatttggatgaaaaataa

SEQ ID NO: 2917 - DNA, 537 bp, Saccharomyces pastorianus
atggccaattatccagacgtggctgcatttgacttagattataccgtctggccttgctattgtgacactcatttacatggtcccttcaagccggtgaaaagtaaaaatggcgaagtactcacaattatttgtagagatggttacgagctcacaatttataaggacattccacgtatactgagcgatttaaaggagaataaagttaaactaatgactgcatcaagaacatgggcccctgaaattgcgcaggaaatactgaaaatatataaagtcaagtacaatggctccttacttccgttggccgatttatttgacgagtttcagtggggtgagagaagtaagatcggccatttgagggacggtttaagagatctttatggcactgacgatttaaaatcaaaaaaaatatgtttatttgatgatgaaagtagaaataaagaagtagagaagtttggcgtcaaattcgtttatgtaacagatccagaaaacggaccttcttggaagctttatcaagactacctggatggaaagtgttga

SEQ ID NO: 2918 - DNA, 426 bp, Saccharomyces pastorianus
atggagcaaataccaataacaacactgctgccacctataaaaccggaacatgaggtgtcactggacgccggagaagctgcagcaaatcatccggccagtagctcgcccaacaacggcgagttaagggacgtgttcgacagaataaagacgcacttcccacccgccaaggtgaagaagataatgcaaacggacgaagatataggcaaggtgtcgcaagccacaccagtaatagcgggtaggtcgctagagttcttcatagcgctgttggtgaaaaaaagcggggacatggcaagagatcaaggaaccaagagaataaccgccgacatattgaagaagacgatactaaacgacgaaaagttcgattttctaagagagggggtgtgtgcggaagaaagccaagcacaggaggaagaagagagcgcataa

SEQ ID NO: 2919 - DNA, 4734 bp, Saccharomyces pastorianus
atgtcgagcacaattccaggtagaggaaatacacccatgtcaccgttcgaagatacgtttcagtttgaagagaatagtagcaacgaagatacacatatcgggcctccccatgtcaatgatggcgtaccagctaatgaatacagtcggccacgagttagttttaatgacgaaccacccaaaagtaaacgcgaagaggctgaagaattcacttttaacgatgatacagaatacgacaaccattcatttcaaccaacaccgaaactaaacaacggatcagggacgtttgacgacgtggcattagacaatgacaatggagactcaactgcagactacgatggcatgaaaagattccggatgggtacaaaaaggaataaaaaaggtaacccaataacggggaggtcaaagaccttaaagtgggccaggaagaatatcccgaacccattcgaagatttcacaaaagatgatgccattgatcccggtgccataaatcgtgcacaagagctaagaactgtatactataatatgcctctaccaaaagatatgatagatgaagaaggcaaccctatcatgcagtatcctcgtaataaaatcagaacaaccaagtatacccctctaacattccttcccaaaaacattttatttcaatttcataatttcgccaacgtttattttttagttttaatcattttaggtgcatttcagatttttggtgttacgaatcctgggttaagtgcagttccattagttgttattgttatcatcacagccattaaagatgctattgaagactcgagaagaactgtgttggatttagaagtgaacaatactaggacccatattttggaaggtgttgacaatgagaatgtttccacagacaatatttcactgtggagaaggtttaaaaaagcaacttcaagatctctattgaaatttatacagtattgtagagaacatttaaccaaagagggtaagaagaaaagaacacaaagaaagcgtcatgaactaaaggcacagagagctgctgcaacaaacggaccgaggtcttccctagactccgttgaaagttaccgtgtgtcagcagattatggtcgcccttcactagattacgataatatgggacaaggagctgctaataatgatgaagccaatataattgacagatccctaccacttagaacggattgtaaatttgctaaggactattggaaaggtgtgaaggtcggtgatattatccgtatccacaataatgacgaaatacctgctgatattatcttactttcaacatccgatgcagatggtgcgtgttatgtagaaactaagaatttggatggtgagacaaacttgaaggtacgtcaatcgttaaaatgtaccaattccataaggacttcaagagatattgctcggacaaaattctggatcgaaagtgaagggccccactcaaatttgtatacttatcaaggtaatatgaaatggaagggtccaacagatggcgagacaagaaacgagcccgttactataaataacgtcttacttcgtggttgctctcttagaaacaccaaatgggcgatgggtatagtcatgtttactggtgatgatacaaaaatcatgttgaactctggtattacacctactaaaaagtcaagaatttcgagagagttgaactattctgtcattatcaattttttacttcttttcatcttgtgttttatttctggtattgccaatggtgtatactacaaaaaaaaagatagatctcggttttccttcgaattcggaacagttgctggatcagcggctacaaatgggttcgtttctttttgggtcgccgttattctttatcaatcattagtccccatttcgctatatatctctgtggaaattattaagactgcacaggcagccttcatttatggggatgtgttactttacaacgcaaagctagactatccttgcaccccaaaatcctggaatatttctgatgacttgggtcaggttgagtacattttttcggacaagacaggtacattgacacagaatgttatggaatttaaaaaatgtactatcaatggcatttcatatggtagagcatatacagaagcattagcagggttgaggaaaagacaaggtatagatgtcgaaagtgaaggaatgcgtgaaagagccgaaatatctaaagatagagacacaatgattgatgaactaagagccttatctgggaactcacagttctatcctgaagaagttactttcgtgtcgaaagagtttgttcgcgatctaaaaggtgctagcggagatatccaacaaaaatgttgtgaacactttatgcttgctttagctctatgtcattctgttttggcagaagcaaatcctgatgatccaaaaaaattggatattaaggcccaatctccagatgaagcggcgttagtggcgactgccagagacgtggggttcagttttgttggaaagactaaaaagggcctaattattgaaatgcagggtattcaaaaagagtttgaaattatgaatattttggaatttaattcatccagaaagagaatgagttgtattgtcaaaattccagggttatatccagaagatgagcctaaggctcttttaatctgtaaaggtgccgattccgtcatatactcaagattgagtcgccagaatggtgccaatgatgaaaccgttctagaaaagactgctttgcatttagaacaatacgctactgagggtttaagaacattgtgcatagcccaaagagaattaagttggtctgaatacaaaaaatggaatgagaaatacgatgttgctgccgcatcgttagccaacagagaggatgaattagaagttgttgcagattccattgagcgtgaactgatattgttgggtggcacagctattgaagaccgtttacaagacggtgttccagattgtatcgaattgcttgcaaaagcagggataaaattatgggttcttacaggtgataaagttgaaacggcaataaatatcggcttttcttgtaatcttttgaataacgagatggaattactggttattaaaacaactggtgatgatgtgaaagaatttgggtcagatccaagtgagattgtggatgctttactttccaagtatttaaagcagtattttggattaaatggtatcgaagaagaagtttttgaagcaaaaaaggatcacgattttccaaagggtaactacggtgttgttatcgatggtgatgcgttaaagctagctttatatggcgaagatattagaagaaaatttcttctactttgtaagaactgcagagcagttttatgctgcagagtttccccatctcaaaaggctgccgttgtaaagctagtcagagactcgctggatgttatgactttggctattggggatggttctaatgatgttgccatgattcaatctgcagatgttggtattggtattgctggtgaagaaggtcgacaagctgtcatgtgctcagattacgccatcggtcaattcaggtatttggccagattggtacttgtacatggtagatggtcctacaaaagattagcagaaatgattccggagtttttttacaagaatatgattttcactttggcattattttggtatggcatctacaataattttgatgggtcttatctgtttgagtacacgtacttgatgttctacaacttagcgttcacgtctttaccagttatcttcttgggtattttggatcaggatgtgaacgatacaatatcattaatcattcctcaattataccgtgttgggattttgaggctggaatggaaccaaaggaagtttttatggtacatgctcgacggattgtaccaatctgttatttgctttttcttcccatacttgacttatcataagaatatgctggttacgagtaatggattagggctcgaccaccgttattttgttggtgtttacgtgacaactgttgccgtaatatcgtgtaatacttatgttctattgcaccagtatagatgggattggttcagtggtctattcattgcgctgtcgtgtctcgtcttgtttacctggtcaggtatatggtcttctgctatagcaagtcgagaatttttcaaggctgctgcacatatctacggaactccatctttctgggctgttttcttcgctggtgtgttgttttgcttattaccgcgtttcacttatgacagtttccaaaaatttttctacccaaccgatgtggaaatcgtaagagaaatgtggcaacatggccatttcgaccactatccggttggctatgacccaacagaccccaacaggcctaaagtcacaaaagctggggaacacggtgagaagatcatagaaggtatagcactttttgacaatctaggcacatccaactattcaagagacagcgtcgtgacagaagagatcccaatgacgttcatgcacgaagaaaacgagaccccaagcggatatcagaagcaagaagcctggatatcctcgccaagagaaacacaagatctactccagtctcctcaatttcagcagacccaggcgttcgaaccgggacctacctccaaagttaggtcgtcgctagaccgcacaagagagcagatgatggccacacatcaactagacaacagatactctgtggagagggcaaggacgtccctagatctaccgggcgtaacgaacgcagcctctctgatcggaacccagtggaacaacagattatga

SEQ ID NO: 2920 - DNA, 636 bp, Saccharomyces pastorianus
atggccaccaaacaaatattgagacggcaaatcaagagggcgataagggcccttgattacgatactatcgctacagaatcacatgctatatctcaagtagtacggtcattaattgcttccactcacgctaaaagtgtagcatgttatatgagcatggataaaggagaagtaacaaccggagaaatcatcaagaacctatttaatgatggaaaagaggtttttttgccaagatgcacacatacttccgaatccaagcatttcaaattacgggatgaccatcatccacatttaatattccatcgaatgactagtttgacaatggtacgtgatttgaagccccaaggtccatatcaattaaaggagcctgaatcccacttcgaggaagccaccgatttggatcttgttttggtgcctggggtggcatttgatctcaaaaccggtgcaaggatgggccacggtgctgggtactatgatgatttctttcaacggtataagatagttcatgatggccataaaccacttctagttgggttatgccttgtagaacaagtgactgcgcctattcctttggagaaacatgatttccctatggactgtatagtatgtggagatggatccatacattgggttaaatag

SEQ ID NO: 2921 - DNA, 675 bp, Saccharomyces pastorianus
atgaccatcgttatcggggtattggcattgcaaggtgcgttcattgagcacgtacgacatgtggaaagatgcatcgttgaaaacaaagatcaatataacgagaaactatctgtgattaccgtgagggataaagatcaactagcaggatgcaatgcacttgtcatacctggtggagaatctactacgatgtctcttattgctcagagaacggggttttacaatgatctctacaacttcgtacatgatccaaggaaaaccatctggggtacgtgcgcgggtttgatttttctttcacaacaattatcctacgaagcaaagttggtcaagacgttagatttgctaaaagtcaaagtaaagagaaatgcgtttggaagacaagctcaatcgtttactgaaacgtatgacttctcgagctttatcccaaactgtactgatttccctgcaacatttataagggctccggtgatagaaaagatattggatcctaaggaggtccaagtcctctgtaagctagaagaaaaagacaacagcggtcaagagttaatagtcgctgcaaagcaaaatgacaacatccttgtcacatcatttcacccagaattagcagaaaccgatatacgttttcacgattggtttataaaggagtttgttttaaagaatttcaacagataccagtga

SEQ ID NO: 2922 - DNA, 675 bp, Saccharomyces pastorianus
atgaccatcgttatcggggtattggcattgcaaggtgcgttcattgagcacgtacgacacgtagaaagatgcatcgttgaaaacaaagatcaatataacgagaaactatctgtgattaccgtgagggataaagatcaactagctggatgcaatgcacttgtcatacctggtggagaatctactacgatgtctcttattgctcagagaacggggttttacaatgatctctacaacttcgtacatgatccaaagaaaaccatctggggtacgtgcgcgggtttgatttttctttcacaacaattatccaacgaagcaaagttggtcaagacgttagatttgctaaaagtcaaagtaaagagaaatgcgtttggaagacaagctcaatcgtttactcaaacgtatgacttctcgagctttatcccaaactgtactgattttcctgcgacatttataagggctccggtgatagaaaagatattggatcctaaggaggtccaagtcctctgtaagctagaagaaaaagacaacagcggtcaagaattaatagtcgctgcgaagcaaaatgacaacatccttgtcacatcatttcacccagaattagcagaaaccgatatacgttttcacgattggtttataaaggagtttgttttaaagaatttcaacagataccagtga

SEQ ID NO: 2923 - DNA, 2016 bp, Saccharomyces pastorianus
atgtcggatgtagataattgggagcctgtgtctgatggcgaggatacaacagattctgtgaagcaattgggtcctcccttcgaacataccaatgatgatgactgtgccagcggtggtgaacgtgggttgctgaaggatgtgcccctagaggcagagatcactggtgcacgcaaagaactcgtagtgatcacgaatcccagtactgctgatggtcagtcaactgaaatcaaacacgaccaatcgatgacgtcttcgacgtcatcgttctttagtgggatgatctcttcgtttaaatcaaacgtacaatctccgacttctaggtcaactactccaacttcaccagtatcccagccaaatatcatatctcataggagggagccttccataggctccaagagaaggtccagccgtcgtatcagcaacgccaccattgctgaagtaggttctccgctacaacaagtagaacagcctgatgaagtcaagaccaggcgcacaccctctctactgaaagatgacatttatgaccacaagcggttcgtggaggaaaggtatctggacacgcctttccactacgcctctgagcaaaggaacaaggatttccatgaatcatttaagtctctgcccggggaagataggctgttggatgattttaactgtggactcaatagagagttgctttaccaagggaagctctacattactgaatcacacctctgcttcaactccaatattcttggttggatcgctaaagtgctgattgcattcgaagatattacgtttatggaaaagacgtcggctgctgggttattccccagcgctatatccattgaaaccaagatgggaaaaaccctttttaatggatttatatccagagacaccgcatttggtctaatgaaagaagtgtggtcaagaaccctgttgcaaaaggacatagccagcgaaagccgcaactctagcaacgataaatcaggcaatggtaaggaaatcgacgatgcaataaactccatcgacgaagacaataatgataaagatattaatgataacgacactaacgataacgacaatgacatcggctgtaccgacgaagcctcctcaaaaagcaatattccttccctggacaaagagaaagcgtataaactacgtagtgattcaccgtatcagtatgatggtccactataccatcattcaacaagctttcccaccgaactaatggccgccaacgaatttgttatcaaggaattaccgttcaattgtgcaccaggtattctgtttgagattatgttcaattctgaacagaacgagtacctcttggatttcttacgaggccaggagggctcacaaatcaccaagattaccgatttcacgagcgttaatggagctcccatgccattgaaaagagagtattcgtacgaaaaggcattgcactttcctgcgggacctaaatcaacgacatgttatgttacagaagtaatagaaaggacagacccagagacgtattacgaaattatcagcagcacacgcacaccgaacgtacccagtggcggcagtttctcgaccaagacaaggtatttaattcgttggaacgatgaaataacctgtttgctacgggtgtccttttgggtagagtggaccggttccagctggattaaagggatggtcgaaaacggctgtaaaaatggccaactggaggctggacagctgatggaacgtattctcatcaaatttgttaaggacaatgtcgaagaatctcaaattgttatcaacaaggaacaagaggagcctgagaaggaacagttggaagagaagccagtggaggcagacgtcgaacaaccaagaggagttatcgccgccacactagctgtcgcagagcctcaaggtatcaaggtcaccacggaaacgtggctgttcttatacttgattgcgatcattctgctactgttgaatctgttttacttgcgctcaattgcaagttccctccgtcaactagtgaagctgaacctggtaggactgaagtag

SEQ ID NO: 2924 - DNA, 5262 bp, Saccharomyces pastorianus
atgtccaatattagcgctgatggaccgcaggtcacgcaggagggactcggcatcaacaggctctcccccatatcatcaaattcgaaccaaagttcattgacttcctccaactatgaaaaatacctacagctggccaccgagaagaacccttgtactatcctggagctcgaactggacggaaaagtgcggtatgcctcgccgcaatggaggatgctgataggggcagccggaagcaagtgctcttccgccacctacatcgcagacctgattctcgggtctgatcgagataaagccgtctttaaaacggcaacagaaatgctgcttatgaacgacgacaccagctatatgataacgttcaatatcgcggctgccgacggcgagggcagtgccacaacgaccctggaggcccgcggcatcctcatcagggatggccacacgcaatcgccctcccacaccatgtggatagtcaagccccgtacgaacgactggtccgacttctacgccaacgaagacgcacaggatgacatgatcatccagctctccgacgattgcaacgacatcgacatccagcttccggaggagttcgtaaagaccctcgggtttggcgccaagatcttcatacaatacctgaaaagaatacggctggaaatgatcacggacgaattcaacctgcccctgcccaagatggaactttgccgggtctgtgaaaatttcgtccccgtctggtggctggagacccattcgcaaagttgtgtttgcgagcatcggacagaatcactgatacaactgctgcacgacaacctcattgaacagttggccatcctgaccaatttcagcaaagattccgaatataagggcacgcaggtccaagtacgctccagtaactttctgaaccaggtcttggactccctgagggaactttgccaggattctatagacataaaccccagcgaaatggtcccagatctctaccacagtgtctcatcattctcccaagataacaacaacgctttactggaacaatttcctatccaaaaggacacagttagtttgaattcatactttcagttctcaccaagaacgaatcacaatattcaaaatgtcacgtcatggcaatccagattttttctcaatgatgatcaagacccaggtctagcacttttgattcatgatactttggacctggcacggaaaaaagtggatgccgttttgaggttggacaacgcaatgacctattctctaaagatcaaaaacgaggttaacaattacgtcgtccaattgattcgcgaacaaattgaaatcaacaagcacgccgctctagctcactcaatgaatataaggtcctcgtcactctttcattctctacctcccacacaggctcaacaaccggaaccggaaacagaaactctaatatattcttcctccactcccatacaggccccacacaatcgagtcacgtcttttgatacatcctgcaaatcacatttggatcttatacctttcccctcggcagccaccaaaataggctctagccacgacattagacagtcttccccaccgccccccacgtacaccgataccgttatgaaattgcccaaacctcaaaggaaaaccaattctggcgggctgttctccgatgcctacttgaatgccgacatcataccgaacctaaatatcgaatccacgatatcctttgataaggatcgtaacgccaacgccaacagcagcggagctagtagcaggaagccacacaatacagatgacacagcagagtctcgaaaaatcaacgttgacagaccatcctcctcctcctcttcgagactaggaataagatcgagatccataacgccaaggcaaaagatggaatactcgcatgtaaataacgacgaccgcacgaatgaattttttgtaagagacaaagactctcttcagtctcaaccctccacagataccactgtaacatcatctgctcaaacaaacacaacaggcatcaaatctaacggtaatagttctgcaaactcagtattgcccaaactaatgacaagtatttcgttgactccaagacggggttcgccattattcggaaatttaacgagccattctatgcaacaaacaaacagtttcaaattaattcaagagaaatcgccaatatcttccccattcacattctccaaggattttttaaccccggaacagcatccctccaatcttgctagaacagatagcatcaacaacacaatgctaacttcaccaaatatgccattatcaccacttttattggcaacaaaccaaaccgtcaaatcaccgacaccaagcattagggattatgacattttgaagccaatcagtaaaggtgcttacggtagtgtttatttagcacgcaaaaaacttacaggtgattattttgctataaaggttctaaggaaatctgatatgattgccaaaaaccaagtaacaaatgtcaaatctgaaagagccatcatgatggtacaaagtgacaagccgtacgttgcgagactatttgctagtttccaaaataaagataacttatttttggtgatggaatatttacctggtggggatttagctaccttgatcaagatgatgggatacttgcccgatcaatgggccaaacaatacttgaccgaaattgttgttggtgtggatgacatgcacagaaatggaatcattcatcatgatttgaaacctgaaaatctgttaattgataatgcaggtcatgtaaaattaacagattttggtttatcgagagctggtttaatcaggcgtcacaagtttatcccgcataagtcgtccctcagcattagttcgaatttaccaattgatcaccaagcaagcagttttactatgaatgctaacaatagcaatcattcacaattatccaccccggatagtttctcgtctgatcacaaatcaaccaacagaagcaagaagtcatcattaggccaacaacacgatccttccgaacattcaagtaattccaattcccactcaatgacaccaacaccgagttcaaacactattgtttatccttcttactacagagggaaggacaagtctcacggaagttcaaatcttgatcttccagcgtctttaagaagaagcgaatctcaattgtcattctctctgcttgatatttcacgttctagtaccccgcctttaccaagtcttcaaaattcgaataccaacaatatcatgagaagaaaatcactgaatgagaacaaattcctctctaatgatctattatctctagatgcaaccacaaccactaatgctaataccaattcgaataataacacatctatgtcaccatcgccttcagatttggccttgttctatcctgatgacactaaacagaataaaaaatttttcgggactccagattatttggcacccgagaccattgaaggtagaggagaagataataagcaatgtgactggtggtcggttggttgtattttttttgaattgcttctaggctatcctccgtttcatgcagaaacgccagatgctgtttttaaaaaaatcctatcaggagttattcaatggccagaatttaaaagtcaagaagaagaagaagaatttttaacaccagaagcaaaagacctgatccagaagttactagttgttgatccttccaaaagactaggcgttaatgggatacaagaaatcaaagatcagccttatttcaaaaacgtagattgggatcacatttacgatgaagaagcctcttttgtccctactatagataatccagaagatacagattattttgacctgagaggcgccgagctgcaagattttggggatgatattgatagtgataatggaaacattatttacaatagaagtagtaacaacaccgatgtttccgatctatcttcggctaacctctcgctgccattgaatcataagaatatgttatcccggagactatcgatgagtaataccactaatagaagcacaaacaattccaatagtagtgttcatgattttagtacacataccccagttaataaattgagtattgcttctgtattggaatcagtaccgcaagaagctggatatctcacaccgagtggaacaggtacgactacagttagtgccaaaaattcccctaatctgaagaacttatcgttggccataccgccacatatgagggaccgcagatcgagcaagttgaatgattcacaaacagagtttgggtctttcaatttcagaaatctgtctgctttagacaaagccaacaaagatgccattaataggctgaaaagtgaacatttttctgaacaacctggagtgcataggcgaacttcttttgcgtctttgatgggatcgttttcggatggttccgtatcaaccgtagggagtattgcttcgaataacacaccaagcagtaaaatgaaagtacacaaacccacaatatctggttctccttcaacatttagctctttccccaaaacttttttgagatcagattcattttctaccagatcatattctcctgaacgaagcattagtattgattcttcaacgttgtcgaggaaggggagtataattggagatggtcaacaagcaactgcaagtagttcggattcgcctacgatgactaaattcaaatcgccattatctcccgctaacactacaataccaaattcatatatttcaaggcagcgagttctatcaaaaagtttttcacaacgaactaattccagtgatttgtctgcagaggaaagtgatagattacaagctatttcaagagtcaattctttaagacacagaaggcgtagtggccgtaaaagctccagtacttccgagattggatatcatatggatgttcttgtctgtgaacctattccgatccataggtaccgtgttgctaaagacctagaaaatctgggttgtactgtcgttagcgttggtgctggtgatgaactagttagtagagccaccagcggtgtaagttttgatttaattatgacagccttaaaactcccaaagcttggtgcaatcgacattgttcaactgcttaagcaaacaaatggtgttaattcgacgacaccaattgtgtccattacaaattactttcaagaagcaatagctagtaaagctttcgatgatgttttagaaaaaccagtaaatcttgatgaattgaaaagattagttgccaagtatgcattgaaaaaatcgcaagaggatgaagagcatacaattctgagtgattcagatgagatgcatttataa

SEQ ID NO: 2925 - DNA, 2286 bp, Saccharomyces pastorianus
atgtgtccgttccccctagctgagtttccattgcgtgaacttcctgttccctataactaccgtgtgtccagcgacaaaagcactctagagagtggtagtgcggtggttgctgccgctggtactcatcgaaattccacgaaaaccaatgtggttgacatgcaagatggtgatgaggatagcagtgaactccagaggaaaagaagtgttggttctggtgagtctactccagaacacgagaatttcaaaagatcaaagtcaaacaatcacgaatcctttcgtcaacctaatttccagtgtgctgttgaatcatccatggatattgatggtatccataacttgtcagagctacctaatgatgcagagagtctttcgatacccgttgacgatacatcggctgctcctgctgcgactaatacggctgcgacagcaggtagtgataccaacatcaacattaacaacactgccatcaatagtatcaatctcatggaagagggcgccctgccgttgtcgccgacagcttcttctccaggtaccacgaccccattagctaaaaccacgaaaggaaataaaaacaacgatattaccgatttaatagagtctaaagattctatcatctccccagaatacctgtctgatgaaattttctctgccataaacaataatttacctcacgcgtattttaaaaatttgttgtttaggttagttgcgaacatggataggagtgaactatctgatttgggaaccctaataaaggacaacctaaagagagacctgatcacatctctaccttttgaaataagcctaaaagtttttaattatttacaatttgatgatatcataaattcgcttagggtttcgcagagttggaacaaggtaatcaagaaatccacttccttatggaaaaaactactggtatctgaaaactttgtcagttcagaaaagtttaactcattcaacctcaaactgtcagagaaatacccaaaacttctacaacaagatcgacttagattgtatttcctggaaagtatgtttatcctgaagaattggtataatccgaaatttttgccacaaaggactacattaagaggccatatgacaagcgttattacatgtttgcagtttgaagataactatgtcatcacaggagcagacgacaaaatgattagaatctatgattcgataaataaaaaattcctattgcaactgtcaggtcatgatggtggggtttgggctttgaaatatgtacatggtggtatcttggtcagtggttccaccgatagaacggtgcgagtttgggatatcaaaaagggctgttgtacacatgtgttcaagggccacaactcaacggtgagatgtctcgatatagtagaatacaagaataccaagtatattgttactggttcgagagataacaccttacacatctggaaattgcccgaggagacttccactacagaacgtcaagacgattatccgttggtatttcataccccggaggaaaatccatattttgtgggtgttttaagagggcacatggcatctgtaagaactgtctctggacatggtaatattgttgtcagcgggtcctatgacaacacactgatcgtatgggatgtcgcccaaatgaaatgtctttatattctaagtggacacacagatcgtatctattcaactatctatgatcacaaaaggaaacgatgtatctctgcgagtatggattccaccataagaatttgggacctggaaaatatttggaataacggagaatgctcgtacgcgacaaactctgcgtccccatgcgccaagattctgggtgccatgtataccctacacggtcatacggcattggtcggtttattaagactgtctgataaatttttagtcagtgctgctgcggacggttcgataaggggttgggatgcaaacgattactctagaaaattctcctatcatcacaccaatttaagcgcgattacaacgttctacgtttcagacaatattttggtaagtggatctgagggtcagttcaatatttacaatctaagaagtgggaaactggttcattcaaacatcttaaaagatgctgatcagatctggtcagttaattttataggcaaaacgctggtagcagcggtggagaaagatggacagagtttcttagaaattttggacttcagcaaaatgtccaaaatcaactacgttagcaatccagcaaactcctcttcatcatccttggagtccatttctacttctctaggattagcaaggaccactataatatcataa

SEQ ID NO: 2926 - DNA, 2490 bp, Saccharomyces pastorianus
atgttgtttggtgtgaaattggccaatgaggtttatcctccttggaagggttcttatattgattatgaaagcttaaagaaatttttgaaggaagatagcgtgaaaggtggagcggatgataagaaaccaagctgggatgattcggatgagtctaggttcgtcgaagagttggataaagaacttgaaaaagtttacggtttccaactgaaaaaatacaaaaatttaattgaaagactaacccatttggaaaaacaaacagattcagaatcagctatcaaggctttagattctgatgcattccaacgtatcttggaagagctattgagtgagtctagtgaattagataattttaaaaggttaaatttcactgggttcgttaagatagttaagaagcacgataagctacacccaaagtatccatctgtgaaatcactgctagaggttaggctaaaggaattgccttcccattcggaagaatattccccattgctgtaccgtatctcctttttgtacaacattttgagaagcaacttcaacactatgtctcagtccttggctagtgcttctaagttttcgagtatcgccagtaatgacatggacatgaacctcaaaagttttaaattttgggtccataatgacaatttaatggaagtcaaaacaagaatcttgagacatcttccagtactggtttacgctaatgttccctccgaaaacgatgatttagtcaatagatttgaatcggatatcttaaatgatgacgaaattgtggctagttcaagttccagtggtagtaatgcagaaaacggtggtttgggagcacgttcttttgacccacttattaatactctttatttcgacaatgaacattttgaaatgtataacaacaagttactgaagttaaactcggcccctacattaagattgaggtggactggtcagctatctgataaaccagatattttcttggaaaagaaaactctcattgaagatgaaaccacagggaaatcggactttgatttcaccaaacttcaattaaaacaaaaatatattaatggatttatttttgatggcgataagaaatttaaagaccagactttaaagaaactaaaagacagtggtacgtcaaacagagaattggaaaagttgaaagaggattttgaagatattcaagatttcatcatcaaggatgaattgcagccagttttaagaactgtttacaccagaactgctttccaaattcctggagatgacaaggtaagaattactattgattctaacattgtatttatcaaagaagactcttttgacagaaaacgtccaattagagatcctagtacttggcacagaactgatattgatgccaatgtcacaaatcctttgaaattcttaagggagggtgaatatgctaagtttccatattcagtcatggaaatcaaagtcaaaggttcattagattcttcagtatcaagcaattctatgatttctaatgtgaaactgcctaagaagcatggacaatggctaaacgatttgacgaattctcatttggtcaaagaaattcctaagttctctatctttgtgcaaggtgtggcatcattgtatggggaagatgaaaaattagacattttaccattctggctaccagacttggaaacggatattagacaagatcctaagcaagcttacgaggaggaaaagaaaaaactgaaaaaacaaaaggaaattcaaaaaaaaattgatggcatgagaagattttccaacataaacgaaccccaacgtcaagaaccggcacctcatgaggaatctcaaaacactacttctcaaggtgatttggaggctgacgacggctcatctgacgaagaaacccaagatcagcctcaatcgaaaagatcaaggcaaactcggagaagaagaccaaaggctaccttcctaagaattttagccgggaaggatccgaagttaatgggagtggattctgaagaagaggaaattgaattgccacctggtgtgaaaaaaccatcgaatttattgaagaacgctgggcctgtcaacgtggaagcaaaggtttggcttgccaatgaacgtacattcaacagatggttaagtgtaaccactcttttgagtgttttgacattctcaatttacaattctgtgaagaaggctgaatacccgaatttggctaattatatggcatacgtttattttgctttaacactattctgcgctttatggtcatattctgtctatatgaaaagagtcaatattattcaacaaagaagtgggcaacatttggatgcaccccttggtccagtcttggttgcgatcgttttatttgttactttagtcgttaattttgttatggcatttagaaatgcagcaaggtctcgcgaagaattactaatacagaacttagaagttcctgaaagaataccagaagtattaagaccaattcaagattatcttttcagattaatgggaccaagcaaaaaataa

SEQ ID NO: 2927 - DNA, 2637 bp, Saccharomyces pastorianus
atgagcgaatccaacctatctagtttcattagcacaaattatttcaatttgaggtcagcggctaattcctcgaaccctgttacaaagtcaagtacaaagaagagtaagaggaatcaaagatctccaacaactagtaataactggacctttaaaaagagaactcttcaagcatcacagacgatatgggaggacagggaaagaagttcctccaatagccgttatctaatgaaccgctcaatggcatccagaactacaacttctttgagccggtatagtaccaatacttcacttattggccccagtgttgattgtgtcctctgttgtatatacgaagttccaagagacgtcagtacacgaattggactatgtataatcaactgcaacacggggcagctgtttctttcagatttcatggattctcagatctacattcgtgtagtacataaactccaaatataccaacctacagaaatactaattccaagcaactcactgacaccaacagtgtcaaaattagcaacaatgataaaattcaatgtatcagagactgttaaaattgaagagggatcacgaaagtgttttaatagccaagatggattagcggcaatcgaaaagtacttattggatgatacaaaaaaggatctaaaaattgaagagctgatagataaatcttttgctctctgtgctgcatccgctgcgataagctacatggaagagatcatatccaaaaatacgcgaaatttgaacgcatttcgtaaactacgtattcagttcgaaggaactgaaaacacaatgttgattgattctaaaactgtgagaggattagagcttgtagaaaacaaattggataaaaacggaatatcgctatggaaattcttagattccacctctactaaaatgggacaaagatcacttcggaacaatatacttcagcctttaaccgataaggaaagcattgagatgaggttagaggctctggtagaactagaggataacgatgatcttctgcaaaatttaagactcgaaatgaagtctttacctgacttagataaactgttttcgaggttgctttgcgtgaatcaagcggcaataaaaccggatcaaagaattaattatgtcttgttgttaaaggagactttacagagtgtaaaatcactaaaaactattttaaacaatgaaacaattaaaagccgcttaataggtgaaaccaataaaatattcaacaacgatgcaaacatagaaattgaaaagctgattaatgaatatataaatgaagattgtgtttgggcaacttcgactatggaactgcttaaccagcgttcatttgctgtaaaaagtgattctaatggacttttggatgtttcaagacaaatctacaaggaagtaaaggacgagtttttccatgaagtagagaatcttagctccgatcataaaatcaatctagatcataattacgattcagctagaggcttttacctcagaataaaaaggcaagatttcactgacaacatcgctgctcttccagatatattcatttcaagaacaacaaaaaagaactatattgaatgcactaccttaggcattattaaaaagaatgccagactgaaagaagttatggaagaaatattacttttaagtgaagagacagttgacgaccttctcgataaaatcgcatcccacatttctgaactattcatgatcgcagaagcgattgctatcctagatttagtctgttcattcgctttcaatttgaaagagaatagttatacaatcccgacttttgcaaacaatctacttatccaggattcaagacatcctttgctcgaaaaaatcatagataattttgttcccaacagcatatcaagcacgaaaaatagttccagcttacaaatcattacaggatgcaatatgagtgggaaatcagtgtatttgaaacaggttgccctcatttccataatggcccaaatgggttcaggtatatcagcacgctatggatccttccctatttttaaacgcctacatgcaagagtttgcaatgataccatggaattgacatcatcgaattttggctttgaaatgaaggaaatggcttacttcttagacgacataaacgaagatacgctactaattttagacgagcttggacgaggctcaagtgttgccgatggattttgtgtgtctttagctgttactgagcatttgcttcgaacgggagcaacggtattcctttctactcacttccaagatattcccaaaattatgtctaagaaaccggcagtttctcatcttcatatggatgcagttgttttaaatgacaagtctattaaaatgaattatcatctgacccagaagtctgtccagatagagaatagtggaataaaagtcgtaaataaaatattcagccctaatattattgaagaagcttacaatattcactcacttttgaagattgctaaagccagaattagaaatcaaaacttggatgatgttattgatgaaaatactataaaccaaatgaagagaattcacaatcttgtggcaattgtgcatgaatgtgtgaaaaacgaaaaagagcccttaaccttggaaaagctaagagaaataaattctgagtttattgaaaaatttgaaggatga

SEQ ID NO: 2928 - DNA, 612 bp, Saccharomyces pastorianus
atggcgccaaaaaagccttccaacagacaaacgttaaggagagaggttgcccctgaagtgtttcaagactcacaagccagaaaccagttagctaatgttcctcagcttaccgaaaaatctgctcagcgcaagcctaccagaacaaaggtaagaaaagaacaatctctcgctagactttacggtgctaagaaggataagaagggaaaatattctgagaaagatttagacattccaacactaaacagagctatcgttccaggtgttaaaataaggagaggaaagaaaggtaagaagttcattgccgatgatgacagtttgactttaaaccgtttaataaaaactattggtgacaaatatgacgatatagctgaaagtaagttagaaaaggctagaagattagaagagatacgagaattgaagagaaaagaaattgagagaaaggaagcgctgaaacaagataagcttgaagagaaaaaagatgagatcaagaagaaatcttccgttgcacgggttttacgtagaaagaacaaacgtgacatgttgaaaagcgaagctggccccagtgaagataaacctaaagaaaagaaggtgaagaaggtttcatttgcttaa

SEQ ID NO: 2929 - DNA, 1350 bp, Saccharomyces pastorianus
atggagatcggcaataagaggagagattctgaagatgggcaaaagcaagaggtagtgaagagggtaaagtctcaagaaccaaactatgcctatttggagacggtgataagagagaagttggatttcgattcagaaaagatttgttgtgttacactgtcttcactaaatgtgtactgttgtctggtttgtgggcattactatcagggaagacatgaaaagagtcccgctttcatccattccattaacgaaaaccatcatgtcttcttgaatttaacgaatttgaaattctacatcttaccgcaaaatattcaaattttacacgaagataaggtccaattgttaaatggcatcaagtatgcactctatccaacttatagtgtcaaggatttacaaagtttccccaaacaatgtttcgatttaagcaatcgcgcatacctgaatgggttcatagggttcaccaatacaacgacatacgattatgcgcatagtgcattacttttaatatcacacatgaaacccttacgtgattattttcttttgaacaattttgataatcaaggcgagttcatcaaaaggctatccatatgtatcaaaaaaatctggtcgccaaaattattcaaacattatttatcagttgatgacttcgtcacctatttaaaggtcaaagaaggattgaatctgcgtcttgtagatccacgggttttcctcctatggttattcaatagaatatgttcatcttccaaacagttgaaatcaatttcaaacaaatcttgtaaaggaaaagtgaaaattgtggaaatcggaaaagatcccaaagacgatggacctgctacgaccaaaatcaacgtaaaacccttttgggttttgaccttgaccttaccagaattttcgccctttaaggatggcaacacggtagataatcttccacaaataaacatctcccaactattgagtaaattcagcgatatcagagacccttccgctaacaacattttcaaactaacgcatttacctcaatttttgatatttcatttcaataggttcgaccatagtagtgaacatcctgtcaagagtaggaaccaaacgatagtagaattttccggtgaacttaaagttctatatgccaactatcgtttaaaggcaaacgtgatccatacggttattaagttgccatctacagacgggaacacgtctgatggcgatgaaagaagtcattgggttactcaactttatgatggcaaaaacgacaaatggattgaaatagatggtataaatacaacagaaagggaagctgaactactgtttctaggcgaaacgtttatacaagtatgggaaaagcaggaaccgtga

SEQ ID NO: 2930 - DNA, 1506 bp, Saccharomyces pastorianus
atgatgagtggtgaaacgtttgaatttagtattagacattccggtaaagtttacccaataactctttctactgatgccactgcagctgacttgaagagtaaagtagaggaattgactcaagtgccaagttctcgccaaaaatatatggttaaaggtgggttaactggtgatgagtccatccaaatatcctctttgatcaaaccaggaacaacagtcatgctattggggactccagatgctaacttgatctctaagccagcaaagaagaacaatttcatcgaagaccttgcgcctgagcaacaagttcaacagtttgctcaatcgcctgtcggtttcaagaatatgggtaacacctgctatttaaatgccaccctacaggctttatacagagtggacgatgtgagagatatgattcttaattataacccttctgaaggggcatctagtagtagtgcacaagatgaagaaacgcataagcaaattgtcattgagatgaaacgttgtttcgagaatttgcataataagagttttaagagcgttttgcccattgtgctattaaatactttgagaaaatgttatccacagttcgctgaacgtgatcaacaaggtgggttctataagcaacaagacgctgaagaattgtttacacaactgttccatagtatgagtgttgtatttggtgataagttttctgaagattttaggattcaatttaaaactactatcaaagatacggctaatgaaaccgatgttaccgttaaggaaaacgagagcgattccaaattacaatgccatatttcgagtactacaaatttcatgagaaatggactactcgaaagcttaaacgaaaaaatcgaaaaaagatcagatcttactggcgccaattccacttatagtgtagaaaagaaaatatcaagattaccaagattcttaaccgtccaatacgttagatttttttggaaaagatccaccaacaagaaatccaagattttgcgtaaggttgttttcccatttcaattggacgttgccgatatgcttacaccagaatatgcgcaagagaagataaaagttcgtgatgaattaagaaaagttgaaaaggagaaaaatgaaaaagaaagagaaatcaaaaggcgtaaatttgacccatcatcgtccagcgaaaatgacatgacaccaaaggaacaatatgagacgcaagtagctcttagcgaaagtgaacaagatcaatggttggaagagtacaaaaaacatttccctgaaaatttggagaagggtgagaacccatcgtgtgtttataacttaattggtgtcattacacatcaaggtgccaattctgaatctggacattatcaagcttttataagggatgaattggacgaaaataagtggtataaattcaatgacgataaagttaccactgttgaaaaggaaaaaattgaatcactagctggtggtggtgagagtgatagtgcattgattttaatgtataaagggttcggtttgtga

SEQ ID NO: 2931 - DNA, 1329 bp, Saccharomyces pastorianus
atggataaaaaagctccagaaaacaacgatacttcaacacaatccgttgaggaccctgagggtaaaacggcgcacgttcagcctgcttcgtatgccaataagaaaaattacgtttttggaaagacactgggtgccggtacgtttggcgtggtaagacaagctagaaattctgaaacaggagaggacgttgctgttaagattctcataaagaaagcactaaaggggaacaagatccagttagaggcgctatacgatgaattggatattttgcaaaggttgcaccatccgaatatcgtggcattcaaggattggtttgaatcgaaagacaagttctatattatcactcaattggctaaaggtggtgaattgtttgatcgcattttgaaaaagggtaaattcactgaggtggatgcggtgagaatcctggttgagattttaagcgctgtcaaatacatgcactcccagaatattgttcatagggatttaaagccagaaaatttgctgtatatagatataagcgatgaatctccattggtgatcgctgattttggtattgccaagaggttaaaaagcgatgaggagctcatttacaaagcagcaggttcgttgggttatgtggccccagaagtgcttacccaagatggtcatggtaaaccttgtgatatttggtcgattggtgtcatcacacatacgttgctgtgtggctattctgcattcaaagctgaaagagtcatggatttccttgacgagtgtacaaccgggaagtatccagtgacatttcatcggccttattgggattcagtatctgataaagctaagcgattcattttgaaagctcttgatttagatcccacaaagaggccaaccgctgcagaactgttggaagacccatggattgtttgtacagaactaaaaacgcataatttattgcctggcctgaaggaaggattggacgctcgccaaaaattccgtaactctgttgaaaaggtcagattaaatatgaagattcagaaactaagaaacttgtatcttgagcaaactgaaagcgattctgatttcgacgagaacaaccgttccacgccttcattacattcaatggatacaaaaccaacatctagtaaactatcaaacaaagagcaatccaaattaaagtctgagttaactagcgaagcttttgcacaactagtcaatacagtgattgcagaaaaagagaaattcttaaacattaacaggatctgcagttctgataacgaaagtgatagtgataaaaaaccgttggattatgcggatgcgacacaagatgaaaagggtgccaagacagatagctga

SEQ ID NO: 2932 - DNA, 1101 bp, Saccharomyces pastorianus
atgagatacagtcggagcctacacgtagttggtctggtgtgcgcgttagtactgctgggcgcacacagggcaattggctgggagctgtcgtacgaggagtaccacgcagcacatttgaatgaggctatcagcctcgacgacgacggcgataagccgggcagcagcagcagcagcaatctgctgctgccgtttaacaggacgcgcgttcccgggtccgaaggttcgcgcgaggtccgggagttcattgtcgagcacttcaactcgacactggcgggcgagtgggccgtggagacgcagcctttcgaggagaacggctacaacttcaccaacctcgtgatgacgctgcagaacaacgccagcgagtacgtggtgttagccgcccactacgacaccaagatcgaacccgcgggcatggtgggcgccatcgacagcgcggcatcgtgtgccgcgctgatgtacgcagcacaattcctgacgcatgtggcgcgctacgagcgcgccacagagcaggcgaagctggagacagtgggccccgtagtgacgggctctacgctgggcgtgaagatcgtgttctttgacggtgaagaggcgttcgaagagtgggggcccgaggactcgatctacggggcccggcggctggcagcgcagtggctagcggacggcacgatgccgtccgtgcgcctgctgctgctgatggacctgctgggcagcggcgaggaggagccgctggtgcccagctaccacgcagactcccaccaggagtaccagctgctcaaccggatcgaggacgacctgctgttccggcgcagcggcgactccgcgtcggagtcgccgctagccgcccaggccgcccgccagcgcaagcgcctcgaccccacggactaccgctacctagcgctcggacgcgcggtcgtcgacgacgaccacacgccgttcctggccgcgggcgtgcacgtgctgcacgcgatcccgctgccgttcccgagcacatggcacaccgtgcgcgacgacttccgccacctggatgccgcggagacgcgccactgggcgttgctggtgtgcgagtttgtggtgcagtcactgcgcgcccgtgctcagtga

SEQ ID NO: 2933 - DNA, 1512 bp, Saccharomyces pastorianus
atgaaggccatttttaaagtgttgactgctttggtagcttgcatggtcatgataaggtacctaatttgccagcagagtgggctagcacactcagatatggacttgaagcctatctgccagtacaccgggttttcggtaaactcattgcttcagcatcggatgctggagggctcgccggtagccgattacctggtagagaagtactcgcaatcgataagacctttcataaagacataccctgactcggtgctgggaaagatgacgggtcgtctctactgcgtgtggctcaagatttcttcttttttgaagctgaacgaactatgctgtacattgcattctaaattagggcccttgttgaaccacctgaggatcgcctggtattatctgaaaccgtataccgataatgtaaaaaacgtgctagaaagcccattcaactcttccacgaactggatgagacacgggtccttcagcgtcaatggtacacacgccaagcctatttttgagacagattcagaaactgaagaagaagaggatgatgaagatgctgatggtgtggagcatgctgataacgaggaggacgaggacgagtatgagcttgaggaagagtattacgaccgcgggaactcacaagttctcacggcagccattttgcaagatatgtcgaggattatcgtgggttccgacagctacacagatttggaaacgctcgaaccagaagcactaaagatggaatatgaagcatggatcaaagctgtcgactcgaaagtatccagcgcaataactctcttagattcagaaatacattccatgttcgaagctcaagcactgaacaaatctatggatgttgccagcaggctggatgacctaaacagaacttttagtgaacaactggtattcctggattcaaagatcaaagacatcaattgtacgtccaaattcgatcccgtacagaataagataaagtattttgacagatcgggtcggtttgaattggaaacatatgtcaccaaatcatcaattacatcgatactgaaaaactacaaattgcatctgtccaatgttgaggaatcgctctttcatgcattagattcctttctttctgaaatggctaaacaggcggaattaattcgcctcgaaaatgtcgaagtttatgaagaatgggcagatgtaatgataagtcaatggtcacaaagaatggcatacttggacataagaagtctgcacttggagaaccagtacgatcctgagtatattgacaaaaatcattccaattggcaagacttcatgaaattgaagaaaaaagtcatttcggagagaaaccacttgatcgaacatgatcttgatatgaagttggtacttgaatctatatcggatttcaaaaccgatttccagagcataaaggaggatatccaagccatatttttacaaagaatgaacacagcggatgctttattcaagagccgtgaactaaaagaacaacaggaagaggaattcgtacggcaagaacgttag

SEQ ID NO: 2934 - DNA, 1992 bp, Saccharomyces pastorianus
atgagttacaaggcgaatcagccatctcctggggagatgcctaaaaggtcaccgtccatcctggtgacggatgcaagatcatccaagaatagaataagtgcaccgtttgctggccatgctgccggaagcagaaagagtatggaaaacaagaacgtggagagatcgcagggcattcgctcttccaatgtagggccttcgccaatgatgaaacccgcacattcaagaaggcgatcctctggtagatttagcgatatttctatagacaatattctttctgacaattcagaaattccctccgccagaagggaggaacgactctccagctcgtcaagtgatagacctcgatactacgaacgtctaaattcacgcagaaaaatgatcaatcccttacctccaagaacatctaagacatcgcaaaaattagtactgatacccgaagaagatgatttaaaccaatttcgaaacacgccgcacaatgctttggacagacaaagaccgaaggtggtttctatgaagtctagctctcatgaccgattgccccgtcatttgagagagaaccccatggcaagaatcacggcgtataacgtcgctgacggatttaatctgaacctgctgtacagatttttggaggagactcatgaagtttcaccaagattatatgacgaatgtctgtacgtcgcgtacactttgccgttattgccaggtaaaggtgggttcaggataaaatcgaacatatccaagaaaacagtcggcggtaagacattgatcgataatttgatagatactagtgaacaaagagatcatcattatgaatattactcaggagtcgaaactgtagaagacgcaaataataattacgaattagaaaccaatgggggaaacaatagtacgagccaagatactgtcactgtcccagatcatttacccaatccagtgggtcaacaggattctttcaatcctatggaaccacagttctttgcagaagaaacccccttggaattagagaaacgagaaagaatcgaaagaatgaatatgttaaagaaagaagagaacgatgctgacgataacggtaacagtaacagcattaatgatgacgatgatgacactgaaaattatgtgctcgaaggcaccgatcaatatttgaagtcttctcgctcacaaccatcatccgcatcatcagcatacaccccatcgcctccatcttcagcacgcagggattctaatcgtggctatgaaatgcagaaagataacgaacatgagggcaatgatagacacgcagaaatttttatctttcattatggtgtaattgtgttttggaatttcactgaaatacaagagaaaaatatacttggcgacataacgtttgcagattacaaaaacttgatgattcggccattagacgaacaagatatcgaaaccgaacaattccacttcgaatatgacagagataccgagaggccgcgaatctttaacgatattgtcacattgcgttcaggggaccatatcatcgaattgacactatcacatgccattgcacaatcctccaaattatcaagatttgaatccaggatttcgccaattctaatatctgtcacgaagctacccaagaggctggcactatacggtactctcggattaaagcgagaacaattgctgaaaaagtcagggaagctattcaaactaagagtggatgtaaacctttcatccactatattggatacgcccgaatttttttggtcatttgaaccaagcttgcatccactgtacgtggccatgagagaatatttggagattgatcaaagagtacaagttctgaatgatcgttgcaaggtctttttggaattctttgacatctgtgttgactccgtcgcagaaagaaacatggcacgtgttacatggtggttcattctggtcattttattcggagttatattttcgctagcagagatcttcgttcgctatataattatacatcgtcattccactaaatag

SEQ ID NO: 2935 - DNA, 1668 bp, Saccharomyces pastorianus
atgataaggaaaaataggcttttcatatcagttacactattactggttctgttactgatttactatttacaagtgggttcgttggtgcagacgcagaatagcaatagtgatcgttgcctgcattattatgaagctcttgaatctggatggtcgaataggttcttcggcgtaaatcaagaaagtttggctcctggaaaggacgtggttcaattagtgacaagaatcaatattttttctagatgtttacagcagactggtaaccgtgatgctcaacttctacgagatattgagaagaggctatttccgtacttaaatttcagaggattagaaacaaatgaaatcaacttctggcccactcacacgagatggaatggtgaaatttatcatgcttctgcgttagagtttggccatagaaacggtcattttgttcgctctaggcccatcaagtatgattcagatctgtctttttgggagaattggctgcaaactgcaacgcagactggttcaagaggtatagttattagtgcttctgatgtacagttggatgagacactgagactgttaaaggttttaagatacatcaaaaataattttcccatagaaattgtttacaacggagatctaagtcaagacgctattaaatcattagtcaaacatgccaggaatcaggacgccccggagtatccggctcaagaaatatggtttttgaatgtgcatagtatgttaaatccgggatattctgacaacttcgtaacatattccaacaaatggctggcattgattttctcatcctttgagattcctatcttactggattctgatactgtacctttcgtctcaatagacacgttttataactcagaagaattccaaagaaccggggttttatttttcaaggatcggataatatccgatgatctctttgagccatctcaagtagaagttctgaaggaagttatatatgggtgtattggacttaatttgacggatgaatcaactgtacatgacaggattgttaatcacataaaggatccaacggttgtccaagtgctagaaaacatgctgattaagaagtataagcatcatctggaaagcggcctggtaatattggataaaggtaggcacctcttcagtatgcttacttctttggccttacaattctctccaattgcggaatacttccacggtgataaagattggttttggctcggtgcgttattgtcaaacaacccttttacattttatcctgtggatgcgtcaaatatcggtcagctggggaacgtcatctcaaaggaaaccactggcgaattttaccaaatatgttctgtacagctgtcccacacagacaaagatggatcattgctatggctaaatggaggtcttagcgtttgtaaaaaagcctcgtgggaatatgattatgagcatagccagagactagctgctaatttccaagatgcggaagaattacgcaaatattaccaatcaccagtgcaactggaagggattataataccagacactgatatatcgggctgggccaaatcgggtgaatgttttctattcaactactgcacgctattcaaagaaggacaatatggaaaggtaagtaagtttactggtgccgagaaacgccgtttttcacaaattgtaggcatttggaatgaatag

SEQ ID NO: 2936 - DNA, 927 bp, Saccharomyces pastorianus
atgtccacaagcatcacggtgaggaacagagaccggtccctgccacccctattattgcccagtgtttccttgttggaaaaggatttatgtcgtggaggtgcccagaatgtaggcataactgatccagaactctcatcagccatttggacaagaaaacgggctccctcgtctgacgaactcgctcccaacttagcaaacaattcaatattccgagccaagaggctaaaatctgctactatggacgtgaacaggtatgctatgggcatcgccacgataacgcctccgccaacaatacccgtcagcgccatcgtctcttcctcgcaaaattgcatttcctctttcgaataccaaaaccatgctcttgcctctatcggcaatgaagacggcaatgcgaccaccactacaatgtccatgacctctcgctccaccagtaactctaccatttcctccacagcatccactggctcgaattcaaaaaggcaaagaagcggtccaagttgcgacaagtgtcgtttgaaaaaaataaaatgcaatgctaaaattgaaatcttgctccaagacgactccatgataccattgatctcggacaagctacgttacattttgactcccaacgatattcaactgcataaaggcactctactgcaaaacataaccctaccagacggtgtaatcgaggggaccagctcacggaagctgatcaagcatattgataagctggttctgctcacgccttgtttgccatgtaccaagaaaaaacacgcccattcttcctcttcttccaccttttcaaaaaatgttaattgcacattttcgaaaggcttcaccagagccgacataaatgtttcatctaaaatctcttcaaaattcaaagataaaaccatatacgacataacttatgatgactacaaaaccacaaatctgtaa

SEQ ID NO: 2937 - DNA, 1047 bp, Saccharomyces pastorianus
atgagtactaaagaaatcactgttttcgtttccggtgctaccggtttcattgccttacacgttgttgatgacttattaaaagctggttacaaggtcatcggctcaggtagatcccaagaaaagaacgatggcttgttaaagaaattcggtaaccatccaaacctttcaatggaaattgtcaaagacatcgctgctccaggtgcttttgacgaaattttccaaaagcatggtaagcaaatcaaagtcgttttacacacagcttctccattccatttccaaaccactgatttcgaaaaagatcttctaatcccagccgttaatggtactaagtccattttagaagcaattaaaaaatacgccgcagacaccgttgaaaaggtcgtcgtcacctcttccgttgccgccctagctactccagaagacatggggaataccagcacagttcttaccgaaaagagttggaaccgggacacctgggaaagttgtctagctaatgctgttgccgcctattgcggttccaagaagtttgctgaacaagctgcttgggacttcctcaaggaaaaccaatcaaatgttaagttcacactatctactgttaacccagggtacgtctttggccctcaaatgttcgccgattcattgaaaaatggtgtaaatacttcttcaagtattgttgccgagttagttcactccaaggtaggtagccagttctttaactacagtggttcatttattgacgtccgtgacgtttcaaaagctcacctagctgcatttgaaaaacctgaatctgctggtgaaagattagtcttgagtgaagatttattctgctctcaggatatactcgacactttgaatgaggagttttcacagctaaagggcaagattgccgttggcgaacctggcagtggtccaagctttttggagaagagctcttgcaagcttgacaactctaagaccaaaaaactattgggatttaaattttataacttcaagaactgtattgttgacaccgcatctcaaatgttagaagttcaaaaggaaacctga

SEQ ID NO: 2938 - DNA, 936 bp, Saccharomyces pastorianus
atggaagaagaagagcctttgaaaatcgctcgaatcaaagaaatacaagaaaaaagccgaatgatatttcgaggatggcagatgagcagcaggccttatttgttggaccgattatttcttttactcagtctgctgtttgttgttaatgcggagttgagcagcgatgtaagtgccagagaagtttacatgcccattttcaacaacgttctatcgttcaagctgccgcccatcaagcgctcgtcactaagggaagccaccccgtacgaagactttgcgtacagctccagcatgagcgcatccgagggggagttctgtatggtgttcgatgaggccatggaccacatgtccgaagaagttgtgtttgaaatccacgtgatggatgtgttgcaagaggaaaccgattcgaacaggttcggcgggaccagccacgaccgcgggaagcaatcgctggactttggcatctttaacaacaggaacggtgacttattgagaagcaagaaaaacctggcaagtggaatgtcggtcatcgaggtcaaccctgaaaacagcgatgagttcttggtgtgtttcataaatctggtttacgacggatcatggagcgcgatagacaccgaaaaatcagtgacgataaggatgacccataacgatgaactcaatccagacatgctgtcgcatttggccaagcaaatgactccgcaagttgcacaagcattgaaaaatgtctccgacggtatattcacaatggtaggcgacaccgagctcttgcaaatggaaagcgataggcgaaacctgaacgaagccacttacagttatatgatcgtggggttcgtgtcgcttatcgtggcagagttggtttcgaatgttatggtgttaagctacttgatcatcaagatgagaagcaaactcccatctcatatcgaaaaaaagggtatgtga

SEQ ID NO: 2939 - DNA, 1329 bp, Saccharomyces pastorianus
atgactacaaacagcggtgcagaactagaagaattagaagattgtgacgcacgttctgtcagcttgggaattgtagacgattatagtactgcattcgagttacctttaaaaccgaaatttctacagagtgaaaatttctcagatttagcaagcgactgggaaaagtccatgccagatacacctgggccatcaagcagcagtaagcctgacaacctgcagtttgaagatgcagctgataatagtacttcaaagaatagggtgcacgtagagcagttgttgcgatctgccaatgaaatgaatacttatttggcacagaacatggaaaagataaacgacttccaagtagggctattaaatggagggaaagggttgtatagtgcaatgggcgatgattcaagtgcatgtctcaacgcaaccaatttgagttcgacatcgaactttgagttaagtgacgatgaattggaagatacgactggttgcacgagttctatctttgataaaaatctattacatcaacaaagtggattgaacataactcgacgtaaatcgccgctatctaaacctcgtaatcctagttttgaaattggcgattcttccgatatagacaagcacaatgtcaaagatttcgatttttccgaatgcagtagcataacaagttttgatataggaggtctacatatcaggccaccacacggtgaagaagaggacaagttggaagaagaccgcgatgaacaagaagagagtaatacagaaagcgaaaacccattattacgtggaatacctagcgatacagaattgccgcatatgtcagttgaagaagctttggcaaactttagcggcacgataaatctaatactagaacttagtaagaatgaaaactgcaccatttctaataataaggagacggaaaaagaatacgcaaacttttacatgaagagcaaaccctctttgtcatcagtggactttcttaagagggttcaagacaaatgtgaatatgagtcaacggtttaccttgtagcgacatatttaatggacacaatatttttgactagaaatggtagtgacgttttgcaattgaagctgaaattgcaagaaaaggagatccatcggatgataatagcaacagtgagactaagcacgaagctattagaagacttcgttcattcacatgagtactttagcaaagtatgtggcgtatctaaacgacttcttagcaagttagaagtcagccttttagtttgcttgtccgatagtgaattaatgataagtaataaaaaactggtcgcgtccggacgaattctggatgaactacggtcttcctgtaaatag

SEQ ID NO: 2940 - DNA, 1509 bp, Saccharomyces pastorianus
atggtagcaactgtaataaaatcaaagaatttcacgacgatttcttgctcaatccgcaccttcggaattgcacagcgtctaagattatcgcctgtcccttcgttatcaacaagtaagaaatatagtacgaaatcaaaccaggaaaagaataaggatgcggaagggacgataaatgtggaagacaaaaagaatcagttgaaaagttctagcgttccaacttcacgaatatcgagattatttcattatggttcactagcagctggtgttggaatgaatgccgccgcacatggtatatcagaagttgcaaagggcaaatctccaacttggaagtcgttgattttgtcggatgcaaatattgaccgcataactaataagttctctaaaatgaggggtgtagctttgaaaatagggcagttattgtcttttcaggatgagaaagtactaccgaaggaattgtatgaaatattatcacgagtacaaaacagtgcaaatcatatgcctcagagacaattagaaagagttatggtcaatgaattaggcgcaaactgggaagctaaattttctaagtttgaaaaagtacccatggcagcagcaagtattgggcaggtgcatgctgcagaattgcccgatggccaacgagtagttgttaagatccaatatcctggggtaaaggagtccatcgactcggatctaaatagtttgctaatgttgcttacggcttcaagtttattacctaagggtttatttttggataaaacaattgctaatgctagaactgaactaaaatgggaatgtgattataacagggaagccagggccttgcaaaaattcgaagcattgctggaggatgacccagcattcgaagttccccatgtgttccctgaatacactacagataaaatcataaccatgacgcgtatggagggaacggaaataatgaagctttccaaagcatcccaagacactaaagattttatttcagaaaatatcatgagattatgtttggaagaaattgctacgtttgaatacatgcaaaccgatcctaactgggctaatttcctttataatgataaaacaaacaagattgaattactagattttggtgcatctaggccatttgctaaagaattcattttaaaatatagaaaacttctaacatttgcggctttgaatgatcgtaagggggcctacgaaatgtcagtgcaattaggctacctaactggattagaatcacaagccatgaaggacgcacacgtagatagtgtgttgacaataggtgaacctttcagatgtgatgttaataaagcgtttgacttcaaggaccaaaccgtctcagacagaatcaggggcaatatcggactaatgttgagtgagagattatgtccaccaccggaggagacatactcattacacagaaaatttagtggtattttcctcttatgtgcaagaatgggtgcttccgttcattgtgcaaagctctttaatgaaatcttttccctgaaggattga

SEQ ID NO: 2941 - DNA, 2010 bp, Saccharomyces pastorianus
atggagacatgggaagtcctagcatcgataaaagaagcaacgaagggccttgacctaagcttgggttctccactcattattagatccgaagatttgccagtttacgttcttcaattactgcaacaaaaggataggcgccacatgaagcatatatgtgcaaactctaagaaggaacattttttgttagaggagtatgggccagggttttgggtaaaatggccgtacacttatttcaatgaatatagcctgccaaagaaaaatacggaaattatatcatcactgaaaagagagagaggcaaacgtgaaacattaaagacatgggaacaaatgaagtttaaagagctgctttatttatggtcggaagaacctaaggtttcacataaagtcgaaaaggacacatgcttcaaactggatatgaagcctccagacatgaaaggccaatcaaaggtcaatgtcgatcactccgatcctaaagagtacatagaaaataagtactatgaagctcttttctccatacatgtacccttagcatatttcgtcaagtcgaacttagtgagagtcaaaaatacatgtcgaacgaaatatggaagtggtagctataaaatagcttatcaagccatattgcaaaaattccttttatcgattgttcaattcaatgatagacacgacaatagacttttattagagccttttggcagtcctattgcagacgaaaaaaggaacggttgtctcacgaaattcgtcatacaaagtggaaacaacaatggttcaaccgtcgctgacttatgtgttatatttaaatctcgagagataaaactacaaatactattgttattggagattatagggctaaacaatttagattgtaatttcaaagactttgaaaaaaagtataagtcgaaattgaaaaagagatcactcaatttaaccaagcaaagattgatccgtcgaagaccaaagaaggctattaaacaacaaaataaggacatcgaaaaaatagcaactcctttggactattgtgaacaattggatttgtatttagatagggcatgtattctggatattctgctgtcgagtgaaacacctaatccggatgccatagaaataaccaatggtacaatacaagagcataaaaataatattttgaataaaaataaagaagcttcgctggtcggatttataaattatgtccttattccatatttcactaaaaaggtgccgcatgccgttgactttataatccaaaagctcaagggaccaagcatgaggccaaaaagagctcctaaaaaaatcaccgatactacaggtgggtcgtcacctagtacagcagaattgtataataagttatcgacaagccagcgtacatctcgctcttcactcgtcaactctgtgccatcgtcacctgcattaaacggaacagagcctaatatatttagcaggaaatcaataacgactccgattccagaacttttgaattttagaacgaactctaacttgaacgaatttctcgaaagcgagactaggagcttgaggcgtccttctcaattaggaagaacaaagtccgatttaaccatgaatcatttacagaaaagacaattttcagtttctgatttaagtaagtcaagaattcctagcccgtcaactattccactcaagacaaccttttcacgcacagttaatggtgtacatacctctacaaataattcctttcgtagagttggaaaacgtaaagatatcaatgaaacagtgccatctaatgagagtatagatcccgaggagaacgtacaagttcaagccacccctgccgcgaaaaataggacgacaacccccaataaaagagcacagctgcaaagcatcgttgaatcaccactaaatcccaaacctgatacactccacgaaggtgtggagaaccctcagaggaaaatctcgcccttggccgctactctcactaaaacttcgtcggaaaataactcaaagagaagagttagaagacgtttatttgccccttaa

SEQ ID NO: 2942 - DNA, 1383 bp, Saccharomyces pastorianus
atgagattattagttagctgtgtggataatggatccataaaggaacttttgtgtaacattggcactgacacttctgtacaaacggctctacaaccatttcacgtggctcctcatctagccgagggattgaaaagtcacattaacaaaatatggatgatttctaaagatgaagtcatattggctagaaactcaggtgtcgttgaactcgtggaaatctcaaagcatgcgaaggaaaatgaagttgcagaaaccgacacaaaggaagaaagtaaaggtgtgatggatcctttacctaaattcgacatttctgaatttgagattgtcagttcattatcgaatcttttgaacgacctgaaacttgagcaattgtcaaaaaaatctgttaagaggaccaagttagtcgatgaatttgttacattatgtcctttaaagaatgagccgctgaatagcactttcgtagctgccactaaatcaggttcgctgcatattataaagaaagaaaaagatggaaagctaaataaattggcgtcccttgaactaaaagcaccattggaatttcttcagctgtatgatctagaggaggcccataacgataaaattttatttgcatatggtggagaagaaaatctagtgaaattggttgaaatggaatctgactttacatctttagaacaagtatgggaagctaaaaatgtcaagaacgatagactagatatgagagtcccagtatggcctatggctttgaagttcttgaagccttcccccaatcaaacagataaagataaactgaattatcagttttccgctatatcacgctggtcccatttaattaaatacagcacacaacatggcaggaagccttttgcccaaatagatttattacccaaccgtgacccactatcccagatggaagtttttgacacacatggaaaaaatgttgtatcttctttaggaaatttacagtccggaagttttgacgagttgaatgtaattactaccgatctcaaaaggaacgtgtttaaatttgatggaaagggtaagatgttaagcaagataggtagagatgatatcactggtacatccacttacgttcatgtacatggtggtaaatatcttttacaaggtggcttagatagatatgttcgtgtcttcgatataaaaactaacaaaatgttggtaaaggcttaccttgggtctcgtataaatgccattatcatgttagatgatactgaaattgaaatgccattaagtgcaagcgctaaagctgccaaagagaagcaaaagagaaaaattgcggaaattgaagatgatgcagacgatctttggaccaaattagaaggaaaagcaggtgtatctaaagctagcaagaaaggtaaaacttaa

SEQ ID NO: 2943 - DNA, 390 bp, Saccharomyces pastorianus
atgtctcaacctattcaacgtgctgcaacacgctcatttattcagaaatacattaataaggagactttgaaatacgtcttcaccacacacttctgggggccagtatccaattttggtatcccaattgccgccatatatgacttgaagaaagatccaacgcgaatctcaggtccaatgaccttcgctttaattacttattcaggtgtttttatgaagtacgctcttgcagtgacacccaaaaactatttgctgtttggatgtcacttgatcaatgaaactgcacaattaggtcaaggctatagatttgtcaaatacacatatttcacaactgacgaggagaaaaagattctagaaaaagaatggaaggagaaagagaagccaagcaagtaa

SEQ ID NO: 2944 - DNA, 651 bp, Saccharomyces pastorianus
atgatgagcaacttatcggaggaaaatgatgatgaaacgttttcggcggttcattctctaacacctagtatcaactctcaaacgtatgcgatacctataacggaggaaatgtccagctctttccatgattcaatcagtaccagtagcaattcgagcagtaatcttgatagcgataggagtagtatctctaatgttgcagaggcgcatgagatggacaaccactctattgtagatgaagatttatttttggataatgatattcctcaaccaagcaatttattgcttacagatgctcaagatcctggcccgatattcgacgtttccaggtacatcttcgattcactcaaacaatctattgactctacagacttttcggaatctttatccctacagaccaagacttctgctatcataaattccaagagcttagaacttaagcaacatattgatgaaatgaaaatcagattagctcaattgcaggggaaatttgagaacggggtaggtacttcaaaaagaattaaacatgatctagaaacttctaggaaaaacatcgactacttaaactctgctttaagaatcgatttccccattgaatttaatcaggcgagagagaaagtactagaacggaaactgaatgaagacaatgactaa

SEQ ID NO: 2945 - DNA, 1164 bp, Saccharomyces pastorianus
atgggctccgaaactgatgcatttgatgctatttttgaatatgcgtggagtcagattgacaagcctattagtggggatttcgtatatggtaaagatttaccgaaattaattgagatcattgaaaatgttttccaagaggcccagagaaatggttcttataatcttcgactacctttactttctgaaaccgataaagatttgtgccgcacgttttctaatacaaagactttttttaaaatacacaaagacgattttgacgatatcttctttaatctggttaataggtctcttaaggaaattctggaaaaaacatttgacggtgtgaattccattcctcgtgattttatgaaaagtctggatctagacctgtcttccaaatcccttgttgagaataagggcaatagcattcaagaacccatatctttaactccgccggttaaacataccgagtcaccaatcaaacgattcggtcaaagtaatacaagaaatacgttgaaagtgcaagtagaggatttacaaagggaactgaacatgaagcaaaatttattgctggaaaacgaaagacaggtaaacgaattgaaaagaaggttaaagacataccaacaaaagtatgcttccatacaagagcaatttaacgatttacaaaaaaatagacaaatagaaaccaatcaatgtaaacctcaaactgcggatgctgaatcacatgtggctgtcggaattgatcaagaagccattctggaagaattcaaaagaagattacaaaaacaaacagagaccatctctaccttgaaagatcaaatacggcaagaaagaggaataaattacaataacgataaaactttgtttctaaaacgcaagccttcaacttctaaacacgcatctaagagtttcgcagacacgttttcacttaatctatgggtaaatgcaataataagaacgataatttgcctcactttaataattggtgtcttgtcatacgttatgaaatatttatatagctctgatgcgccaacacaaaactcaagattgcaattgtcatggtgggagaataatggcatattaagtaaaatcgtgtggttttttcaagatcagacagatttagagattgagtactcttcaaatgccgaaatagatgatgcatatagccgagtattcggtatatag

SEQ ID NO: 2946 - DNA, 2151 bp, Saccharomyces pastorianus
atggctgaaatgaggtcgaaggatgcagtaattaaggagatcaaaccaaagattataaatgaatattctctttcccaggaaaacggttcctctcacgattcgtggaaaagtttaatatcgtcagcaaaggacacacccttacagtataatcatatgaaccgggaaactttaaaaaaatacttcaacccgaatgcccagcttattgaaaattctttagatgcgccaattcaatttagagtgtgtgagaaatgtgggaaaccgttagctttgacagcgattgtggatcacctggaaaaccattgtaccggagtttctggaaagaataacaccaaaggtgagaatacagaacttaaagatgaaagcaccaatgagactatgcacaatgaaacagaacctactggggtaaaaaataacgatgatgacgatgatgatgatgacgatgatgatgacgatgacaacgatgacgacgacgatgatgatgacgatgacgatgatgacgacgacgacgacgatgatgatgatgacgatgacgacgatgacgatgagaaccccaacagtcttaatgccaacggtaacaactataagaaaggcgactcttcttttaaccccctaaagagatcgacatctatggatttagctaacacgcctggtacagatacaaagagatctaaaacaggaactcctcaggcctccggttcttctacaaaaaaacaaaagaaggtcaaacaaagaaatcctactgaaaagcacttgatcgactttaacaagcaatgtggtgtagaattacctgaaggtggctattgcgcccgttcgttgacatgcaaatctcattcgatgggtgcgaagagggccgttcctggtcgtatcaaaccctatgatgtcttgctggccgattatcatagagaacatcaaacaaaaattggtgcagcagctgagaagcgtgctaagcaacaagaattacaaaaattacaaaagcaaatacagaaagagcagaagaagcacacccaacatcagaagcaaggtcagaggtcgaaacaaagaaacgttaatggtggaaagtttgctaaaaatggtaacaaaaattcgtctcacaacagtaacagcagcaacgaaataggtcatatcaacctgacccctgaagaagagaccacacaggtactaaacggtgtatcccgatcttttccattgccattagagtcaacagtagtatcttcagtcagatacagaactaagtactttagaatgagagagatgtttgcctcctccttttctgtgaagccgggatatacttccccaggatatggggccattcattctcgtgttggatgtttggatttggacagaacaacagattacaaatttcgcgttagaacacctcaaccgatgagccagatatcaaaccaaaatctcaatccgaaacaaattcaaagattacagcagcagcgagccttacaggcgcaacttctttctcagcagcagcagcagcaattagctcagactcaggctcaggctaatactcagccgcaaaaccaaggtatggcaatggggtccaatcaattcccgaatggggcagggaattcgccatttaatgcgaatatggtcaacaaacaagtccagcaacagcagcaaattcagcaacaacagcagcaacaacagcagcaacagcaacagcaacagcaacagcagcaacagcaacagcagcaacaacagcaacaacagcaacaacaacagcaacaacagcaacaacagcaacaacagaaccagaagcttcaggatacaggtctgacaccacaagagatccaatcccaacaacaaaaactacgacaacagcaacttcaacaacaaaagtttgaagcagctgcctcatatctggccaatgctaccaagctaatgcaagaatcgagtcaagatagctacttacccaataataacaataacaataacaatagtaacaacaatttgatgatgatgaaaacatccatgggttctcctagaactagcgtaaacggtatgcagtctccttctggtatgaacaatactaatacttcggggcaaggcgtctccactggtatcaacggctctaataatagtggtagaatcgaagtaggcattggaaacaccataaatccctataatggcagagtaaattga

SEQ ID NO: 2947 - DNA, 1431 bp, Saccharomyces pastorianus
atgtctaggaagctaccccatctccttgccacgaggaaatcaaagacgataatcgcgaccattcttctcttctacactctactgtcgttccattcctcaaacaaaaaattgttttctcaattttaccctaataaaaatgactatactattttgccttctacttcgcattcgcaagatttgaatttaaaagcgaatctttcattcaacaagaagaacaacgaattgcacgatttacgtgatcaactttcatttgcattcccttacgaccctcaggctcccatcccgcagagggtatggcagacctggaaagtaggtaccggtgataaggatttccctgccactttcaaaacctttcaaaaaacatggacagcttcatcttcaaagtactcccaatactcattgatcccggacgacgcggtcataccctttttagagaatctttacggcactgttccgcttgtcgtgcgggcgttcaaactgatgcctaaaaatatcttaaaggcggatttcctgaggtacctattgttatttgcaagaggtggtgtctactcggacatggacaccacgctcctgaaaccaattgactcttggccttcgcaaaacaagtcatggatgaacgatataataaacgtaaatacccccatcccttacaaaaatttaaaggtttctcccgtcaaagaaggcaaaatacagcagcagccagggttggtcatcggcattgaagctgatccggatagagaagactggagtacgtggtatgctcgtagaatccagttttgtcaatggactatccaggctaagccaggccacccaatattaagagaactgatcttgaatatcaccgccacaacgctaatgagtgtgcaagatccaggcctccctgtcaaatttgttttagatccaaccaatagcgaagactacaatgtaaactatagatacaagagacgtaataacgaaacttaccctcactccgacttgaaaaataacgagaacgtcgatggtacagacataatgaattggacgggtccaggtattttctctgacatcattttcgaatacatgaacaatgcgcttcaacacaacaacgatatcctactggtcaacccgaacctgaacaagaacgacgaagaagacggagcttctgtgtcaacaagcgaggctgatggtaatgcattgttcaaatcaacaaggaggttttataaaaaaatatcagaatccttacagtcatcaaacgtaatgccgtgggaattcttctcctttttgaaagatcctgttattgtagatgatgtgatggtcttaccaattacaagtttctccccagatgtgaaccagatgggtgctcaatcaagtgacgataaaatggcttttgtaaagcatatgtttggtgggacctggaaagatgatgctgataaaaatgctggccatacataa

SEQ ID NO: 2948 - DNA, 168 bp, Saccharomyces pastorianus
atgaggaacttgcatcatttgagaataaggcataaagcccatcccacccatcatttgaggatgagggaacatttgagagggagggccgttggcgaactgcggattttgaaggctttcatttggaaaagtatgaggggtgaggacttcctcaggatcatccagttgtag

SEQ ID NO: 2949 - DNA, 1188 bp, Saccharomyces pastorianus
atgtccagttcacgagataagaacgctttgtatttgccttggaacgaatgcatttccatcgcttccgtcctaatcggcgcatatgcatcgtataaatattataaactatgcaaggcgcaggatataccacgtccaaaagatggtgtggagcagctaataggaaacactcccctggttcagattagatccctttccaaggccaccggagttaacatttatgcaaaattagagttatgtaacccagcaggaagtgctaaagatagagtagcattaaacataataaagaccgcagaggaacgaggtgagctaatcagaggcgaacctggttgggtgttcgaaggaacaagcggttcaacaggcatttctatagccatggtctgtaatgcactaggatatagggcacacatttctttacccgacgacacatcgttagaaaagttggcattactagaaagtctcggtgctacagtcaataaggttaagcctgccagtattgtcgatccaaatcaatatgttaatgcagctaagaaagcatgcgatgatttgagtaaggaaggtaatggagtaaaggcagtttttgctgaccaatttgaaaatgaagccaattggagagtacactatcaaaccacgggtccagaaattgcccatcaaatggaaggaaaaattgatgcgtttattgctggctgtggtaccggtggaacgataactggagtggccaaatatctaaaggaaagcgcaaaaattccgtgccatgtcgttcttgcagatccacaaggttcaggcttttataataggataaactacggcgtgatgtatgactatgtagaaaaagaaggtacaagaaggaggcatcaggtggatactattgtagaaggtatcgggctaaacaggattactcaaaatttccacatgggcgaagagtttatcgatgaatcgatacgtgtcaatgacactcaagctatcagaatggcaaaatacctatcagtaaacgatgggttattcgtaggaagtagtacagctataaacgcagtagctgctgttcaaatcgcgaaaagactccctcctggtgccaacattgtaattattgcatgcgacagcggatcaagacatttaagtaaattctggaaagaagctaaacaaatagagtatgacatatcgttaaaggagataacaggtggcattcgatga

SEQ ID NO: 2950 - DNA, 558 bp, Saccharomyces pastorianus
atgcaagtctctccagctattataaaaggtatcgcagtctcatccttgggtttatacgccggtattttaacttcatccacagtaatttctatcaccacccctataaacgttttgactcaacatttgaaaggcgttctttgcaccctaggttgttggagcactgtattaggtggactagccacgagcgcctttggcctcagctattatttatctacaccaggagacagaccaaactacctactgtgtgggttgggtattgccccactatctgcggtatacctgtaccttgtatcactgtttaatcacaaattggcaccaaaatgtacgcgtaatgacctagaaaaccaaaaggacgaaaagttacctcaaaatcacccacaagttgaagatggagaagccgcatgtccattctcaaaaatgaacaacgccaaaaaattaaaagctgaatcagaaagaagtgtcaaatgtcactcatatatgacattgcacatgtgcattgttaccggtttaaccattttcacgtttggcaagtgcattctagacggattcagaacatga

SEQ ID NO: 2951 - DNA, 2781 bp, Saccharomyces pastorianus
atggtggagcaagataatgggccttcacagaaattgctcaagacacaatacgatgccgtcttccacttaaaggacgaaaatggcatagaaatatatccgatattcaatgtactgccacccaagaaggaatatccggactattacattataataaagaacccggtatctttaaacactttgaaaaagcgattacctcactatacgtctccgcaagatttcattaacgattttgctcaaattccttggaacgcaatgacgtacaatgcgaaggactcggtaatttataaatatgctaccatactagagtctttcatcaaagagaaagtcatactcaatctaagaaagtactacccagatttaaaatatccctctttaggccagattccggaagtatcaggtgaggcaatacaacaatccaatatgtccccgaatatcgctaatataaaggcaaacgacaatagacctgaattacattcggaagtaaaggcagcttttgccaaactggataatactattattgataagatacaaccaagccaagattacagaggacaaaaaagtctaccagcactcccaacacactctgcctccattaccccgcaacaattggcttcgcccactccagtcgttaattatacaaacaacaacattgcacatccgaagacccatgtcaggcgtggtaggccaccagtcattgatctaccctatgttttgagaatcaagaatattttaaagatgcttagaagagaagtcgaccaaaacaataagacgcttactctgtattttgaaaaattaccagataggaatgatgagccaacttactattctgtcataacagatcctatctgcttgatggatattaagaaaaaagtcaaatccagaaaatataaaaacttcaatagttttgaaaatgatttccagctaatgttaacgaattttaagatatactactcccaagatcaaagcaatataataagagctcagttattggaaaaaaacttcaacaggttagtgagaatcgaattatccaaacccgacgaagactatctacctgaaggcgaattaagatatcctttggatgaaattgaaattaatgacgaaaggtaccaaataggtgattgggttcttttatcaaacccaaatgacataaacaaacctattgtaggtcaaattttcagattatggtcaactacagatggtaataaatggttgaatgcttgttggtattttaggccagaacaaactgttcatcgggttgatagattattttataaaaacgaagtcatgaaaaccggccaatatagagaccaccctattcaggatataaaggggaagtgctatgttattcatttcaccagatttcagcgcggagatcctagttcgaaagttaatggtccgcaatttgtttgcgaatttcggtataatgaaagtgataaagtttttaacaaaatcagaacctggaaagcttgtttacccgaggagctccgtgaccaagatgaagccacaattcctgttaatggaagaaaattttttaaatacacttctccaatagcagatttattgccacctaacggtactttgaacgataaaatcccagaacccacagaaggtgcaccaacggctccacctttagttggcgcggtatatttaggctctaaattagagagggatgacttgggagaatattcaacttctgatgattgcccgcggtatataataagaccagatgatccaccagaagaaggcaagatcgattacgagacaggaacaatcatcaccgacactttaaccacaggcggtatgcccaaggtgaacagctcttctacaatgcgtttgcctactttaaagcaaacaaaaacaatttccaattcaaattttggttcttcatcaaatatttcactgttgaatcagaattttaatcattcttccaactttttgaaattggagaatatgagtaataatacacacagcttattatcacatccttccatttctaaatttcaatctccgacgttaatagaacaagtcaatcgctcaaaaaatcatattttgaagaaacacggacatgcatcctcagcggctactaagaagtctgcatccaaaagttttacgttaacttcaatgatcaacagcctaactgctcatacgtccaaatataactttaatcatattgttatcgaagctcccggtgcatttgtagttcctataccaatgcaaaaaaacatcaataccatacaatcaacagaacacgccagcagaacaagaccaaaaaaccctcaaagcctcggtactactgtcattgatgataccaatgcgcctggtgagcaaataatatggtttaaaggtcccggtgtgaaaatttctgaaagaattattgattctggaaacgatctagtacgagtacctttgaatggatggttttgtaaaaatcaaatgaagaacttagattacgaagaaattgaagaagacattatagaaccattaaatgacactagcgatgatatgatagcccatattttcaatcctccttcaaatttaaatttagacatggatttgaatttgagtccctcttcgaataactctaccaattttatagattttagtacaatggcaaacggcgaggacgatgggaaggaaagcgacacagcagaagaaactgaagatgaagatgaagacacagatgacgagcataatatggaagacgtcccaacaacctcagcttttggcttaaattcatccgctgaatatcttgcatttagactacgagagctcaataaatga

SEQ ID NO: 2952 - DNA, 723 bp, Saccharomyces pastorianus
atgtcttcgatggtgagttcattggctcatttctgtgacaaacatggcccaaggatcatatcggtaacacaatctgcagaaaagggaacattaggtgaagacttattagtacctgattatccaacagactcttactgtgagtcatgtcttttacagttccctgaagaatcaacgaggtcgatgagatgcttcattgaagatgtcccatttataactacccaatactcttctatacggtaccaattgctaaattccataattaaaagagctttttccgaagagacaatgatctatgataatatgccattcatatattttgatgatttgcgaggattgaacttggtgataggtttcaaactgtatgatgagaatgctaggggtaacgagagaaggtattgcttcattttgacagtggattccagaaatcacgatgaatctatgaaaatgttaagtgaaaactggaactttattattggcgggttcgataaaatgatcacttacatcaaaaacattcacaaaagtgaatttatggggaaaaatcaaaagaaagaagataaactagaaaccttgaataataacgcgtttattggttcgtatttgcgtgcgaataagtctaaaatcggtcgtaatttagtgtcccttacaaacgacaaatttttgtttgttcggatacacaagtggaattcatttttattgcatgcgcttatgaaagaagataaatga

SEQ ID NO: 2953 - DNA, 1485 bp, Saccharomyces pastorianus
atgagcactgaagaggactatatcgatgaacttgatgccgatttcggtgaagaaagcagtgctgaagaagacgtagcgcaaatccgggagactatgaaaggaaatgatcaaacaaaagagtgtgacccattcacaattttacaagatattatagaatcatacaagacgttgccacaagtaagtccggacgaattacctctatcagagatatcacaaatttcgccaaaaattgtcaaaataaaaaaagttttagaacaggaggatatcgatttcataaagatgctgccgtgcttaaacgccatcgttccactcattaaaaatgatataaaatcattgcacaattttctgattctattatacagggaccgtttccctgaactatcttcattgataccgtcaccgttacaatactcaaaagtggtaacaatactggaaaatgaaaactggtcaaggaatgaaagtgacaagttatccattcgtctagaaaatgaggcaaatttgactaaagaacaacttcttgtcctaacaatgtcgttaaaaacatcttttaataatgaaaagcccttggttgatgattcgaagaagctggtttttgaagctggcagcatgctgtataatttatgggaactacaaaaagatgttggtcaatatgtaacctcgaagatatcacttattgcccctaatatgtgttttttggtaggttcagaagtaacagcccaattattggcacatgcagggggggttttggaattcagccgaattccaagttgcaacatcgcatctattgggaagagtaagcatctttcacacgagttacatacctcagagagcggggtacgacaagaaggatatttatttaatacagagcttattcaagattttccaattgccatccataaacaaatgttaaggattctatgcgcaaaagtaactcttgcagcaagggtcgatgcaggccaacgatgtggtgatacaaatgcacttctaggccagaaatggaaagctgaattattagaaaaagccaagaagttatcagaggctcccagcattgctgaaacgaaggctttacctataccagaggaccaacccaaaaagaaaagggcaggcaggaaatttagaaagtacaaagaaaagtttaggctatcccatgttagacaattgcagaataggatggagtttggtaagcaagaacaaactgttcttgatacttttggcgaggaagtaggcttgggtatgtcaagtacttcattacagcaagccataggcgccacgtccgacgctagaaggtttgcaggcaaccaggctaagctaacaaaggtaatgaaacatagaatttccgaggccaatcaacagactgatgaatacctgatctcgttaggccatgacgcagagcacatcgaccagtcacagtgggcaggccaagaacctaagaagccgcgcaccaacccaaagagagaccaagattggttttcacatcatctataa

SEQ ID NO: 2954 - DNA, 945 bp, Saccharomyces pastorianus
atgttcaaggaggaggactctttaagaaaggggcagaatgtggccgtatgggaaactttattggcaggtgccatgtctgggctcctagcccggactgtgacggcccccatggataccatcaagatcaggttgcaattgaccccggcaaatgggatgaagcccttcgagagccaagttctggaggtggccaagggcatgataaagaacgaaggcatccgggccttttggaaaggaaatatacccggttcattgctgtacatcacctatggagcgggacagtttagttcgtactcgttttttaacacatgcttggaaccgttcgggctgggggcccggttacacagccttgttgttggggccctagccgggatgaccagctcctttctatcctacccgtttgacgtgctgcgcactcggctagtggccaacaaccagatgcagtccatgaccatcacaagagaggcgcgagacatctggaagctggagggcctccccggattcttcaagggctccatcgcgtcgatggccaccatcacggtgaccgcatcgataacattcgggatatacgagacaatcaagatatactgcgacgaaaaggaaaacacggcaacggcaggtaccaaatggaagctgtccgctctgaaccacagcgccggtaccattggcggggttgtcgccaagatctccaccttccccttggagacgatccgcagacggatgcagttcatgaactcgaagcacctggagaggttttcgaagcattccgatgtatacggctcctacagagggtccggcttcgcaagaatcggcctgcaaatactgaaacaagagggggtaacctcgctctacagaggcatcctcgtagccctctcgaagacaatacccaccacttacgtgagtttctgggggtacgaaacggccatccactacctgcggcgatgctaa

SEQ ID NO: 2955 - DNA, 4887 bp, Saccharomyces pastorianus
atggcgaagcaagaggatccgttaaatgaaataagcccgaatactccaatgaccaaaaagtgtcatttattaaacgagacggtatcgaaagtccatcgcggtaaccaagcaagagcaccaacctccacattggccgaagccagtttaactacctctgatgggatactcacgatgcataatggcataattcaaaactttctgaaaactgcccacagcaatatagaattggctacagaagatatcaataatgtggaccgctcattaagttcgatatattctctattgaagagccgccatatgctgggccatatgaactctactgtcaagcagcacttgatgatagttgtcaaacttataaatggcaacgtattggggttagcttcatctgagatcatttttctttataatgaaacaaacttatttcaagctcacaacttgaaagacgtcctccttgcggacttcaatgtatggaatgattattatctttcgaacttaaaaatactgacgttacaacttatactaaagagaaagctagtgaaagaatatttaccgcatgtgttggagctgttttcccatgacgagagattcctgctgaaggattccaatctgaaagcgcacgcccttacaaaaatcgtattaaacttcttctctgtaataccgaattgtaaagccttatttggtctgaaatttttgcagtacgtcaagcagtataaattacctttcaaaaactacattagcaacatcagcattgaagatttcagtaaaaaacttctgcataaaagttatattgacacagggcctaataaaatatatttaaattcattttacttatcctattccagactgtacgatggcctggataagttgatgcttttagatcttttaagttacgaacagccttctaaattacaaggcatgaccagcgcgaagaaggagttgaatgagtactgcaatatgaccgaaaagcgccttctttggtcttgcgtttctcccgatgatttgggtgtggtgctcgaaagcgcgacagcatttttgcaaggcaaaaggaggaaattatcagtatcattagattctttagtatgtctttggtctactatacgtctagaaggtttacgaaagaataagaatattttaaggcaatttgatagtactatcatttatgttaattcgaatatcaaatccattgatgacgatcttactgtaaattcaatattcgatcttttgactattctatctgagatctgtattgattatagggagttcaaacgattggcaaacgtggttagtctttttttcaatgcatcagttttattcaaaagacattctttcctattgaagactgccgacttggaaatcaagagtcttttacttaataatgacccgaaaacagttcaccggaccatgttaaaattcgagaagtttatttcaagcgcccaaaatcttcaaaaaaaacttgaagttttctcctatttgttcaatgtatattgcctgctgaggattgactccttatcatttatttttgatttttgtcagaacgcattcatacactgttttacacgcctaaaatcatccaaattcatagagttttcaaactgctccgaagttatgctttccatactatatgggagctcgtctatagaaaatgttccgtctgagaattggtcacagttaactaggatgattttttgttcattaaggggaaaccttgacttggacccttccgaattgaatggcaaatcagataaaccacacctcttgaacaagtatgagttattaattaggatagtgtatttactaaacctggatatgagtaaacactcaacaacgaatctatcaaacatttccaaaatgtacataaacaaatggttaacaccgcatgaagtaaccgaaaagatatcaccatttgaaatgaattttgtcaaaatgctactgtgttacttaaattttaacagctttgataaactatccattgaactctcactctgtatcaaatcaaaggaaaagtgtttttccagcatcatgccttatgttgacaattatttactacaagcctatttgagcttacatatgattgatgacgcattgaaactaaagaatcagttacaaataacagcaaacttgcaaacagctaaaatggaacacgcactactacatgttgactccttaatggatattcacttgtgggaggctgacctaaaagcatttcaaataaactttcgcgaaacgctacctactctcaggcctgaattatttgatattaataacgaatacaagcaaccgatgtcattgtatatcagagttattcttttgaatataaagctttttagcgtaagcgcgaagctcaatatcaaggccggtaaggtaatatcggctgtactggattgtaaaaaggcacaaaacttgtctttatccctacttaaaaagaagaatcaactatcacagggatcaaggttggctttactaaagagtttatcaatcagctttttccaaatcatcgacgtatgtatacgtattggatctgcaagagattgtgaattctactgcaaagaactgtccaagattctgtgcgatttaggggaaccgatcattgtttatagatgtcttcattttcttcacaagtactatatgattacagagcaaagcagccttcaaagtataaccctaaaaaaagcaaacaaggcattcgactacctggatgcagaggcagatatcacaagtctgacaatgtttttgtacgataacaaggagttagtaaaactagaacagtcgttggtacttttttttggtgaccagctaaccaagacatttctgccgaatctatggagacttaaattgggaaaaaatattgatgatactatttgtttgcctgaatataaggctatgaatataatcaaccaagcccgcaacatgtggcagaaggtaatcagccaactggaggaagaccccttttttaaaggtatgttcgagtctaccttagggatcccttctttcttaactgctcttcctagtacgatgtccaacaatgtactcaaaaccccgtcgaagcatggtatggggctaaagctttgcgattctccaagatcatcgaacatgacacctaaagggaagaacatgagacaaaagtttgacagaattgccgctattgatagactaaaaaaaatgaaacaacttttagaaggcttaaaactagacacattggaaaatcatgaattgtccaagattgcctccctattttcactaacgctaaccattctttcgaatattactaacattcataatgttgagggtaatttaataaccagcttctctctaactgatctgccaaggcacatgcccttgctattcgataagacattaaataatatcaataatgaggagtacaaaaactttcatacatcttcactaaaaaccatcggcagcatatccgccgccacagaaaatgatgcaatttctgtcgctcaacaaaacataatggatagcaatttggatatcaatgtcatcactattgacttttgtcctgaaaccggaaatttacttttatcgaaaattgaaccgaagtacgaaagaagaacgcacttaagattatcattaatacgatcgaattcaagagaccttgatgaagcacacctttcgtttatggaggcaacaaaggaactactttctatcattaaagaaagtaatgaaacaacttcggtggaggttaccagcaagattaaaactagagaagagaggaagtattggtggaccacaagatacgaattggataagagaatgcaagcattattgaataacatagaaaatagttggtttaatggcgttcaaggtttttttagccctgaagtcgtcaatggctctctctttgaagaatttaaaggtaagttctatgagattttacatcaaaacctaccctccaggaaactctttggaaatccaaaaatgtttatgaagattcaagattgggtgatagaattgtttttaaagctcaacccccaagaagcagactttctttcaaagatggaagatttgatatattttgttctcgatattcttctattccatggagaggaaaatgcttatgatgaaattgatttcagcatgcttcacgtacaattggaggaacagataaagaaatatagagcgaatatgacaaccaatagtatattccacacgtttttggtagttagcagttcatgtcatcttttcccatgggagtgtctttcatttttgaaagatatttcaattactcgtgtaccttcttacgtttgcctaaatgaactcttattgcgtttccattataaattacccatttctgtatgcatcaaggataacattagtatggtattaaatccaaatggcgatctgtctaggactgagtcaaaattcaagggtatgtttcaaaaaataatcgatacaaagccttcctctcagttagtcatgaatgagaagccagaagaagaaacacttttgaaaatgctgcaaacctccaatttatttgtttacataggtcatggtggtggtgaacaatatgtaagagggaaagagattaaaaaatgcaccacaatcgctcctagtttcttgctgggttgttcttcagcagcgatgaagtattatggcaagttagaacctactggaactatttacacttatttgctaggtggttgccccatggtattgggtaatctttgggatgtgactgataaagatatcgataaatttagcgaagagctttttaaaaagatgggatttaccgacaacgttgacgatttgaatggcgataacttatctgtctcacatgctatctcaaaatctagagacgtttgccatctacgctacttgaatggtgcagctcctgttatttatggactaccggttcaattcacgtcataa

SEQ ID NO: 2956 - DNA, 2073 bp, Saccharomyces pastorianus
atggatttagaaacactgaaacatggggcacatagtgatcagatacatgaaattctaaggcaattagagacctgtaccaatgagccagtaaatctcgagacctcgatgatcctcatcaaattcgtccttcccgtatatccatcgctgccgggaaacactaaggtgatcctcagacggctagtttctaagtcgtttacgtttttagcgcacttgataacattctctacaacactagatcgtcgcggtgggatgaatgagattcgcatatatcaagagtttttgaaagacgttattagtcttgagcaaggatgtttgagctgctacataaagacatgcgctgctagtaacgtgaaccgtaatagcgtcaaggcttttttttttggaagtaagatatttaatttgttggccagccaaattgacatagctaaatacctggaatatttacgccttcagtggaaatttgttcttgagaacgacaatatcaaaacaaattcagacggattcctaggtgaatggctattgtcgacttttcttctcagtcctgcattagcaactgacatattcatggacgaattattcttacttgaagaaaactatttttcttcatttcaaaaaatagtatcaagtagtagtcccttagtgcaaaggaggcttgttactaagttcctaataccatatgtccaagcacatttaactgaagtaaacataaatgatgttaggaaaattctaaggcggtttgaccttgataaaatcatgagtctaaccgtactgctggaaatacagtctctacctctaaaggaaataatagttcgttcgatagataatggtacttctgtgaaaaccgcgaatgcattggttaatcaattcgcagattttgctgacgaggacagagatgaaaaaatttgcgaattacttgtgctgctcacggtttataacctgaacaagaatcagaaagaagaaatatcacatagcggccaatttttaaatggtgtaacgaagcatttgggcagcaacgaacgtgaggcaagagaaagggccatgtttattgctaagcttctatccgataatgagttaaagtacgaaagtgatttcaaaatcgatgtgccaaatttgaagttcgaaagcaacagtgatgacgaaatcatcgacttcaaatctctgaaaaccccatcagtattcaatacccacattgaggaaaagaacaacaaagttatagagatctcgggccgtgttcaatctcttgcaatgggtgacggtgatagtgatgacgaaaatgatgatgatgatgagtgcgttaagcggattgtatttttgaaagacttaatgagagagtatgaacatactggtgagtctcggaaaactcgattaataccgcttctgaagcaaacagtaaaattggtacggcagaagacagatttcccattagaagttggttattatgctcagggaattttgtcaagcctaacgtgcttaaacaatgaattcgatgaatcgcttttcgaacaatggagaatcaatgccttagtaagcgtactagtcgttcttccagcaaaggtaaccgatgcaataaagatcctttttaattcggggctttcattacagcaaaggatgtcattattatctgcgttaggtctttctgcaagggagttaagaggtcttgacgatccaaccgtcatcaaacctaaatttgattttcctacagatcgtttgccttgggacagccaaagccatggcaatttaacgcttgttgaagttcaagagtcatcgagtctaatgaaagagacgaaaacagtatggaagtctaggaaactgggcagggatcaagagaaaggaacacaaaaccggtttagaaaacacgcgaatttgttcttctacccattggcacacggttggctcaatggtattgaggtgggtacatacaaccagcttttcaagtcacattatttaaccacattgcgtatcatatattcttgcgccgatccagtccatgactttgacgctatgactcaattgatggatcaagtagtgagtctagcaatagaagagggagttcccctcaaccagaatcagtag

SEQ ID NO: 2957 - DNA, 4356 bp, Saccharomyces pastorianus
atggaagagacgggagattcaaagctagtccctagggacgacgaggaaatagtgaatgacaacgatgaaactaaagcgcctagtgatgaagaagaaggtgaggacgttttcgactcttcagaggaggacgaagacattgacgaagatgaagacgaggcaagaaaagtgcaagagggcttcattgtcaatgatgatgatgaaaacgaagatttaggaacaagcatttccaaaaaaagaagaaagcataagagaagagaaagagaggaagacgaccgattatccgaggatgatttggacttattgatggaaaatgctggtatggaacgcactaaggcaagttcctcttccgggaagtttaagaggttgaaaagagtgggtgatgagggagatgcagctgaaccagaaaatgaaaatgttgctgcttcagggcaagattctacatccaaattagaggatttcttttctgaagatgaagaagaggaagatttagtttctcgtaaaggtagaagcaacgaatatggccgcgacgaagaagatcaggaagatgaagacaggacggctgacaaaggtggaattctggacgaattggatgacttcattgaagatgacgagttttctgacgaggacgatgaaactagacaaagaagaattcaagaaaagaggcatttaagggaacaggccactaaacaacccactcaaatcacaggtttatcgtcggataagattgacgaaatgtatgacattttcggtgatggccacgactacgactgggctttagaaatcgaaaatgaagaactagaaaatggtaatgaaaacaatgagattgaggaagaagaaattgatgaagaaaccggcactgtaaaaagctccaagaaaaaaatctctttagaagatatttatgatttggaagatttgaaaaagaatttgatgaccgaaggagacatgaagatcagaaaaacggatataccagaaagatatcaagagttaagagctggtattacagattacggaaatatgtcatccgaagatcaagagttggaaagaaattggatagctgaaaaaatatcagttgacaaaaatttcgaagccacttatgacctaactgaattcaaggaagcaattgggaacgcaatcaaatttatcactcaagaaaacctagaagttcctttcatttatgcttaccgccgtaattacatctcttcaagagaaaaagacggcttccttttgactgaagatgatctatgggaaattgttagccttgatattgagtttcacagtcttgtgtacaaaaaagattatgtcaagagattttacgaagaattacacgttgatgatccaatcgttagtgagtactttaaaaatcaaaacactgcatcaattgctgaattgaattctttacaagatatttatgattacttggagttcaaatatgccaatgaaattaatgaaatgttcataaatcacactgaaaagtcgggtaaaaagcacttgaaaaattctagttacgaaaaatttaaggctagtcctctttatcaagcggttagtgatatcggtatatctgcagaggatgtaggtgaaaacatcagctcccaacatcaaattcacccacctgtagatcacccaagttacaaaccggtagaagttatagaatctatattgaacgcgaacagtggtgatttgcaagtcttcacctccaataccaaattagcaattgacacagtacagaaatattactctttggaattgtctaaaaataccaaaataagggagaaggtcagatccgacttttccaaatattacttggctgacgttgtgttaacagctaaaggtaagagagaaatccagagaggatctctatatgaagatataaaatacgctattaatagaactccgatgcatttccgtagggacccagatgtttttctgagaatggtggaggcagaatctctgaatttgctgagtgttaaattgcacatgtcatcccaagcccagtacatcgagcatttattccagattgctcttgaaaccactaacacctcagatattgcaatcgagtggaataatttccgtaaattggcatttaaccaagcaatggacaagattttccaagatatttctcaagaggttaaagacaacttagcaaaaaactgtcaaaaacttgtagccaaaactgttcgtcataaattcatgacgaaactggaccaagctcccttcattcctaatgtcagagaacccaagattccaaagatcttaactctaacctgtggtcaaggtaagttcggagccgacgccattattgccgtctacgttaacaggaaaggtgatttcgtaagagacttcaagattgtcgataatccatttgataaaatgaaccctgagaaatttgaggacactttggataatattattcaaagttgtcaaccaaatgccatcggtattaatggtcctaacccaaagacgcaaaaattttacaagaaattacaagaggttttacacaagaaacaaatcgttgatagtagaggtcataccattcctgttatttatgttgaagatgaagttgctatccgttaccaaaactctgagagagcagcccaagaatttccaaacaagccacccctagttaaatattgtattgccttggcgcgttacatgcactcccccttattggaatatgctaatttgtcaagtgaagaagtgaaatcgctttcaatccacccacatcaaaacctactttctgcggagcaactaactaaggctcttgaaacagcttttgttgacattgtcaacttggtaggtgttgaagttaacagggctaccgataacaactactatgctagcgcactcaaatacatttctggttttggcaaacgtaaggctatcgattttttgcaatcactgcaaagattaaatgaaccattgctggctcgtcagcaattgatcacacacaacattcttcacaagactatctttatgaattctgctggttttctgtacatttcgtggaatgagaaaagacaaaaatacgaagatttggaacacgatcaattagacagcacaagaattcatccagaagactaccatctggctactaaggttgctgctgatgctttggaatacgatcctgatactatatctgagaaggaagagcaagggacaatgagtgaattcatcgaactcctaagagaagacccagaccgtagaacaaagttagaatcattaaatttagagtcttatgccgaagaacttgaaaaaaactcaggattaagaaaactgaataatctgaatacaatagttcttgaattattggatgggtttgaagaattaagaaatgacttccatcctctgcaaggtgatgaaattttccagagtctaactggtgaatccgaaaagactttcttcaagggcagcatcattccagtcagagtagaaagattctggcacaacgacataatgtgtgcaaccaactctgaagtagaatgtgtagtaaatgctcagcgtcatgcaggtgcacaatttagaaggccagcaaatgaaatatatgaaattggaaagacttatccagcaaaggtaatttacatcgactatgctaatattactgcagaagtgtccttattagatcatgatgtaaaacaacaatatgttccaataagttacagtaaggatccttccatttgggatttgaaacaagaattggaggatgccgaggaagaaaggaaattaatgatggccgaagcccgtgcaaagagaacacatcgtgttatcaaccatccttactatttcccctttaacggaagacaagccgaagattacctaaggagtaaagaacgtggtgagtttgttatcaggcaatcaagccggggtgacgaccatctagttatcacttggaaattggacaaagacctattccaacacattgatattcaggaactagaaaaggagaatcctttagccctaggtaaggttcttgttgttgaaaaccaaagatacaatgatttggaccaaattattgttgaatatttacaaaacaaagtaaggttactaaacgaaatgacttctagtgaaaaattcaaaagcggtaccaagaaggatgtggtaaaatttattgaagattactctagagtgaacccaaataaatctgtttattattttagtctgaactacgataaccctggttggttttatttgatgttcaagattaacgcgaatagcaaattgtacacatggaatgtaaaattaacaaacactggttatttcttggttaactacaactatccaagtgttattcaactctgtaatggtttcaagacccttttgaagtctaacagtagcaaaagtagaatgaataactatcattag

SEQ ID NO: 2958 - DNA, 1428 bp, Saccharomyces pastorianus
atggatggcaattgcacctctaggttttacactaacctcttaattgcaaagtatttgaagcaaaatggcttggaagactcattggcggcttttataagggaaacggcactaccattctctgccttggaagagagcaaaaggtcgaacggtattgttggtgaggtaccgatagaaagtctacagaatatcattcaagatagaatttgctacaaaaaatcgtcattccaggaccgattcaaaactctttcggtaaacgatgaattggccccaatcgataatgcgagatatggaatcgagccgtggaatcataatataaaattttcacttgatttgaatttaaacaaagttttacccagggatacgttgttcattagtgcgaacttcatagataatgataaaaatttattactttcatcggcgacgggagagctgacaatctacgacgtccaaagaacgacgtcaaaggtccttaatgcccataaagtggttaaaggtattatcaagctatgcgggtcgattggtagatccggttatcactatgtgtgcccaatgaacgggagattttacctgttgaataagaattttgaatttatcactgatgcagtatggaaagttcattcaagaatgataacgcatataaagatttgtacttttacagaatcctcttggtatatcatttcaagtggcatggataatctcttaaaactgagcttattggaagtacaggatggtaagattttgttcaaacaattatcagaaataaagcttgtctccaattgtacgtcgctaaatgtgatcactgatgatggtaacaatgatggtcgtactaagttctcagtgtttctcactagagctgaattcacacatatagcatgttacgcgatttcagatgcaaaagcactggtgcattcatacaacatcgctttgaacaacgccgaatttagcacatacgcattcaacattcgagatgcaattgtagcagattttgttcattctggtagtgaagatgtgataaagctagcacaaagttccatgttagtagtggccacctcacacaaaccttatatgaggttgatgttagttgagatacccatggagatagaccattttgagtcgacggtatcagaggcaactccaaagacatattacgataaagtcttgagaaatttcgccacggaaattagccaagatgatttctcgttaccgattctccaaagtttgaaaacttccaacggtatactagttggaaatgatgagggaatttacagcattgatttaatgaacggtgactccagactattgaatattcccgatggggcaaaatcgctacgtaacaggataaagtgtatggatgtgagtgaagaccaaatgagagtagtcgctggaacatctgataaatctatttgtatgctgaacataaccaaataa

SEQ ID NO: 2959 - DNA, 1485 bp, Saccharomyces pastorianus
atggaaacgatggaaagtcgatctacagggcctcttacgacggaaatttacgatggccccactgtggcctttatgattttgggtgccgccttggtttttttcatggtacctgggctgggattcttgtactcaggactggcgagaagaaaatccgcattggcgttgatttgggtagtgctgatggcgacgctggtcggtatactgcaatggtacttttggggttactctttagccttttccaagtccgccaccaacaacaaattcattggaaacttggactcgtttgggtttaggaacgtatacgggaagaaatccgacggcgatgtctatcctgaacttgcgtatgcgaccttccagatgatgttttcctgcgtcaacttaagcattatcgcaggcgctacagctgaaagaggtagattgctaccgcacatggttttcctcttcattctagccactattgtgtactgtccggtgacgtactggatttggtctccgggcggttgggcttaccaatggggagtgctggactgggcaggcggtgggaacattgagattctgagtgccgtttccggattcgtctactcttggtttttaggcaaaagaaatgaaaaactgctgataaacttcagacctcataatgtgtcgttggtcactctaggcacgtccatactgtggtttggttggttactcttcaattcagcctcgtcactatcaccaaatttgaggtcagtttatgcctttatgaacacgtgcctcagcgccattactggcgggatgacatggtgcctcttggattatagatcagaaaggaaatggtcgactgtcggtttgtgttctggtatcatctcaggattggtagcagccacaccaagttcaggatgtataactctctacggctcgctaatccaaggcattgtggcggggatcgtctgtaattttgccactaaattaaaatactatgctaaagtggatgacgccatggatattcttgctgagcacggagtcgcaggcataataggactaatattcaatgctcttttcgcggcagattgggtgatcggtatggacggagtcagcgaacacgagggtggctggataagtcataattacaagcaaatgtacaagcagattgcttatattgccgcatcaataggatacactgccgttgtcacggcaatcatttgctttgtgctcgggtacattcctggaatgacgctgagaatatctgatgaagcagaagaacgtggtatggatgaagaccaaattggtgaattcgcatacgactatgtggaggttagaagagattattatttatggggtgtagaagaagattctcaacagtctactgtaaatcaccgcagtactgacactcgctcaactgttgaccatagcagcagtaccaatagttctttagacgggaacgaagaaatggcccggtcggaaaagataacaccatctcatcaagaaaagcctagcgataggtga

SEQ ID NO: 2960 - DNA, 2616 bp, Saccharomyces pastorianus
atgtacatggtcagatgtggcctcaaacctaatgtaccgtgtctttcacttgacctggcctttgcgctatcgaaacaactcataaataggcgttttagatctaccttacaaatggaagatgatagaaatataatggaaaccctcggcaaagacaaaagtatatcctccgaagaagttgagtttaagttagcacaactaagggaatttaccaagaacctaaagagccgtattcacaatgtcaagtcgccaaagttagctagttataaagtcaacgatgcggcgtcaatatctgaggaagctagaactctcgatattagcagaaacatctctttcgaaaatgaagcacctgtaactgagaataagggtaccggaaatctggtcagtttgatccaatcttcattttcagagaaggttaattatcttgtaccgaaagtaataagagaaagagtagccgatgacgacgttcttgcgaaaagtattctcgacaaatctcagaggaactgggcacctatcatagataaactttataccagtggtgaaagactaaaaaacactgattccaaggaaatgtccgtttggttaaaggatacaataaaagttttgccattccatagtatccttcaattggatgaaatgctgttggagcaaattgacggagacgttgctaaattcaacactcatatgtatgaatgcattttcaacaatttagggaacttaagaccaagcagctcgaatcagaatgctactattaacgacaaagtcatactcaaaatgaaacaattactagagaggtatgataacaccttgaaaataattgaagagagacgtgctaaaaatgaaggaccacctctgcgaaaaccaaagatgacccaactaatattcaataactgcctaaaatactcaagcaaatgctcgagcttcgaagacatggagtatttcattgtaaggtttaaggatatttatgacatatcgccaaacaaacaaaacttaactaccgtgatacaattctattctagaaaggaaatgactaaacaagcttggaatacttttgacacaatgaaatttttatccacaaaacacttccctgacatacgcacatataacaccatgctacaagtatgtgaaaaggaaaagaattttccaaaggccttagatttatttcaagaattacaagaccataatatcaaacccacaactgacacttatataatgatggcgagggttttagctacttcaagcagtaataccattgtaagtgagggcaaaccaagctctctgagactgttaggatggaaatatcttcatgagttagaagaaaaaaagctttatagacacaaaaatgatgagttaaacttatttctggctatgatggcattagccgcatatgacggtgacgtcgagttgagtagagctctgtattacttatttattgggaaaaagtacaaaactgtttgcgcacattggaatggaaacatttccaaagaccaagacaggatatggaaatctgttttgttacccgagatgctaaattacttaatgcttgcttatgcaaactttgatcctagaaaattgccagtgttatctggctacgagaaaggtattgagttgagaaggagattgttaagtgagttcgactccgccggaagattggatgatactaacaagtctgtcagatttaagttgccatttcttccaattaatagttcgactttagaagcgcaagtactggcggaatctaatgcagtttggaatttcaacctcgaaaatggaggaacatttcatacattgacatctacgaatgaaacaatacgagaagcagtaaaaaaagatgaacagttgttcgattcttttgccagggatgcaaatgatttaaatgatttcaaatttagaatcatgtatgaagtggctaaaaggaaaaaggatgacattaacgtcagagtgttcaacaaaatatctttatacacttatttgacaatacccataaacttaaagcatcaacaagaattcctgcgaaggttaacagtcttcacttttcaacaacatgaatttgaagctgtcataaaacgattatatgagagttattgtaacattctcttgactgatcatatcggtcaaaaatgtacgtcagatggaaccatttccacaaacgaggtcgagataaggaaagagtcaacgttgagaatggatgatatatggtacatcacctgtctgaaatataaaattatgatggatgccacgatgtacgaattggtaatgaaagctgcgacggaatttcaaaatgaggaattagctaaaaaagtatggaacgacaggggtaagttcaggacgactacgccgtttttacaaactgaccaaagaactaggatatcaaaggaccagaaatttgcacacttgatggtcgaatttttcacaaaacagggaaaatattctgatgcaatggctatcgttctatcttccaaaaatcgtttcaattgggcgtattctatggtcaggaacttgcacaaggccctggaagaaatcgatgatagaaataatgttgagatcttacttgatgtggttaataagaaatcgcatgcaaatgcattaaagtgggaagagcgggagctcaagttctaa

SEQ ID NO: 2961 - DNA, 1026 bp, Saccharomyces pastorianus
atgagtttagatgctacagattctaaagccatgatcctattgatgggtgtaaggagatgtgggaaatcatccatttgtaaggttgtttttcataacatgcagcctttggatacgctgtacttggaatcaacctcaaatccttccctcgagcatttttctacccttattgatttggcggtaatggaacttcccggacagctaaactattttgaaccgagttatgattctgaaagattatttaaaagcgttggggccttagtttatgtcattgactctcaagatgaatacataaacgctatcacaaatttggcaatgattattgagtatgcatataaggtgaatccctccataaatattgaggttttgattcacaaagttgatggtttaagcgaagattttaaagttgatgctcaacgtgatataatgcaaaggacgggtgaagagttgctagaattgggattagacggtgttcaagtttcattttacctgacatcaatttttgatcactcaatatatgaagcattttcaaggattgtgcagaaactgataccggaattgtccttcctggagaatatgctagataacttgattcaacattcgaaaattgaaaaggcctttttatttgatgttaattccaaaatttatgtttccactgactctaaccctgttgatattcaaatgtacgaagtatgctccgaatttatagacgttacgatcgatttatttgatttgtacaaggcgcctgttctgcgaaacagtcaaaagaactcggacgaaagtaatgcgataaacccccgtaacgaactgcagaacgttgcacaactggctaatggcgtaatcatctatttaaggcagatgattagaggattggcgttagttgcaatcataagacccaacgggacagacatggaaagctgtttaacagtagcagattataatattgatatatttaagaagggattggaggacatatgggcaaacgcaagggctagtcaagccaaaaacagtattgagaacggtatgtga

SEQ ID NO: 2962 - DNA, 1509 bp, Saccharomyces pastorianus
atgaaactgctcgatataatatcggtactcggtacctcttcgttgttgtccaaattggctgccgccgacagtacaactactactgacagtacacctactgacagttcgtgcaacccactaaaaactacaggctgttcagcagatactgccctagcaaccagtttcagtgaagatttttcatcttcatccaaatggtttactgatttgaagcatgcaggtgaaatcgaatacagtaaggatggtttgtccatgacgctggccaaaaggtacgataacccaagtctgaaatctaatttttaccttatgtacggtaaggtggaagtcatcatgaaagctgcgagtggtaccggtatagtttcatcattctatctacaaagtgacgatttagacgaaatcgatatcgaatgggtaggtagtgacaatactcaattccaatcgaacttcttttccaagggtgataccacaacatatgacagaggccaattccacggtgtcgatgctcctactgataaattccacaactacactctagattgggccatggaccaaacgacctggtacctagacggggaatctgtcagagtcctatcaaacacatcgagtgaaggttacccacaatccccaatgtacctaatgatgggtatctgggctggtggtgacccatccaacgctcctggtaccattgaatgggctggcggtgaaaccaactatgctgacgctccatttactatgtacattgaaaaggtcattgtcactgactattccacaggtaaacagtacacttatggtgaccagtctggttcttgggaatctattaaggtcgaagacggttctgtttacggtagatatgagcaggcgcaagaggatttcgctgctttagctaacggcggtagtgtttccagctcttcagctacatcatcctcagctacgtcatcatccgcttcatcttcggctacatcatcagccaaatcatcatccacttcatcttcagctacatcatcttcagccaaatcatcatccgttgaatcatcatccgctacatcatcatccgctacttcatcatccgctacttcatcatccgctacttcatcatccgctacttcatcatccgctacatccgtttcttcttcaagttccgttagttcttccaacaagcaatcctcaacttcaaccaaaaaatcagttactccctcgactgcaactgtctccaccatttcttctaccagcgccccaacttccagtagatccacagtcgctccaactacccaacaatcttccgcatctgaagaagaagaaaagggcggtgtagcaacatcaagtaacaatgcatcaaccagttcagctacccaaagatctagtgaacaatcatccgcagttgaaacctctacctccgaaactaggtctattagcactgttcaaaccgctaacggtgctaattttgctcaaagcctaccaagagagggaaaacttttctctctatttgtaacagctttattggctttattctga

SEQ ID NO: 2963 - DNA, 876 bp, Saccharomyces pastorianus
atgatgtgtgataagtcaaagaaaatactggactattcaaccgagttcttagataagtacataccagaatggtttgagacgggaaacaagggtccactatttcttttcgtatcaggtccacaaggttcaggtaaaagttatgcaagtatccaaatctacaatcatttgatggaaaaatatggaggcgagaaatccatcagttttgcctcaattgatgatttttacttgacacacgaggatcaattaaaattgagcaagcaatttaatgaaaacaaactactacaagggcgtgggctgcctggtactcatgatatgaatttgttgcaagaaatattaaatacgattatcaatgatgatcaacatccagaccaaaaaaccgttacattacccaagtatgacaagtctcaatttaacggtgaaggagatcgttgccctgctggtcaagaaattagacttccagtcgatattttcatcttagaaggttggtttctaggtttcaatcctgttctacaaggtattgacaacactgatcttctcactggagacatggttgacgtcaacgccaagctgttcatgtacagtgatttgttgtggcgcaacccagaaatcaaatcgttggggatagtattgactactgataacatcaacaacgtttacggttggagattagagcaagaacatgaactgatatcaaaggttgggaaggggatgaccgacgaacaggtacacgcctttgtagacaggtatatgccttcctataagctttattttgacgagtttgttcgcgaggaaagtctaggctctttagctacattgactttaggtattgattcaaggagagaagtattttctacaaagactagatgcattgagtag

SEQ ID NO: 2964 - DNA, 951 bp, Saccharomyces pastorianus
atgtcaaaagacgactttgaattgtataggtacacaccgaacctaggcgctgccatccttttcacgatactctttgcattagcgggggcattgtttacctacttgctggttcactattctgtcaagagcaagagagcaactgcatcagagatgagatctcagcctacgttacggtgttatggaatggtcaagttggccggtgcttatgttccctttgtagttgggtgtggtatagaatttgcggggttcgcccttagatgcaggtccgctaagcacaccatggagttgaatccatatatcattcaaacggttttcttactggtgtcgccaacgctgtacgctgctactttttatatgatttttggtagaatggccaccttattgttcgcagaaaacttgatgatcatgcccgctaaattcaacactacgatttttgtcatcggtgatgtggggagtcttttgttacaagcggctggtggtgccatgatgtctagtgcatcaaccgctagttctggttctcatatcgttactgctggtttgttcattcaaattgcgttttttggtttgttcattataaatgaattcttattcatttacaaaatttctaagaaaccaaccagtatatcagttagatgcaacacctggaaaagcttaaacatcaccctattggtaaacagttttctgattttaatcagatcaatcgtcagagctgtggaatttattgaaggttacgatggcgtaattgcctcgcatgaatggtttctttatgtttttgacgcattacctatgtttttactcgtaatagcttttgctgcagtcttcccatggaacaatatttttaggatacaggaggagtctattcaagcgcaacaatctacaaaatttgatagtgaggcttatcctaatgtagatggagtttccattgaagatgggtacacttccaaagagtaa

SEQ ID NO: 2965 - DNA, 2685 bp, Saccharomyces pastorianus
atggtacctttcaagttgacgaaaaaagtgtccacggatacggattcctcggtgatttcagcccagagtttgcctagagcgatgcccttcatggacaaccaaaacggtacccgaataataaccccttcagcgcctccaaatcaacaaagaaatatatcagaggcgtcaaccgctttaccttcgccaatggagcgccaagatgcagggaaatacgtctggaacaggatcaaactaaagaactctccgttcccccgttatcgtcattccgcctcacctattgttacaaacgataataggatttttgtgactggtggacttcacgatcacttagtgtatggtgacacttggcagttatctgctaatttggatggcactagctttgtttccaagacaattcagattggtcagaacacgccccctcccagagtgggccatgcttctaccatttgcggcaatgcctttgtagtatttggaggtgatacacacaagctcaatatgaataaattgttggatgatgatctctatcttttcaacattaattcttataagtggacgataccgcagcctgtcggcactagacctttgggtaggtatggccataaaatctctattattgctaacaatccgatgcaaaccaaattgtatctttttggtggacagattgatgaaacttatttcaatgatctagccatgttcgatttgtcatcgtttcgtaggccaaattcccattgggtatttttgaaacctattagtactgtaccccctgctgtgacaaaccatacgatggtaacatttgataacaaattatgggtatttggtggggaaactccaaagacgttaagcaatgaaacattttgttacgatccagtacaaaatgactggtctaaaatccaaacgacgggcgaaacgcctccaccaatacaagagcatgctagtgtggtatataaacatttaatgtgcatatttggcggcaaggacatcgataacgcatattctaatgatgtttatttcttaaatttgataacattcaaatggtacaaacttcctcgtatcaaggagggattacctaaagaacgatctggccattctttaacgttaataaaaaatgacaagcttgttatcatgggtggtgataagttcgattatgctagttcaagtgttcacgatctacatacttcatccactgatcaaggcgaaggaacgttattgtataccctcgatttgtcgcatctaggtgacctttgtccggggataatgggcgaatcgctatacaacgaaggtgacatttcaaattttccttatggaaaatccgcgaactcaaactcagttggaaatgaaaaccaagagatgataaatatcctcacacctaaattacccagtcttaaaactttcagcccaagtgatgtcaccggggccaccggaagtaactttaccgatgcaggggtccaaatgagtaaaacgcgacacgataaagaggaagaaaggtcacagccttgcgaaatcgacgaaactacaaaatctgaattttcacttcctgatgataaatttgcctttattaacaaaagggctgcatataataccgaaaatatcaaaaataatgctcctattctgcaaggtttggcaatagatacaaaagaatacaatcctccttcattcaaagaaacgcaaaacgacaaagtaattctcaggagtatatatgatgaattgtcttcggaaatccaatcattgcaccttgaaacgcaacagaaagaacttgaaactgctaggcatatttccgaattagagaaagaagttcaaagattaatgataataaaagaggcttcgaaagactctaatttccagatggcacgattcaagaatttagaaattcaaaagactttcttggaatctagaattcaagatttgctagagttagtagaaaagaaactttctcaagcacaagaaattaatagtgaaattgcaattcggaatacaaaactggaagcatactttgaagagagcgacactgaaaaggagcttatcgacttggagaggaagtgtgacattctgaagagtcaaaatgaaaaactcaaacgaaacgcagaaaatgggaatgccaaacttcccagtcgcatgacaggtttatccagccgtttgaatcaattattggcgatggggccgatcaacgctgcaacaccttcgaacgaaaaagataaaaaaattgaaggggtcgaaccgttgagaaaaatggacaggataatagatgaaatacacgaaacagctaaaataaaaaacgaattggtgaataaaaaacaaaatttaaccggtgaaaagactgctttacaagctgattttctggctaagaacgataagctggaagcgttaaaaaaaatatttgacggaagttcaaaatcaatgttattgacccagaaggctattgacttgtcacgatcagagcttgaaaaatacaagcaatgcaccgatgatttgcagcaacaaatcgacaaattgaaaaacgaacaaactggacaacaggaacgacatagtactgtcgcctatagcaattcagacacaatccacagaatgaaactcaacaatcttaagactgagctatatatctcgaaagaagatagagacactctcaaagaagaagtattaattttgaagaaaagactctacactcttcaaacacaacaatctcagtaa

SEQ ID NO: 2966 - DNA, 1284 bp, Saccharomyces pastorianus
atgctttcaagaaaatcgttatcgctactttctaagtgtgggcagttgagcaagctgagtgcgcaaaccgcacgccaagcaaagaggtacttgtccattcacgagtacaggtcagctgagttattgagagaatacgggattggcactccagaaggttttccagctttcacccccgaagaggcttttgaagcagctaagaaattgaacaccaaggaactggtcatcaaggcacaggcattaactggtggtagaggtaagggacacttcgacactggttacaagagtggtgtccatatgatcgaaggccctcaacaagcagaagaggttgcaaaggaaatgctgaaccataacttgattaccaaacaaacgggaaaagccgggaaacctgtatctgcggtttatatagtaaaaagagtagacaccaagcacgaagcctatttgtctattttgatggatagacaaactagaaaacctatgatcatcgcatccagtgaaggtggtatgaatattgaagaagtggccgagaaaaacccagatgccattaagaagttttccatcgaaacctcagagggattaagtccagaaatggccaagaatgtggccaagagtcttggtttcacttctggtgcgcaagatgaagcggcaaagaccgtatctaatttgtacaagatattcatggaaagagatgccacacaagtggagattaatcctttgagtgagattgagcatgacccaaaccacaaggtcatgtgcacagacgccaaattcgggttcgatgataacgcctcgttcagacaagagaagatatactcttggagagacctatcacaggaagatcctgacgaagtgaaggcaaagaagtacgatttgaatttcgtaaaattgaagggtaacatcggatgtctagtcaacggtgccggtttggctatggcaactatggatgtcatcaagttgaatggaggagatccagccaactttttggattgtggtggtggcgctacgcccgagaccattaagcaaggtttcgaactgatcttgtctaacaagaacgtcgacgcgattttcgtcaatatctttggtggtattgttagatgcgattacgttgccttggggcttgtggaagctgccagggaactggaagtcagagttccaattgttgctcgtttacaaggtaccaaagtagaggaaggttgcgagatcatcaagaagcctggtgtgaaaatttactcatttgatgaactggaccctgccgctaaaaaggttgtcgaattgacacagggctga

SEQ ID NO: 2967 - DNA, 606 bp, Saccharomyces pastorianus
atgagcagggccaaagatattcaagagaggctcaatttgcaagccaaacttcaatcaactttcagtaacaatacagctacggtcttagactggttaaaagagtcagaggaatgcgacagagggaaagttcacactgatccagaacatggtaaactgttagaggactacaaggagttggaggatagcaagaaggccttttttcaactccctgttgttcaaattggatctggtttacattttaagacggaagacgacctatctgccaaagaagatatacatacgattggggagttcattgagagtgacaagaaggttagttcgttggcgaagaaaaagaaaagaaacgatcagggattacaacgaaacgacatgtacaggataactaaagacgatactaaagctatggttgcattaaaaagaaaaatgaggaaaggtgaaaaagaaggattaagaaagaaacaagaggtgccggtaaagagtactcccaacttccacggctctagtgacgaagatgatatagatgtggaaagggtgccgcagaagtctacgaaaaaaacatttggtttactctttgataagaaaaagaaaaatcgtaaacgattttaa

SEQ ID NO: 2968 - DNA, 2103 bp, Saccharomyces pastorianus
atgagtactacgaactggtttgacgcttgggacgcagaggcgctttacaaagatgacgttgctggctgcgatgattgtgcaaagacgtccccgttaccagagtctggtgttatttgcgggcctgtgttgagactcatcaacatggatttcaaggaaaagcattatgaggggtccattatgatggtcgtcagaggtgaagaaaaaattccgaaaattgcttaccaactgggaccctctttgccctctgaaggtgaagaaactgaaattagcgaagcctacttcgacaatcagcttttccataaagatcagctaaaaggagatgatatctggttttacagatacgaaatccaattaccaatggctaaatacgaacaaatggtgaaatactccattgatggtacgacagagccgcactataggttcttcatcccgtctttcactcagaactcaaacgttatttcatactcgtgtaacgggttctccttaagcgtagacacgtcgaaattcaagggctctctgtggtatgatgttcttaggaagcatcagtacgtccattaccatgctattcttggtggtggtgaccagatttattcggataatattaaattgcacgctcctaatttcaaagcgtggttggagacaaaagaccctatcaagaagtacaatactaagacgactgaggagaccagggaccagattagacagttttatttggaacactacttaaattggtacggctatggtcattggtatggttccacacctacgtccaaaaccacccaaaagtgttttgtgaaatcgttggcgtgtattccagccatcaatgtttgggatgaccacgatatcatcgatggatatggttcctacaacgatgcatttatgagaactgagaactttgtgaccgttggaagaatggcttatagatattatatgctctttcaacatcacgtcagcgcctctaaggaagatggtgacgattttgcttatttacaaagcaaacagtggattttgggtaatgaagaggggagtccatacattggcgaaaggtctcactcgatattctcttggttgggccccaaaatgggcatgttgggtttggattgtagaactgagagaaaactacgccaagtattctcagaaagaagctactctttgatctgggaacgtgtagaaagcgaattgaaagctttgaaagggggacacttgttggtgatgttaggtatccccattgcgtatccaagattagtttggttagagtggctattcacctcaaagttattggctccagtcaaatatctctccaagaaaggtataattcccagtggcttggttaatgaattcaacggagacgttgaattactggacgatttaaatgaccattggtgtgcaagacaccacaagaaagaaaggaattatttggtaatgaaactgcaagacattggcgccaaatacggtgtcagaatcactatcttatcaggtgatgttcatttagcatctattgggaggtttagagcaaagacacatagacatcatctcattatgtccgaaaagaaggaaaaggaaaacgccgaaattatcgaagaaccaaccaaagatgaaaggttaatgtttaacatcattgccagtgctatcgtaaatacaccaccgcctgatgcaatggccaccttactacaaaaaagatgccatttgcaccattttgatacggaaactgatgaagatgcggtaccaatctttgccaaggaagtggatggggcacgtgaccgtaacgattcatgttttatgaataagagaaattggtcagatattatacccgtggaaaacgtattgaacaaccctcgattgagcaaagagttgaatgtaaaagttggagatatcgtcattccgggcgtcatcacagaaaaacaaaagttggcaccctcaaagagtgaccagttcaactcttatccggtgacttccgccggtctgtttgccactgttcgtgtggaaaaagacgtgagtcaagcggattcacaaactgtgagttatggtcttcctattccggaattagagattactcgcgaaaagttgtctcatgcaggtattaaacatctgaatgtgatgtaa

SEQ ID NO: 2969 - DNA, 5901 bp, Saccharomyces pastorianus
atgacaactgtatactctgctgattcaactaaatcattcatggttgctatgcaatctatggttgatgcatcacaaacctttaatttagataaatcgaaaattcaattgccagattttgataatgagttgaagagaagtagagaagatgaacgaaataagaagactgaactaaccgtactttctcaagatagaaacgactgggatgatattttcgatgagtttcaagacatttcatttcaacaattgcagtctaaaattgattcatacaaaaaagataattcagtggcaatctataaagaaattgccaagttaattaaaaaggccgcaacatcgataagcagcaatgtcctactagaatctgttcttcaaatggtttataaccacgaaaagcagaagttagagaaagaactgctggatttcttaggaacagaaaacatagagcttgtttctttgctgctgcagcatagaaggatgatcattgcgatgccaatagaaaccataatcgtattgattgaaaatgctgcgaaatcaacatcagaatttttgactcaacaagatatccggaaccaagtgttacaaaatgcggagaatgccaagaatcaaaaactaaatcccgctgatagaataatcaagtatccacatgtcttcagaaaatatgaagtggggtcaacttctgctatggcctttgctggacaaaaattcactcttccagtaggcactacaaggttatcttatcagactcatgaagaaataatgattcctgccgcagaccaggcgtctaataaaaactacctgtatacaaagctattgaaaatagaggacttggatcatttttgtaagactgtattttcttatgagactctaaaccaaatacaatcgctagtataccctgtagcttatacaacgaatgaaaatatgttgatttgtgcgcctacaggtgcaggtaaaacagacgttgcactacttacgatattaaacacggtaaaacagttctccgtgatcaacgaggaaaacgaaattgatatacaatacgatagtttcaaggttgtctacgtagcccctttgaaagcactggctgctgaaattgtcgacaaattcagtaaaaaattagcgcctttcgatattcaagtaagggaattaactggtgatatgcaattaacaaaatcagaaattttggccactcaggtaattgttacgacccctgaaaaatgggatgtcgttactcgtaaggcgaatggtgacaacgatttagtctcaaaagtcaagctgttaatcatcgatgaagtacacttattgcatgaagatagaggttcagttatcgaaaccctagtggcgcgtaccttgagacaagttgaaagttctcaatctatgattcgtattgtcggtttatctgctacattaccgaactttatggatgtggcggatttcttgggtgtgaatagacaggttggtatgttttactttgaccagtctttccgtccaaagcctctggaacaacaacttttaggttgtaggggtaaagctggtagcaggcagagtaaagaaaatattgataaagttgcgtatgataaactaagcgaaatgattcaaagagggtaccaagtaatggtattcgtgcatgcaagaaaagaaactgttaaaagtgcaaggagctttattaaattagcacaagccgatcatgagattgatttttttgcacccgaccctgtaacgaaagacaactattccaggcagctggcaaagaacagagataaggatatgaaggaaatcttccaatttggctttggtgttcaccatgctggtatggcacgttcggataggaatttaaccgaaaaaatgttcaaagccggtgctattaaagtgctgtgttgtactgcaacattagcttggggtgttaatttacctgctgactgtgtcattattaaaggtacacaggtgtatgatgctaagaaaggtggtttcattgatctaggtatttctgatgttattcaaattttcggtagaggtggtagacctggtttcggttccgctcatggtacaggtattctgtgcacgtctggcgatcgtttggaccattacgtttctttaattacccaacaacatccaattgaatccaggtttggttctaaactggttgacaatctgaatgcggaaatttcattaggaagtgtaactaatgtagatgaagccattgaatggcttggttatacatacatgttcgtccgtatgagaaaaaacccatttacttatggcattgattgggaagaagttgcaaatgacccacaactatatgaaaggagacgaaaaatgattattgtagctgcaagacgactgcacgctcttcaaatgattgtttttgacgagatatcaatgcattttatttcgaaagatttgggcagggtatcttcagatttctatctcttgaacgaatctgttgaaatctttaatcagatgtgtgatccaagagctactgaagctgatgtgttgtctatgatcagtatgagtagtgaatttgacggtataaaatttagagaggaagaatccaaggaattgacgagactttcggaagaatcagttgagtgccaaattgggggtcagttagatacgcctcaaggtaaaacgaatgtgttactgcaggcatatatttctcaaagtagaatttttgactcagcgctatcgtcggattcgaattacgttgctcaaaactctgtaaggatttgtagagctttattcttaataggtgttaacagaagatggggtaaattctcaaatgttttgctgaatatttgcaagtctatcgagaagaggctttgggcttttgaccatcctctatgtcaattcgatttgcccgaaaacattattagacgtatcagagatagcaatccctccatggaacatctcctagaactagagtcagaagagcttggagagttggtgcataatagcaaggccggatctaaactttatagaatattaagtcgattcccaaaaattaatattgaagcagagattttccctattactacaaacgtaatgaggatacatgttactttggatccagacttcatatgggattcaagagttcatggtgatgcgcagttcttttgggttttcgtagaagaatctgataagtcacaaattcttcatttcgagaaatttatcttgaatagaaggcaattaaacaaccagcatgaaatggattttctgattccattatctgatcctttaccacctcaggttgttgttaagattgtgtcagatacttggatcggctgtgagtcgactcatgctatttccttccagcatttaattagacccttcaatgaaactctccaaaccaagttgttgaaattacgtcccttgcctacttcggcgctccaaaatccattggttgagtcaatctatccttttaagtacttcaatcccatgcaaacaatgacattctatacactctacaataccaacgaaaacgcgttcattggttcgcctacaggttccggtaaaacgattgtggctgagttagctatatggcatgccttcaaaacatttcctgggaaaaaaattgtttatatagcgccaatgaaagctttggttcgtgagagagttgatgattggagaaaaaaaatcacaccagtgacaggagacaaagttgttgaattaaccggtgattctctacctgacccaaaagatgttcatgatgcaacaattgtgattacaacaccagaaaaatttgacggtatttctcgtaattggcaaacccgtaaattcgttcaagatgtatccttaattattatggatgaaatccatttgttggcaagtgatcgtggtcccattttagaaatgattgttagccgtatgaactatatttcctctcagactaagcaacccgttagactgttgggtatgtctacagccgtttcgaatgcatatgatatggcaggttggttgggggttaaagaccacggattgtacaatttcccatccagtgtccgtccagttccgttgaaaatgtacattgacggttttcctgataacttggcgttttgtcctttaatgaaaacaatgaataaaccagctttcatggctatcaaacaacactctccggataagcctgcattgatcttcgttgcatctcgtagacaaactagactgactgctttagatttaattcatttgtgtgggatggaagataatccacgtaggttcctaaatatcgatgacgatgaagagctacaatattatttgtctcaggttaccgacgatactctcaagctatcattgcaatttggtattggattacatcatgctgggttggtacagaaagatcgttctatttctcatcaattatttcagagaaataagattcaaattctaatcgccacttcaactttggcctggggtgttaatttacctgctcatctggtcatcatcaaaggtacccaattttttgacgcaaagatagagggctacagagatatggatttgacggatattttacaaatgatgggaagagctggtagaccagcctatgatactacaggtactgctataatttatacaaaggaatccaagaaaatgttttataaacacttcttgaacgttggtttccctgtagaatcttctttacacaaggtgttggatgatcatttaggtgcagaaataacatccggtagtataaccaacaagcaagaagctcttgattttttgagttggacatttttattccgaagagcacatcataatccaacgtactacggcattgaagaggatacaagtaccgcaggtgttagcgagcatctgagcttactgatagacaccacattagaaaatttagaaaagtcgcaatgtgttttattacacggagatgacattgttgccacgccgttcttaagtatatcgtcatactactatatttcacacttaacaatacgccagctattgaaccaagtgcatgagcatgcgacttttcaagaagtattaaggtggttgtcattggccgttgaatataatgagctacctgtgagaggtggtgaaattatcatgaatgtggaaatgtcacagcaatctagatattctgtcgagagtactttcaccggtgaattcgaattgccaatgtgggatcctcatgtcaaaacatttttactattacaagctcacttgagtcgtgtagacttacccattgcagattatatccaagatactgtatcagttttagatcaatctttgcgtatcttacaagcttatattgatgttgctagtgaacttggttatttccgtactgtattgaccatgataaagatgatgcaatgtattaaacaagggtattggtatgaagatgatcctgtaagtgtattacctggtctacaactgaaaagaattaaagattgcaagttcagtgagcagggattcatggaaacactaacccaaaataagaagagtttgctgactttggaggaaataggacgacttggttataagagactgatgggtgtttttaatcagttaacctcagggataatagatgacgaagatgtaaagaaaaaatttgtcaacgtttgccaaagattgccagtattagacagtataaaatttaacgagcaagagaataatgaagtcctaagtttttattgtaagcatttttctaacaaacataataacggttttgaagtatactgtgataaattccctaaaatacagaaggaattatggtttttgattggctacaaaggtgatgaattgttaatgattaaaagatgtcaaccaaagcaaatgaataaggaggttatcatacattgtgatttggtcattcctgaagaaattcgtggagaagaattggactttgttttgataaatgacgcgctaggattacgttatgatttaagccataaattaatgccctaa

SEQ ID NO: 2970 - DNA, 1302 bp, Saccharomyces pastorianus
atgttttctttacctaccctaacctcagacatcactgttgaagtcaacagttccgctaccaaaaccccattcgtccgtcgtccggtagaaccggttggtaagttctttttgcaacatgctcaaagaactttgagaaaccacacctggtctgaatttgaaagaattgaagctgaaaagaacgtcaaaaccgttgatgaatccaatgtcgacccagacgagttgttattcgacactgaattggccgatgaagatttactgactcatgatgctagagactggaaaaccgccgatttgtatgctgctatgggtttgtctaagttgcgtttcagagccacccaaaaccaaatcatcaaggctcatagaaagcaagttgtcaaataccatccagacaaacaatctgccgctggtggtagtttggaccaagatggtttcttcaaaattattcaaaaggcttttgaaaccttaaccgattccaacaaaaaagctcaatacgactcatgtgattttgttgccgatgtcgctcctccaaagaagggtactaattacgacttctacgaagcttggggacctgttttcgatgctgaagcacgtttctccaagaagactcctattccaactttaggtgacaaggactcttccaagaaggatgttgaacaattttatgccttctggcatagattcgattcctggagaacctttgaattcttggacgaagatgttccagatgattcttccaacagagaccacaaacgttacattgaaagaaagaacaaagctgccagagacaagaagaagaccgctgacaatgctagattagtcaagcttgtcgaaagggctgtcagtgaagatcctcgtatcaagctgttcaaagaagaagaaaagaaggaaaaggaaagaaagaaatgggaaagagatgccggtgccagagccgaagccgaagctaaggctaaggccgaagccgaagccaagatcaaggctgaatctgaagccaaagctagcgcttctgctaaggttgacaagaagaaagccaaggaggctgccaaggccgccaagaagaagaataagagagctgtccgtaactccgccaaggaagccgactactttggtgatgctgacaaggccactgccattgacgaacaagttggcttaattgttgacagtttgaacgacgaagagttgatctctgttgccgacaagatcaaggccaatggtgccggtgcaaaggaagtcttgcaagaatccgccaaggccatcattgaatccggcaaactgccttccagtttgttgtcttactttgcctaa

SEQ ID NO: 2971 - DNA, 1194 bp, Saccharomyces pastorianus
atggctttgcaacggttgaggaaaaaacatagaacaagacaagaattgctcaaagctcttactccccgaacacggtccatccatttgagcccaaatgaacactcaaatggtagtgctggttcaaatgcggaggttttgtctcatattaaacagatattgtcgttggcggctaattccttagagcaacaccaacagcctatttcaataatttttgataacaaaacaaaaggcaactccggtggcaacaaagtttccacgacactggacttccccttgactggcccgcacctgtttactcaccagttcaaattgaaaagatgctccatccttctaaacctattaaagatcgttatggaaaaattgcctctaggccaaaacactacgataagggacattttctactccaatgtagagctgttccagagacaagcaaatgtagtacagtggctggacgtcataaggtttaactttaaactttccccacgaaaatcgctaaatatcatacccgctcagaagggtctgatctattcgccgttcccaatatatgtttacgatagcatcacaaaatgtgaggatgagttccaagtcgagaaacagaccgtttctcccggcaagccctgcttgattccattttttcaagatgaagcagtcattagactagagacaacgagccattgcaatatcgtaattgtggaaaaggaggctgtgttcaccaaactggtaagcaattataacaagttgaacgcaaacactgtattgattaccggtaaggggttccctgatttcttgacaaggctgtttctgaaaaaacttgaacaggattgctccaatttgatctcgaactgttctatattcaccgatgctgatccttatgggattagcattgctctaaattacatcaactccaatgcaaacgcctcatataattgtccgatggttaattacaaaggtgtttacattacacagatcttggcacaaaataacaggacggggagcaaattcgtccaactattaagcctaaatcagcgcgattattcgttagccaagaatttggtagtttcactgactaacaacggagagggcattatatcatcgccatttaaaaacttcatcatagagtgccaacgggaaatttttttccaaaagaaagctgaaatgaacgaaattgatgtcagtatgtttcgattgcagtag

SEQ ID NO: 2972 - DNA, 363 bp, Saccharomyces pastorianus
atgcataataagatcattagggttgcatccagtgcgctgacaggaggcaagctactcgagaaactaaaaaccttgacccactgggaagcacagtgggatcctcacaggactaagtgtctagggataacaagagaagtgactttcaaggactacgagaccacctgggcattcctgacccgcgtgtccatgagatctcatctttggggccatcatcccctgatccacaccagctacacctgggtaaagcttgagcttcgtacgcatgacgcagatccgctggacccagacggggctcaactcagcgatatagacgcccgaatggccaggagaatagactcctatatcgacgaaatgatccgctga

SEQ ID NO: 2973 - DNA, 1215 bp, Saccharomyces pastorianus
atgaacatcggtggaggaagattcttacttggaagggtgtcgaataatccaacttctgggatagttggccttgcaaacgttggtaaatccacatttttccaagcaataacaaactcgaaattgggtaatccagctaattatccattcgccactattgacccagaatgtgcaaaagttaacatacctagcacgccattatctgatttattgagaatatatcagagtgcaaaaatcgtgcccggaactttgacgatatatgacattgccggactcactagaggagcctcccaaggccatggtttgggaaacaagtttttaaatgatattagacatgtagatgggatatttcaagtggtaagagggtttttaaaggaagatattacacatatagaaggcaatgtagacccggtcagagatttatcagttgtacaagatgagctgatcttgaaagatttggaatttttggaaaatatcagggaaaggctcagtaagaagatgcgaatggtttcaaagaattctaaagaataccaagaaatgaaagtggagacggaattattggatgcattagaagagcatttatttaatggtaagaaaatccgacattttaaggaccattggaacctggacgaggtcaaaattctaaataaacataattttctaacgtccaaaccaacgttgattttgttaaacgtatcacctcaagattatcttaagaaagaaaataaatttgtcaaagatattttgaaatgggttaacgaattttcgcctggtgacaaactggttcttttcagtgcagaatttgaatcgcaattaattgaatgtaaagacacgctatcagaatactttgacaaaatcaggcaagatacgagcatctctgatgaacaactagtgtctgcaataccacgaataattctagaaatgagaaatttgttgaatttgattagttttttcacatgtggcccacaagaagttcatcaatggaacattagagaggggaccacggctcaggaggcagcaggcgttatccacagtgatttgcgtgatacgtttatcaatgctgatgtgataaaatatgatgatttgaagacgatggagccatcattaaacgaatctttactgaaatcgaaaggcttggtcaaacgtgcggggaagcaatatatcatgcaggataacgatgttgccttcttcaaagccgccggtggtaaggcgagatag

SEQ ID NO: 2974 - DNA, 1185 bp, Saccharomyces pastorianus
atgcagagacacatttgtgcgaggaacctaagacgtctctcctccttgaggagcccttgcctatctaggagattccagtcttcatcatccgttccggtcaacaattccaacaacgatgaggttctgcttttgcagcagaaacaaatgtacgacgaaatccgtgcagagttaaagtccctttcggaaattcctgaagatgaaatgctacctgaactgaaaaagtcattaggggaaggcgaactatccgccaaggaacaactattggaaaatgagctgaacgagttcttcaagagttatgctcagtcgaacaagctgtttgaaaacgccacatctgctggacaatcttcggcagcagttgcagcagtcaataccacaagcaagccttaccctaatcttataccttccaccaacgacaaaccgtatacttctcaggaacttttcttgcgtcaattcaggcactctatgcataccgctaaattaggctccaccatatcgaaggtgtacttcccccacaaagacattttctacccacctcttcctgaagccattaccgtcgagaacttgttatctgctggtgtccacttgggccagtccacctcgctttggaggtcttccacgcaatcttacgtatacggcgaatataagggcgtccatataatagatctgaaccaaacactgtcttgtttgaaaagagccgccaaggttgtggagggcgtttcggaatctggcgggatcatcttgttcctgggaacaaggaagggacagaaaagaggcttggaggaagccgccaagaaaacccatggctattatgtctccacaagatggatcccgggcactttgactaactctacagaaatttcgggtatttgggaaaagcaggaaatcgactctcatgacacacccacaaaaagagaactatctccaaacgaaacatcgaaacaggtcaagcccgacttgctagtcgtgctcaaccctacagaaaacagaaacgctctgctggaggccatcaaatcaagagttcccaccgttgcaatcatcgatacggactccgaaccctccctggtcacttatcctatcccaggtaatgatgactctttgaggtccgtcaaccttttactaggtgttctggctagagctggccagagaggcttacaaaaccggttggcacaaaataacaagaattag

SEQ ID NO: 2975 - DNA, 1311 bp, Saccharomyces pastorianus
atggctctcggtaaactaaagaatatgtctcccttaataaacagctcccatagctctattaatggtacctccaatggtgcgaatgcgaaaccaaatggggcagatacagacgatattgatgagaatgatgaatccggtcagagcattctatttaatattatttcgcaactaaagcccgggtgtgatttatcaagaattactctaccgacctttatcctggaaaagaaatcaatgttggagaggatcaccaatcaattacagtttccagatgttcttttggaagcccattccaacggaaatgagctgcaaagatttgtcaaggtggtcgcatggtatttggctggatggcacattggtcccagagctgtaaagaagccattgaatccgattcttggagaacacttcacggcttattgggatctggctaataagcaacaggcattttatattgcagaacaaacaagtcaccatcctcctgaatcagcatacttttacatgatcccagaatcgaacattcgcgttgatggggttgtgataccaaaatcaagatttttaggaaactcaagtgccgcaatgatggaaggtctaactgtgttacggttccttgatatcatggattctaacggtaaaccagagaagtataccctgtcccaaccaaatgtctatgcaaggggtattttatttggtaaaatgaggattgaacttggggatcatatggttattacaggtcctaattaccaagttgacattgaatttaaaacaaagggttttatttccggtacttatgacgcgatcgaaggtacaattaaggattacaatggcaaggaatattatcaaataagtggcaaatggaatgatgttatctacatcaaagacctaagagaaaaaagttcaaaaaagactgtgctttttgacactcaccaacattctcctcagggtccaaaagtacgtccgttggaggaacagggtgaatatgaatctagacgactatggaagaaagttactgatgcgctagccgttcgtaatcatgaggtagccactgaggaaaagtttcagattgaaaatcaccaaagagggctggctaagaaaagaactgaggacggtgtagagttccatccgaaactctttagaagagcagaaccaggtgaagatttggattactacatttacaaacacattcctgagggaatggataagcacgaagaacaaattagaagtattcttgaaattgcccccattttaccaggacaagcattcacggaaaaattctctattccagcttacaaaaagcatgaaattcaaaatgaatga

SEQ ID NO: 2976 - DNA, 1392 bp, Saccharomyces pastorianus
atgtctgacggtactcaaaaactatggggtgggagattcactggcgaaaccgatcctttgatgcacctgtacaatgcatctcttccatatgattacaagatgtacaaggccgacctggaaggtaccaaggtatacactgcgggtttgcagaaacttggccttttaacggagacagagctggccaagatccatgaagggttggctgaaatcaagaaagaatgggaagctgacaaattcgtccgtcatgcaaacgatgaagacatccatactgctaacgaaagacgccttggtgaactcattggccgtgacattgctggtaaagttcataccggtaggtcgcgtaacgaccaagtcgttactgatttgagaatctactgccgtgacgtggtcaacgacagtctcttcccagccatgaagggcttggtcgatgttctggtcaagagagcagagggagaaatggatatcctgatgccaggctacacacatttacaaagagctcaacctattagatggtctcactggttgagttcttatgctacctactttacagaagattacaaaagactggttcaaatattacatagattaaaccaatcgccattgggtgcaggcgctcttgctggccatccttacggtatcgacagagaatttttggctgaaggattaggtttcaatagtgtcattggtaattcattggttgcggtttctgacagagatttcatcgtggaattgatgttttggggaaccctgttcatgaaccatatttcccgttttgctgaagatttgattatatactgcacggctgaattcggtttcatacaattaagcgatgcttactcaacaggttcctccttgatgccccaaaagaaaaacgccgactccttagaattattgagaggtaagtccgggagagtctttggtgacctaacagggttcttaatgagtttgaagggtatcccatctacttacgataaagatatgcaagaagacaaggaacctctgtttgattgtttgaccactgtagaacattccatgttgattgctacaggtgttatttctacattgaccgtcaacaaggataagatggaagccgccctaacaatggatatgttggctactgacttggctgattacttggtcagaaaaggtgttccattcagagagacccatcacatctctggtgaatgtgttgctgccgctgaaagattgggtctgagtggtattgacaaattgactttagaacaatacaaaaagatcgatccaagatttgctgaagatcttttcgaaactttcaacttcgaacaaagtgttgaaaggagagatgctactggtggcacagctaaattggctattcttaaacagttgaacaacttgaagtcccaattacaataa

SEQ ID NO: 2977 - DNA, 642 bp, Saccharomyces pastorianus
atgagcaaggaatctaaggatgatgacatgtcattggggaagttttccttctcccacttcctatactacttggtgctaataatagtaatagtgtacgctttgtacaagcttttcactggacacggatccgacatcaatttcgggaagttcttattgaggacatccccttatatgtgggctaatcttggtattgccctttgtgtaggcctaagtgtcgttggtgcagcatgggggatcttcatcactggttcctccatgattggggccggtgttcgtgctccaagaatcaccacgaagaatttgatttccattattttctgtgaagtggttgcaatttatgggctgattattgctattgtcttttcttcgaaattgaccgtggctaccgcggaaaccatgtactcgaaatcgaacttgtacactggttactcccttttctgggcaggtatcactgtcggtgcttctaatttaatttgtggtatcgctgttggtatcactggtgccactgctgccatttctgatgctgctgattctgcattgtttgtcaagatcttagtcattgaaattttcgggtccattctaggtttattaggtttgattgttggtttattgatggctggtaaagcttccgaatttcattaa

SEQ ID NO: 2978 - DNA, 1119 bp, Saccharomyces pastorianus
atggtgttgtgtggcgtgtgtggtattaatgagttcaagtacaagtgtcctcggtgtttggcgcaaacctgttccctggagtgttccaagcagcataaggcgagggacgattgttctgggcaaacacacgatccaaaggattacatatcaagtgagactttaaaacacgcagacgatgagaaacgcgaacggaacgtttacgtgcagagagactataactatctgacgcagttgaagcggatggtgcagatacaaaagatggacgctagggtgaagaacaagagagtgctagggcccgcgagccatagtgccggtttgaaaaggaggagatacggcacggatgaggatgaccacggtgacatggagtgccagaggataatcaggagaggagtgaactgtctgatgttgcccaaagggatgcagcggtcgtcgcaaaacagaagcaagtgggacaagacaatggacctgttcgtatggagcatagagtggactttgtgtcccatgcaagcgcaggaggaagacaagcgggttttcaagcatatcagccatcggattaaagagacggattttttggtccagggcatgggcaagaacgttttccaaaaatgctgtgaattctaccactttgctggaataagcgaccacgaagagggcgaagatgcctcagagaccaaggaggaacgaacagagatcctgcaaaagagtgggctcaaattctacacgaaatggttcccttacaacactacgcatataacagattccaagaagctggtagaattgccgatccacgagaaatgcattggagagctattcagaaacatgacggtgatcgagttccccacgatattcattgccatggccgaagacgacttgccagagggctacgaggtagtgcacgaggaaacgcacagggcggaaaacgacaagcatacgaacccattaaacaagttcatcgacgatgtgaaggaaccagaggacactgcaaaggacgcccagccggcagaggaacccgtgcaaaaggaaggtctagacgacgccaagggcgagcgtgacagtgatagcgacagcgacagcgacgattacaatcctggcttatctatggatttcctcactgcataa

SEQ ID NO: 2979 - DNA, 741 bp, Saccharomyces pastorianus
atgccacaattcttagtagatctatgcctttttgatttagatgggactattgttagtacaacaatcgcagcagaaaagtcctggaccaagttatgtcatcagtatggggttgatcctgctgatttattcaagcattcccatggtgcaaggacgcaagatatcatgaagcaattttttcccaaactagataatacaaacaataaaggtgttattgccctagagatggatatggctggtagttatttggacaccgtgagtcttattcctggtgccgaaaatctgctgctgtctttagatgtagatacagccaataaaacgaaaacgccttcgagaaaatgggctatcgttacttctggttctccgaatctggcatattcatggtttaagacaatattgaaaaaagttgggaaacccgaggttttcattaccgggtttgacgtgaagaaaggtaagcctgaccctgaaggttatgccactgcccgcgatctgttgtgccaagatttgcaattggttggtaaaaaggacttgaaatacgtcgtctttgaagacgcacctgtaggcattaaagccggcaaggcgatgggcgccatcacggtgggaataacatcatcgtatgacaagagtgttttgttcgattcaggtgcggattacgtagtttccgatttgactcaggtttccgtggtcaagaacgatgcagacggtattgtcattcaagtaaacaacccgttgaccagggattga

SEQ ID NO: 2980 - DNA, 183 bp, Saccharomyces pastorianus
atgttcagcgaactaatcaatttccaaaacgaaggccaccaatgtcaatgcaaatgtggtagttgcaaaaccaatgaacagtgtcaaaaatcgtgcaactgtccaactggctgtgacagtgatgacaaatgcccctgtggcaacaagtctgaaaaaaccaagaagccatgctgctcggcttaa

SEQ ID NO: 2981 - DNA, 951 bp, Saccharomyces pastorianus
atgattgaagagaaaaatcaccaacaaatggagctgcctcaaatgagatccatctggatagacgaggaccaagaaatggagaaactgtatgggttccaagtgagacaacggttcatgaatgggcccagtacggattccgaagaggacaccgatgaagacttggggattgttctcgtcgatagtgaaaagctggccctgccaaacaagaacaacatcaaattgccccccctgcccaattacatgacgatcaactctaacataaattctaatcacaagtttttgaccaacaaaaagagaaatttcctgggaatgttcaagagaaaggacttgctgtcaataaaaccgcatgggcccaccaaaactacgaaacaatccagtatatctgccccatttggctttcatcatatctcgcacgctaatggtaaaaaggaggacaacaactatgaatcgcaggacgaaagagaggaacaggacgatggcgtagagcctttgttcaatttcacgtcgttggcaccacaacctcgaccagaatcaaacgtctcttctagatattccaacgttgtgatgaacgattcgagcaggatagtctcttcttccacaatagctactacaatggattcgcaccacgatagtaacaaaaccagcagtacccctaataagactaagcaaatggactggcctacggaaatagagatgacattggaagacctgaaaaactattcgttcccctcggttcttggggacaccgccggtgacgacactaataagccttcaccctgtgcttcgtcactttatagcaaattcaaaccaagagactcgaatgcgatacatacccctgagttgaaaaactatctcaacatcgacgaatcgctgaattcacctggtaataggatatctgtggatgatgtgttaaaattttattaccagtgtagtgaaacaagtacaccttaa

SEQ ID NO: 2982 - DNA, 693 bp, Saccharomyces pastorianus
atgtatgaaaatcatagattcactccggattctaaagagtttggtgttgttgttaaaggtaagaatctctccactagcagtaacccctaccagacccctcccactgagacaaacagcactcttcctcctcctcaactcagttccattaagaggaagacaaatttagcaattattatatcaaattttgcatccgaaattagtcggcctctctcaaacaacaaaatcgacaactcccctcaaaacattctaaaattcttaaatgaagtctttaaaagatcaaagtgtagcaaggaaaacgccgtcctggccaccttttatttccagaagatctaccaatccaacataggagacgagccctcgctgcctgaattctcgcgctgctccaagaggatattcctctcttgtcttattctgtcccacaagtttctgaacgacaacacctactcgatgaagaactggcagattataagcgggctgcacgccaaggatctctccctcatggaaagatggtgccttgggaaactggattaccagctagccgttccatacagcgatctcttgctgtgggaaacaaacactttgatgaagaaatcacaccatatcgcaacccccatcatcactttgccaaagagagccagagattatgatcaagattgtaatgctcactctagaaaactactaaaatctcactaa

SEQ ID NO: 2983 - DNA, 1203 bp, Saccharomyces pastorianus
atggctgacagtttaagaagaaaaattgccttgtcccaactcgaaagagccaaatatgtgctagatgccacctttcaagaggcagatgaagatgatgaagatagttgtgatgtattaggagcccttccattattaaaagaccggctggatacgaataggagccctggaagtaataacgataaaatagccaatagtattttgagcgaggataggggcaatttgcccacctggaaggatttctttgataataaggagctggtaaatcttcacaataggagcctcgaggtaaatacttattatacattgccttcttcatcgctatcgaatacctcttcaattcctatctttatttttcatcacggggcagggtcctcaggtttatcatttgcaaacttagctaaacagttgactactaaacttgacggcaaatgcggatgctttgcatttgacgctagagggcattcacaaactaggcctttagatgccgataagcctatgagctttgatagagattcttttattgatgattttgttagcttattagattattggtatgaatctaaaattagtcaagagccgcttcaaaaggtatccattattttaatcggccattctcttggtggaagtatatgtactttcgcataccctaaattgtcagcagaattgcaaaaaaaagttcttggtattactatgttagatattgtagaagaggcagctattttggccttaagtaaagttcaacattttttgcagaatacgcctaatgtgttcgaatcaattaacgacgctgtcgagtggcatattcaacgtgcactgtcgaaatttaagccgagtgcggaaatcgctatcccagctttatttactccagttaaatcagggaaagtcgtgcgaatcacgaatttagaaacctttagtcccttttggaacacctggtttacagatttatcacactcttttgtggatctaccagtaagcaaactgttgatattggcaggaaatgaaaacctagataaagaattgattgtgggacaaatgcaaggtaagtaccaactggtagtttttcaagattctggtcattttattcaagaagattcccccatgaagacggcagtcactttgattgatttttggaaaagaaacgattctaagaacaccgttattaaaaccaactggggacaacatcaatcagggaagaatatatag

SEQ ID NO: 2984 - DNA, 1758 bp, Saccharomyces pastorianus
atggaggaagtttttcgcttttatttgcattccaaaactattctgtttcataaaggcctttcattgaaacagtccactgtagatgaccccaaaagtggatacggtcttttcgtcagcccttcgaagttcagtaacgaagaacttgacaatgagactgttcaattgctaagaattcctaaacgctgcacatttaatatcaacacactactgactattctaggagatgagaacgaattttcttcactagaacaattccaaagaactggtgacaaaatcaagactactcttcgtgaaataatgacgtatcccaagtttagtaggtttctaacagaaacaaacctgctcattctttactttatgattttcgagactattcatgacagttacgagattcccggtagtatcgagtattatttgaagaatgttttgatgagcattgaagtagaatctgctgtcgattctatcgaaaacctagccaaggattatggccattacccacaaatttttgggctccaagaaatatcaggtttattcaaagatctgttccaagaatatttagacgcaagcgttattaagcacctttattcagcgataatttcacgttgcctcgaaatacctgaaaaatcggataccggagattacgaattcagtgttcactctaccttagttcccattctggattttgccaatcacgaaaactcacaaaagaatgcttattttgatgtcgacccttctagtaacgatgtgttacttctactcaatacggatacgattcggggaaagagttcgaagcctagagaagtgttcattagctacatgcctacagaagatttattgccaatgctaaacacatatggattcatcccagatttcaaagaatctccacagttttggaccatatcgtttgatagagggtttttgagagactacattgggttagatttgaatgcagatttgaggttattttataaatggctccgtataaatccagtcatctcattagtaaaatacgaacatgatgaccaaatccgatggtttattaacgatactacaaaagagttgagttcgcttttgctcccattcatcccacctttggataaagcaaaaaatgcacgttgggtgtatgattctgcctgtcatttgacgttcactaagatgcattgcttagttaatcctgagacgaatgaacatgcaacgttggttgcagaaaactaccattctctcatcgaagaagtagaactgaatggagatgattttattgatttaccgccgctagcatggtcgttgcactataaagatgcagaaagcggttgcctaagacaaagacatacggattgtgaagaggcaactagtatccttcaacatgaacaagaacaagacacaaccaaaaccaagctccggtttgttagcttcttccgggactttttaaagtataggaaagcgagaattgccatgccttccagtaattcaagtattgctcgcttattatttgagcaggagaaagagataattaatgacctagcagcagctattgataacaaatccacaatattttttagcgatctaaagacggcactgagcgcagaacctaataagttcccccctctgagatttcacaatgagcacacggagagcaacaagaataaagatgaactagtgccctatttcaaggacccttcttcttataatcccgatagattcaccgacttctttcaagacgaaatgaaccagtacgctgcattctttcgagacggttag

SEQ ID NO: 2985 - DNA, 1425 bp, Saccharomyces pastorianus
atgagcaacgatctcgtgtttgactacacttttagctggcctgctggccccaaagacgttattttaacagggacgtttgatgagtggagaggaactttgcccctggtgaaaactgcccggggcgatttcgaaattactatgccagtcagattggctagtaaaaacgataagttccaatttaagtttattgtggacggagtttggtgtgttagtgattcgtttggaaaggagcatgtcagtgagggaattgaaaacaatttcattcaaattactgactcggtcgaaacgcaagaagttgttggcgctagtaggattccagaggctggcggtctgctatgtggtaagcctgctcgtgttgcggggcccccttccactagtaatagaaagaagggtaaaagaaacaacaaaaagagaagatctaagttaaagaagaaaaccaacaagaataacaagacatctaatgagagtcaggaaggtgatgaagaagaaaaggaagacgaagacggtttagctggaaccactacagaagatgtcacaggtacctcgagggaagaaacaccggtggcggaaccactagatgccgccagtgaaaatccaggtgactttcatatccttccaattgaccaaaatgcaaacactgcttcattagagaattttataggtggcccaggtcctgttcttgtctccaatccaaatgaaatcaaagagtttagcgaaattagaaacgtcgatgccaaggaattgaacgaaaggctaaacaagaaggggcctgtcgttgagcctgctgttgaacctattgttggagagccagttgtggaaaacattactgaacttcctttagcagacgaaccaagtgaagaaattaaggaaattgctcctaaagtggacgagcctgcttctgaattagaaacaatcacacctgtcataaatgaacctgaagtccaacttgttccagaaacgcaggaatctatcgctgaaccatcaaaaattgaaccagtgggtaagaccgtccaacccgaattggtggaaaagcgtgaacctaccggtgctgcgttagacacttctaaagaagcagaaagtaaggtcaaacaagaagaaactcatactctagacccaactgttaagaaggactcgaagcaggccatgggagaaaaagctgaagttaaagctaggagatcaccagcagcttctgaagaaaaagataaaaagaaaaagagacatgaagagaaggtctctaaagagatcaaaagatctgaatccactaaggaaaagaagcattctactaaagagcctaaaaaacaactttctacaaaagttccaaagaagcaaacagcttctcctctaacgtccacatctgaagactcgaagaagaagaaaactgggctcttcggcaaatttaagaagctatttaaatgttccaattga

SEQ ID NO: 2986 - DNA, 3240 bp, Saccharomyces pastorianus
atgggctcattactcttatttgagcaacttaattttttaattttggtggcttcggaggccgaacttcccatcgctaactccactagagagctattgatggatcattcttgcaatgattgtcagatctataagctttatgataatgttgaagatggctcccagagagacaaaggttggtttatggacaaatttggcccgcaaacggtacattttgtcattagtaatacaattgaattttcgttttacagagcagtttatttcgatctgttaatccctgtcatatcccatacttgggtcagggattccgtaaagaccaagagacatctgagaacaaacatgtattcccctaacccattccatttgcttcgagactgtcaagtatacatctctaaaaactcgttcaataagtgtgaatacatcctatactccgacttactccatctgttgggtggcacctcggtcaattacatatcaaacagaacgacacacgtcattgtacaaagccccaaagatcctatcatagagacagttaacaaattgactttcggctctttttcttctccgtcttccaataaacaagtggagaaaccttcgagggactggaaatttgtctacccaacgtggcttctatatcactttaaaatggcaaagcctctaagtagtgaattagctagtttgtgcgaactggatatgaatgacaccaccgaggaacaacttttcgctaaatgggaagaagttactggtgataaagagacttcatcgacacagctttttcttcatccaaatacggatttgttcaaaaaccatcattttgctatatcaccagatttgaacttcttcacacctttatattggtttttaaaggaatttatcgaaaaattgaacggtaaggtaactcctttgagctcttctgatgacctaaactccatttgccaaggttcgcccgatatcgactgttatattggttattctgccaattcgccaatactaggccaaatcaatagcatcaaaccagagatttatgtcggaaatgtaagttggttattttatatctttgcattacagaaattcacacctgtatcgcaatgcaaaattatccatcagcctttccatgccaaattgtttacttccaaggaattaacagttgcgtacaccaattattttggttcccaaaggttttacattcagagattagtagaaatattagggggattcagtactcctgaactgacaagaaaaaatacacatttgataaccaagaatacaattggtaagaaatttaaagttgcgaaaaagtggtcattagacccccaaaatgctattatcgtaacaaaccatatgtggttggaactatgctatgtaaccaactccaaactaaaccccaaagacagcagatttcaaaatttcaaattggacgatgacataaaatggaacattggccaacctaaagtggaacagtcatctcttccaactttagacgttctatcgacgaatatcaaaaatgcccaaaccacaacaagaaaatcgtctcctctagatgaaaaaaacgcaggtgacactagtactcatacaagacaagataatacaccaaccagcacttttaccaattcaattgatgaaaagattgataaattacaaaaaatctcgatagaagtaagcaaaatgcatcctaccgaattggcacaaggttcagattctagtacttcaacaataggtctacctcccgtttccaacgtctatttacacggacagaattcaaaccctaacattgaaataaaaacggagaccgtgtttgagaataacggaatgggagagtcagtgaataatgggaaccagactgcgaagtatgataccaacatcaccgaaaaggtagaacgcaagaacagcgaacaagaactgagagaaaaatccacaaaaaaaaatgatgttgagtatgtggcaaaagaggaggagggttcgcaaatgcaattaggtcagcaagttaaagaggaagacgagttttggaaagaaaatgacaaagagaaaaagaccaagaaacagggtacggaactcgaggagcttaaagaagtcaagagaagtgaagaaaatgcagaaaacccaattacgcatgcaagaacagttgaaacttcagagaacactaatccaaagaacgcaaatgacaagtactcgcatttgtttgaaggattatctgatagcgacaatcatgttgatgatatgaaggctactgtcaattccagatacaccacgccgaagacgtcacaaaatgtcaagaccaatgctggcactccaatcgctactcaaacccaagttcacacgcctagtagcaattcaaggctggcaaagacacaagctgccaagcgattgcacacagatatcgaatcattgaatgaatttcagaaaaagctgaaaaggaaaaaaattgataccgaggagattttattgcctgaggagactggaaatttgaataaatacaagctattaattgcgaaggcagaaaaagttttgagtaaatttgatgaattgcctgattacaacataaaggcggtttgcaccggatgcttccaagaagggtttaatgaagtcgacatggaaatattaagccaattaggtataaagattttcgacaacatcaaagaaactgaaggactaaattgtatttttgctcccaagattttgagaaccgaaaagtttttgaaaagcttaagtttcgaacccttgagatttgcactgagacctgaatttatcattgatttgttaaagctagttcataccaagaaggaaaaagttgcgcaaatgaatctgaacctgtttgattatgagatcgacggggtcgatgaggttctattatcgaagactaaactacctaccaaggtgttcgaaagggcgaacataaaatgcatgaacctagtcagtgatatacctggtggagtgagcactattggttcagttctgcaggcccacggaatcaaaaacgtcaatattttacgcaataaaaaatgcatttttgaggacataatggataatgatgtttctgaacagaaagatgaaaacatctttaaatacgtccttattgtcaccaaggcttcacaagtgaaaaaattcactaaattaataaacgatcatgacaaggccagtacggttttgattgtagaatggaattggtgcgttgaatcgattttccatcttgatgttgatgttgagtcgaagtcaaatattttataccaaaaaaaaacaaaataa

SEQ ID NO: 2987 - DNA, 3693 bp, Saccharomyces pastorianus
atgatgcatgagcctaaagcggagctacggctgataactgttgcttttaatgaagcgtctaccgattcaccctctttcagagcttcggtcaactacttccatacaaaaatggagtctttgaacggttggttgcagaatgccgtagattacgtggaaaatacgtacagaccttcatttgaagattttcaaaggataaaggaaacgctattctcgcaattgctgccttctcccatattactttccaatgggtttgtaagcaaccaagcatacactccactgcttgtaagagattttgctaaagacatcaatgatctttcgaatacagttctgaagataattctgggcgacgaaaactctcaatatactacagccttgacagctctaagttcagatgccatcgatccttatcttagctcaagaaaaaactttgaatattaccagagaaaacacgattcatttatgaacgattttctggcatctagtaatgatggcgattctctgaccccacaaaatcttcaaaatgaaacgttgaagttgttcgatatcaagcataaatatgtagaagcttcgttggatttagtcgaagctatttcgttaatgaaggttaatttggataagtttctggttgaaacaatagatattatacgcaagaataataagatcacaaccaaagataccaaggatgtcactgatattactcctgaactcacggaaacgttaaaagaatggtccgactggatagaaaataaccgtcagacattccaggctttgtcatctaaatcatctgaagccaagcgtgccattctcaaactcaccctggcacggttgaagccatctcgtttgttgcaggattatgacctcaacgtcatacaaaacctgaaatttaactcacccaaatcagctagcggtaaggtaattcatgaacaaaaaggaatatcagggtggctttacatgagaacaactgtcggccataatcctaaaagagttgtgtgggtaagaagatggtgttttttacataatagcatttttggagttttctcactttcacctaacaagacttacgtcgaagaaacagataagtttggtatattatggattagtgtagaatatttgccaaaaaaatctaggaatttctgtttcaaattgaaaattcagaaccccaacaacaaaacaggtgaagaaaatacacacattgatattattttacaggctgaaagtgttggcgagttaaaagcttggattggtatgttcaactttcataaacagtacgccttgtcgataaaggatacaaacaatcctcgataccaactagccataaaaaagatcgaacctcaatttttcgagtttgcatctagcacttcgacctcaactgacaaattattaacttcactttctggtagtactttaacactggtagaggaattaaaaaaaaattacctgtcagaaaacgatattgactctattattgataatagggcttatcatttaaaggtgatatctacaccgattttcacgcaactgactcagttggctttattctccacatatttgtctgtgtcaagttactacccaggtgccacccaagcaaatgtatggggcgcagcgaattggaatgacttttcttacttatataatccaatcggggataaatctgtacacgagccgcccaaagtgtcaagtgcctctagattttctgtcacttatcctgaatattatccatataatatgaaaatcgatgatatacaattcaggtccatttttttttcagtgaattatgattttttagaagtccccaaagaattagttcttttaagatattcatctgtttggtatccaaataataaacaaaaattttcgtctatggcgttcgtcactctcaataatatctatgtctacttgaacatttcaggtttctcgtacttgagaaagatcgacctattagatatcgactcaattgaatatgacaggggcccaaaacacgcttcttcaaggatgctgcacatgcaaaagagtgatggggtgaaattcaatatgtccatcttctttactgatcgaagagcagtcgcttccaagttacaattcttggtagaaaataaagcaatgcacggtccaaaaggtgaaaaggaggttttggaagtatttcaaagattagatgaagagattaaaaacgaaaggaatgttatcaaaaataatctatccgaagtagaactttactcgaaagaacatggtcactttttgaagaacacctatgatttacattttgaaaacactgaagaaacaccagttgaattaatgagccggaaagtgcgtttggaaggggaagcccaattctattttcaagataattacagagtaggaagcaagaccttttttcacgtgctgtttggggataagtcccaagtttttcccagttcattatttctttgtaaaaagggcagcaacatgaacaattctacttattgggagtgcatcaagcatacagaacaggacgataattgccaatttgagcttgttcgtaagttacagtttcaactaaacaggacttctaattacatcaaagaacagttctgcttaaagaatgataatgacaattataaaatatctcttgcacagcgcatagtgaagataaaacaaaattactactacgaagtaaatgaaggtccatttattgtgaaatttccgctatgccatcctttagttgtcagtgtgaagtttatcattgcagaatgtatcacttctcaaggcgaatcactaaaaaagtgtgatctagcaatattgtacaatttcaaattcattgaatctgttgaccagatggatacgaaggttaaaaaattgtggcttttagaaaatatccatcttggttgggtattaagattttgtaaaattgaacattttgcgatcaataagaaagttagagagtacctaaaaaaattcaacgatagagaaaggatgagtgatgtcatcaaactgtgcgggttcctaggtgttttacctacaaaaagttcacagagcaagaaaaaaacagattataacgtgcaacccgtacagatcaattacgattttctgttgcttttgaaaattattaccaaactaacagttttttatctaagcggttttattattaggacgacaaggatcctgatagcgataataatgttaatttgtagatgttttgcgaagttcaacaaatccttgtactatggtcttttaatgtccgcactaattaatctggtcttcgttggtaagtccattcattcttatttctcagtgaaaagagcagaaactctttttcaaaattatgccaatggtggacaagcagagcttcaaatcatgcatcggtctttaacagttcctgatttaaacgttcttacggaaaaaatgattgatgatgatgatcaagcgggtgtagtgttcagacggttcggggaggaggagaactcataccagtacaaggaaactagacaagaaattgcaattaaacgaaatcaagtgctagtggatttaagaattctgcagagtacggagaacgaattggtgcaaggaagctaccgaaagtttttaataacagaaagagacaagtgtcttaccacaaaaactgaaatgcctgaactatggatgaacgacccgaaactacagggttattgtaacgaatgctttgcagaatatgaacgattatctaccatcccggtttaa

SEQ ID NO: 2988 - DNA, 795 bp, Saccharomyces pastorianus
atggtggtcatgacaggagaagaaggacgtacgtatttcgagtctctttgcgaggaagagcagagcctgcaggaaagtcaaacgcacctattgaatattcttgaaacactagaagcactgacaaaccctgaatcctcggatgattcactcacagagtccctaaaaaacctacctgctttacatgaagagttgctcaagagttccattcgtctgcgatacgataaatatcagacgagagaagcacagctcttggaggatgcggaatccggaagggatatctcagcaggagtacagaatcgaaagacgattagtgaatactatactacttttgaacaactgaatagggatactttacggtatataaatttactgaaaagactgtccgttgatttggccaaacaagtagaggtgtctgatccgttagtgacagaatatgaagtggataactggggcccatctgagaaactacaaggtatccttgagcagtactgtgcaccagaaaccgacatacgtggtgtcgatgctcaaatcaaaaactatctagatcaaattaagatggcgcgtgcaaagtttggcttagagaataaatactccttaaaggaaaaactctctagtttgaccaaggaactaaaccattggagaaaagagtgggacgacatagaaatgcttatgtttggcgatgatgcacactccatgaaaaaaatgattcagaagatagactcattgaaatccaaaatagaatattcgtctggaagcaaccctgtggacgcagaaggcgacattttgttagagtaa

SEQ ID NO: 2989 - DNA, 1893 bp, Saccharomyces pastorianus
atgtcatcagaaagggttttaaattattcagcaccattcaagtcatttttagatacttcttttttccaggaactatctagactgaagctcgatgttctgaaattggactcaacgtgccaaccgcttgttgtgaatctggatcttcataatattcctaagtcctccgatcaagttccgctattcttgactaatcgaagttttgaaaagcataataacaggtctgatgatgaagtgcccgtaagaggaaagatatacaatttcaatgtattagacgaattcaaaaatctggacaaacaacaacttctgcaccaaagagctttggaatgctgggaagatggactagaggatataaataagtgtgtttccttcgtgattattagttttgctgacctgaaaaggtacaggttttattattggctaggtgttccctgtttccaaagaccttcttcaaccgttgtttatgtgcagggagaaggagactcaaaccatgtttggaaaacatatcaagagtggtttgataccaattattcaaaatgggtgtgcatactgaatgaagacaatgacatcataaattataataaagatattttcggaaagactaaagtcctagcggtgagagatacaagtacgatggaaaacactccttctgcattgacgaaaaattttttaagtgtgttacagcatgacattccccatttgacagattttaagttgctagttattagacagcataagggaagttttgctttgaacgttacattcgcctcccgtggcgtacagtctttatcgaccaacccagatatgaaagttgctggatgggaaaagaatattcaaggaaagctgaccccacgcgttgttgatttgggttctttactagatcctttaaagattgctgatcaatccgtagatctgaatctgaaactaatgaaatggggaattgttcctgatttaaacttagatataatcaaagatacaaaagttctattactgggtgctggtacgttaggttgctatgtatcacgtgcactaatggcgtggggcgttagaaagataacgtttgtcgatagtggtacagtttcttattcaaatcctgtaagacaagcgttatacaattttgacgattgtggaaaaccaaaatcagaggctgcagctgcttctctgaaaagaatatttccgttaatggatgcttcaggtgttacactaaacattccgatgattggtcacaaattggtaaatgaggaaagtcaacacgaagactttaataagttaagaggtttaataaagaagcacgacgttatattcctattagtagattcccgagaaagtagatggttgccttcgttattgggtaatatagaagataaaattgtcattaatgctgctttggggttcgatagttatctggttatgaggcacgggagtagaaatgaagagcctttgaagcaactaggctgctacttctgtcatgatgttgtagcgccgactgacagtttgactgatcggacgttggatcagatgtgtacagtaactaggccaggcgttgcaatgatggcatcttctttggccgttgaattgatgacttctttgctgcaaatcaaaaactcgggttcagatacgactgttttaggggaaatacctcatcaaatacgtggattcttgaataatttttctactttaaaattagaaactccggcgtatgagcattgtccagcatgcagccctaaagtcatagaagcatttacagagtcggagtgggaatttgtaaagaaagcgttaaatgatccgttataccttgaagaaattagcggtctgacgcttataaaacaagaagttgaacagttaggtaatgacatttttgagtgggaaggtgacgaatccgatgaaatgaaataa

SEQ ID NO: 2990 - DNA, 1203 bp, Saccharomyces pastorianus
atgtcatttgtaaaagattttaagccacaagctttaggtgacaccaacctattcaaaccaatcaagatcgggaacaatgaacttttgcaccgtgctgtcattcctccattgaccagaatgagagctcttcaccctggtaatatcccaaacagggactgggcagtcgaatactacacccaacgtgctcaaagacctggtaccatgattatcactgaaggtgccttcatatccccacaagccggcggttacgataacgctccaggtgtttggtcggaagaacaaatggtggaatggaccaaaatcttcaacgctattcatgaaaagaaatcgttcgtttgggttcagttatgggttttgggttgggctgctttcccagacaatcttgccagagatggtttgcgttacgattcagcttctgacaacgttttcatggatgccgagcaagaagctaaggccaagaaggccaacaacccacaacacagcctaaccaaggacgaaatcaagcaatacattaaggaatacgtccaggctgccaagaactctattgctgctggtgccgatggtgttgaaattcacagtgctaacggttacttgttaaaccagttcttggaccctcattccaatactagaaccgatgaatatggtggatctattgaaaacagagctcgtttcaccttggaagttgttgatgctcttgtcgaagccattggtcatgaaaaagttggtttgagattgtccccatacggtgttttcaacagtatgtctggtggtgccgagaccggcattgttgcccaatatgcttacgttgctggtgaattagaaaagagagctaaagccggaaaacgtttagcttttgttcatttggttgaacctcgtgtaactaacccattcttgactgaaggggagggtgaatacgaaggaggtagcaacgattttgtttactccatctggaagggcccagtcattagagctggtaattttgctctccacccagaagtcgttagagaagaagttaaggacaagagaaccttgatcggttacggtagattcttcatttctaacccggatttggttgatcgtttggaaaaaggtctacctctgaacaaatatgacagagatactttctaccagatgtctgctcatggttatattgactaccccacctatgaagaagctctcaaattaggctgggacaaaaagtaa

SEQ ID NO: 2991 - DNA, 720 bp, Saccharomyces pastorianus
atgaatcaagactacgcacaactttcgatccccgagctgaaagaaactaggacttctaaattaaacaaaatgaacaattttcgaagctccccaattgctgaaataatgaacaagataccacctgactgcggtaagacacaaaatactacgttccctgagttcaatccggtattaagaaggcgacaatacgaacaacggcctatgtacgagaagccaatgcgagtcgcagacagtatgtctccacaactctcctcaatgaactgtttgccaaacttgtattccaacggttcactgccattaccaaatccttatttatcatatttaaatcatcttgaaaaggtcaattaccaagacgccaaattcaatagctggggtattctacaaaactcgaatagtggtttggccattccaacatatttcagtccccgaacagcacaaaatatgccttgttccgagaaagtagagacatggcttgaaagattaccaatattcgtgggatttgacgggtatttatttacaacttgctttgattatgaatatatgttggattgggaggaaactgaatttacctttgaaaagacagcatgcatggaaactgattattctagagctttaactgatactgatatcatacatattcaagaaaaaaagatagaaactttgataagaaaccagtatttaaaggaatatgagttttctcagaaagatttcgagttttag

SEQ ID NO: 2992 - DNA, 2301 bp, Saccharomyces pastorianus
atgtctgaggaatttattgctgcttccacgctggccaaaaatttggaattcgccaaaggtaatgagttccataccattttgaccactttacgatctccactatatatcgatgaacatctgctgaagtctgaattaagctttcttgttacaaagattttgaagttgattagatcaagcaatgactttgatctttggaaagggtgccatacttctgtcgtagtttgcgcttacaatccattgattctatctactcatggtggtcaattattagctgctatttattctagactggaacagaaaaccggcttctactcatccgttgtctcttcgtcacacggaaaacaactttttgatacattggtttcctctatggcagttatcattgatttagtgaaaagcaaacctactttatcaagagaagcattagtgcccaaattaaaggccatcattccaacattaattactttgtctcaatacgagcctgaactgactttgccggttctaaaaaagatcttaaagagaaataccaccactttcaagccatttgttaataaatttcgcattgtgttaacaaacttgataaaatctgattacgcgtctttaggctcaaagactcaaagattagtctgtgagaactttgcttatttgcatctgttaaaaattcaagcaagcaatgcaaacgatgacgaatcccaagcacatcacaaagtttaccctgatgccaattggagaacagggttgttatctattctatctcaattcaagcctatcattcaattgtgtgaagaaatcttggattttgaacaagataatgaactacagaaattggtcaaggctttaccagttgacatcgaatcgaacaacgaagtcgaatttttgcccaaactgaaactagatttcaacgcacctttaactttatgggaaattccacaacgtttgtcattattagttgacatgcttgtcgcatttatctctttacctactccatttcccattagagttccattgggtagtatcaactctgtttgtgaagttttattaagtgtcagtcaaaaatatctacctttgaagaaagagttgcgtcgtgataatgaattgaatggttccatcaattacattttgcctcaaatccaattccagggtatcaggctatgggaaaatgtggtttcaaaatacggcaaatgtggtttgtcactttttgaaggaattctttcttccattgaactttttatcccattaaagaaaaagagtaacaatgaaatcgatttcaatgtagtcgggtcattaaaatatgaattttttacagttttcagactagtaaacatgattatgtcccatttagggcatcaattgaacacagtcagtgttgtatctcaattaattgatgtcgccttgtttctatcccgtgataggactttagtcgattctttatttaaaagccggaaaggtaacttgaagcaaactaaaactaagcaatcaaagaagaacaaaaacaacgaaggtgcactatccgatatttttacacatccagagctgtttgtgttcaaaaattccatagattggtcgaacgaaatcaatgaatttttcattacttctttgaataactggattttaccttccacaccacatattcaaattttgaaatatagtattactcaatctctaagattgaaggaagaatttggttatattccagaaagttttgttagccttctacgttgtgaagttctccatccaggtaatgaacgtgtatccattttgcccattgctatatcattattgaagaacgccaacgatgatttatttgaactactgtgtcatccaaaggtccctgttggtatggtctaccaattgcacaaacctttggacttgggcgaacaggaggagcaagaagaagaagaagaagatatgggtgagagagggaacagcgttactggatcatattcgcatgcgattgtagacacgaaggcctttaaagcattggacaatttagaaaatgtagttattcctgagcctgaacggacagtttctggaccagttgatgatgccgctgtattcaaaaagagattagtagaagaagtctccgaaagggaaaccacgtcgatgaataagaaggttaaaattgtggaagaggcaaccttggaaactagcgagggaactactgtggaaacaattgtggctcaaacaaaggttgaagtgaaatcagcagaggaaagtgaaggtgaagaagatgaagagtttgaaataccagctatcgaattaagtggagatgaagatgaagacggcgagggcgacgaatag

SEQ ID NO: 2993 - DNA, 1185 bp, Saccharomyces pastorianus
atgtcaccactaaagaagaccattccagagtttttaacttacttaaaatcgctaccgatttcaaaaaccgcaagcggcgacattttgacaatatgtgttggtaatgaatcagcagatctagactcaattgctagtgcgataacttattcatactgccaatacatttacaaccaaagctgcaattctgaagaaaaatgcggtttgactataccaatcatcgacattcctagggaagatcttagcctaagaagagacgtgatgtacgtcttagagaagttgagtattaaggaggaggaattatttttcattgaagacctagtgagcttaaagaagcaagcccctaacggcactaaattgaactcatacctagtagacaataacgatgctccaaagaatttgaagaattacatagacaatgtggtcggaatcatagatcaccatttcgatttgcaaaagcacttggatgccgagcctcgagttgtcaatgtttccggaagttgctcctcgttagtcttcaactactggtacgagaagttgcaaggtgaccatgaagtggtgatgaatattgctccctttttgatgggcgccatcctgatagatacctcaaacatgcaacgcaaagtcgaaccaagtgataagcaagcggtcaaaagatgtcaagaggccatcaatcgtgcggccgatgaagtgtcggcccaaggcttgcaagacaccagcgtgttttacaaagaaatgaaatcgagaaagaacgatattagagggttttcagttagcgatatcttgaagaaagattacaagcagttcaattttcaaggaaaaggccgcgaaggcttggaaattggtctttcatccattgtgaagagaatgtcatggctgttcggcgaacatgacggggaaacagaatttgtcaagcaatgcaagaggttccagaacgaaaggggtctcgatgtgttggtgttattgacatcatggaggaaagccggcgtttcacacagagaactagtcatcatgggtgatcccaagatggtacgtgcgctcgttgaaaaagtcagtgataaacttgctttgcaacagttcgggggcgattttgaccaaggcgtggcgatgttcaggcaattgaacgtcgaagccaccaggaagcaggtcgttccctacctcgaagaagcgtactctgaagtaaactga

SEQ ID NO: 2994 - DNA, 1602 bp, Saccharomyces pastorianus
atgatgctattgaaagctttcattatccttttggcaggttttgtagccaatatatcggcaacaatgacaaacaaaacaagcgacagacctttggtccacttcactcctaacaaaggttggatgaatgatccaaacgggttgtggtttgatggaaaagatgccaaatggcacatctacttccaatacaatccaaacgacactgtatggggtttgcctttgtactggggccacgctacttctgaagatttgactcactggcaagacgaacctgtcgctatcgctcctaagcgtaacgactctggcgcttactctggttccatggtggttgactacaacaacaccagtggctttttcaatgatactatcgatccaagacaaagatgtgttgccatttggacttacaatacacctgaaagtgaggaacaatacatcagttactcccacgatggtggttacacctttacggaataccaaggcaaccctgttttggctgacaactccactcaatttagagatccaaaagttttctggtacgaaccatctcaaaaatggatcatgaccgctgccaaatctcaagactacaaaattgaaatttactcctctgacgacttgaaatcttggactttggaatctgcctttgccaatgaaggtttcttgggttaccaatacgaatgtccaggtttgatccaggtcccaactgagcaagatcctactaaatctcactgggtgatgtttatttccatcaatccaggtgctccagctggcggttctttcaaccaatacttcgttggctccttcaacggtactcacttcgaaacttttgacaaccaatctagaattgtcgatttcggtaaggactactacgctatgcaaacttttttcaacaccgacccaacctacggctctgctttaggtatcgcatgggcttccaactgggaatacagtgcttttgtccccaccaatccatggagatcatccatgtctttagttcgtaagttttccttgaacaccgaataccaagctaacccagaaactcaattgaccaatttgaaggcggaaccaatattaaacattagtaacgcaggtccatggtctcgtttcgcaaccaacaccactttaaccgaggctaactcttacagtgtcgacttgaataactctagtggctctttggaatttgaattgattttcgccgtcaacaccactcaaactgtctctaaggctgtcttctctgacttatctctttggtttaagggtttggaagactctgaagaatacttgagaatgggttttgaagcaagtgccgcttctttctttttggaccgtggtaactcaaaggtcaagttcgtcaaggagaatccatactttactaacagaatgtctgtgaacaatcaaccattcaaggttgaaaaagacttgagctactacaaggtctacggtttactggaccaaaatattttggagttatacttcaacgatggagacgtggtttctacaaacacctactttatgaccactggtaatgctttaggctctgtgaacatgaccactggtgtcgatgacttgtttcacattgaaaagtttcaagtgagagaggtcaaatag

SEQ ID NO: 2995 - DNA, 591 bp, Saccharomyces pastorianus
atgctaaggttagtgactagaagtttaccgagattgacacgttcttctgctgggggtatgctggtgcgtggctccctgctgcaatcgttcttcactagtgcgcgattcaatagcagtatcactgaagatgaagccaagatcgtcttgaaggacaagaacaggcccttgagagtggacagagagttgcctgacccaactcaggaaagaaagaagcgaatacttgggttcgtggtgttttccgtggccattgggtctgcgctatcgttgatcttcaactatgagaaaactgagtcccccatcatctctaactcgctgtaccatataagaaggtctccggcaaccagagacatactgggcgaaagcatagaattcgacggcatcattccctgggtctacggtgaactgaactctgtcaagggtaaaatcaatatcacgttctatatcaagggggacaagaacgtttctgggaccgttagactggtcgccgataggaatactcatgacgaggagtttttgattcacgaatggagcgtcaccgccggtggccataagattgatcttctagccgagaactccaagagacctatttag

SEQ ID NO: 2996 - DNA, 3660 bp, Saccharomyces pastorianus
atgcgacttcgtcttccgtcaaggtcgctattcacccctccgtttaggataggcatccgagctcaactgacagccttggtgagtatcgtggctttaatatcgctgataattttagctgtaactacaggtgtctatttcacttcaaattataagaacttaagatccgatagactgtatattgccgcccagttgaagtcgtcacagatcgatcagactttaaactatctatactaccaagcatactatttagcttcaagggatgctttacaaaactcgctgacaggttatgttgcaggtaacaaaagttcggataactgggtggactccataagtattgtacagaaatttttgagctcttcgaatttattttatgtggctaaggtttacgattcttcatttactactgtcttgaatgctacaaacaatggaactggtgacttaataccgaaggatatttctgatgagttgtttccgttgtccaccgatatgccattaccttcttcactagaaactacaggtatactaacagatccaatactcaacagcaccgactacctgatgtctatgtctttacccattttcgcaaatccttcaattatcttaacagattcgagagtatatggatacatcactataatcatgtcagcagaaggtctaaagagcgtattcaatgatacaaccgcattagaaaaatctaacgttgccattatttccgcagtatacagtaatcaaagtaaagcctctgcataccatttcatctttccgccgtatggaacctcttcaacaataacaaaaactaattttccaataaaaaacaacacgttcataagtagtgctttcagaaatggtaaaggaggatctttgaaaaagaccaatagctttggcataaaaaatttagctctaggttactcatcatgttcattccaattagttaactgggtcgccgtagtttcacaaccagaatcagtcttcctctctccctcaaccaaattagcaaaaatcattactggtactgtcattgctattagtgtatttgtgattctactaaccctacctctagcacactgggcagttcaaccgattgtgcggttgcaaaaggcaaccgaattaattacagagggaagaggtctgcgacctagtaccccgagaacagtaagtcgtaccagctcatttaaaagaggattcagttcaggatttgctgttccttcctctttattacaattcaatagcggagaggctggcagcaccacaagtgcaagcggccatggatgtagcgggcgtggtagcggtgccgtaatgtcaacagatagtagtatgaaaagtgctataaatattggtaatgaaaaactatcacccttagaagaagaaaacaaaataccgaatcaccaaaacaatgccaaaatatcaatggacggctctctgaaccatgatttgcttgcacctaacgccttaaggcacaatgataacgataggagctccagtagatctcacactcttactacctctgcgaacttaactgaagctagactaccggattatagaaggctattttctgacgagctttctgatttaaccgaaaccttcaataccatgactgatgcactagatcaacattatgccctcttagaagatagagtcagggctagaactaagcaactcgaggctgctaagatcgaggcagaagctgcgaacgaggccaaaacagtcttcatagctaacatttcacatgaattaagaacacctttgaatggtattctcggtatgacagctatctccatggaagaaaccgatgttaataagataaggaacagcttgaaacttatatttaggtcaggtgagcttttgctgcatatcttaacagaactgttaaccttttctaaaaatgtacttcaaaggacgaaacttgagaaaagagatttttgcattaccgatgtcgccttacaaataaaatctatttttggtaaggttgccaaagatcagcgtgttcgtctttcaatttcattattccctaattacataagaacaatggttctttggggtgattccaacagaattattcaaatcgtgatgaacttagtatccaatgctctgaagttcacaccggttgatggtaccgttgaggtcagaatgaaactcttaggtgaatacgacaaggaattaagtgaaaaaaaacaatttaaagaagtgcatgtcagaaaggggacagaaatacttgaagacatagaaaaaataaataagcatcacctcaaagaagcagcaaatttcaaaaaaagcatggattcagaatctacgaccacttccgtcataagtaacagagatacttctacaattcaagaagagataacaaaacgaaacactgctgcaaatgagaacatttataagaaaacgagggatagagagaaatcatcgaatgacgatatctcttcaatagcatcgacaagtactagctcatatgatgatgcgatattcaacagtcaattcaataaagcacctggttctgatgaagatgaagggggtgatcttggaaaaccaatagaaaacccaaaaacatgggccatttccatagaagttgaagatacggggcctggtatcgacccttctttacaagagtccgtcttccacccatttgttcaaggtgaccaaacattatccagacaatacggtggtaccggattaggtttatctatttgtagacaactagcaaatatgatgcacgggacgatgaaattagaatctaaagttggtgttggtagtaaatttacatttaccttacctttagatcaaactaaagaaatcagttttgcgaatacgaactttccatttgaagacgaatttaatcctgagagtaggcaaaatagaagagtcaaattcaatgtcgcaaaaagtataaagagtcgacagtcgacatcttccatcgcaacacccgctgccaataggtacggttcaactaatgaaatgctacgagaatcaagaaacaacgaggaagaagaaggcagaaaagccacaaatattgaagaagaaaaagaaggagggaacgaatcagatgaaacacaccaacaactccaagagaaaaaagtaaaaaattctatatctttttcaagtgctgacagcaatgtgcaaaagagtacgccttccacacatcattctagagaagaaagtgtaggttctgtaaatcttgatagaccatttctacaaagtactggtacagctacatccagtagaactatacccacagtttcaaacagcaatacgaatgactcaagtatcaagatattggtcgtggaagacaatcacgtgaatcaagaagttatcaaaagaatgctgaatctagaaggtattgagaacattgaactggcttgcgatggccaagatgcgtttgataaagttaaagaattgacatctaggggcgaaaattataatatgattttcatggatgttcagatgcctaaagtggatggattactctctaccaagatgataagacgagatttgggttacaaatctccaattgttgctttaactgcattcgccgatgatagtaatatcaaggaatgcttagaatcaggcatgaatggatttttatcgaaaccaatcaagaggccaaaattgaaaaccatccttatagaattttgtgcagcataccaggaaaagaaaaaataa

SEQ ID NO: 2997 - DNA, 747 bp, Saccharomyces pastorianus
atgaataaatgggtagaaaagtggctaaaggtgtacttgaaatgttatatcaacttgatcctctttcatagaaacgtgtatccacctcaatcattcgatttcaccacatttcagtcattcaacttgccacagtacgtcccaattaatagacatcccgcgttgatcgattacatcgaagagcttatactggataccctctctaaactgacgcacatatataggttttctgtttgtatcattaataagcaaaacgatttatgcatcgaaaagtatgtcttagattttggtgaacttcaacatgtgaataaaaatgaccaggtcattacggaaactgaagtatttgacgaatttaggtcttccttaaacagtctgattttacatttagaaaaattgcctaaaatcaacgatgattcagtaacatttgaagtggctattaatgccgtagaattggaattaggacataagttagacacaagaaaaaaggttgataatttagaagaaaaactagaagtcgaaagagattcaaattgggtgaaatgccaggaggacgcaaacttacctgatgaagatatcagtgattttcaacatcccaaaataaaattattctctttaatcgggtgtgatgtgggacccttaatcattcatcagtttagtgaaaaattaatcagcagtggtaatgacaaaatcttggatggagtgtattcacaatacgaagagggcgaaagtatctttggatccatatcctaa

SEQ ID NO: 2998 - DNA, 642 bp, Saccharomyces pastorianus
atgaagtatgaagatttaaacctgattgccatttggccatcaccgacaagagctgacctttgccgattcatcaaggagaatcttttgaacaataatgttattacccaattattctttatcgatgctacaaactcattcccgctaagccatttccagaaactagtaccgccagatctttcagaaaacgccaagatatatgaaaatatcagaattaacacctgtcttgatctagaagagcttagcgccataacagtcaaaatactacaaattctatccatgaacaagatcaacgctcaaaaggacacagaagacgctgctgctgatccgctaaagattatattatacatcaacgggttagagatcatgtgtaggaactctcaaattaaatcgtcgcctcaacgctcacatgaattaataagggacattttgcttaaattgcgtgtaatggcgaataatgctagagcacccataagaacagtgttggaatttcctaaggagcaactattggactattatttcatgaaaaagaataaaactagtgccctgttaccagcatcgacgcatagcaagaggagaagaatgaagaatggagattcccttgctgagtatatctggaagtactatgcagattccattatttga

SEQ ID NO: 2999 - DNA, 1452 bp, Saccharomyces pastorianus
atgtctgttaccaatgctgaacaagaatttagtggtaaatatagttcgtatacagtccaggatcgccaaggtctcgtcaatgccgtgacgtgcgttcttggatcgtcgtccgaacccgtagccgtgtcgaccgactattccaataatctgagcattgccagagaggtcaacgcgtatgccaagattgccgggcgtgattggacctactatgtgcagaaattggaagttaccatcggcaggaacacagacagcttgagcttaaacgcacacccagacgcggttgtccagaaaaacatagacattgatttaggtcctgccaagatcgtgtccagaaagcatgctgccatcagatttaacttggaaagcggatcgtgggagcttcagatatttggtagaaatggtgcgaaggtcaattttagaaggatccccacaggtccggactctccccccacggtgctacaatcaggatgtattatcgatattggtggtgttcagatgatctttatattaccggaacaagagactattataccagattattgccttaatcatctcatgcccaaattgctatcaacctatggcacaaatggcaataacaatccgttgttgcgcaacgtcattgaaggctccacctatttgagagagcaaagattgcaagaagaggctcgattgcaaagattggaccacttgcacactccattgtcgtcgtcatcagaagtaaacgcattaggcgaccctcatggagacacgattatgatggaagacgaagatgatgatgagaacgaaacaagagagggcatccgaccaaatacctactcggccagtaacagcaatgttatcaacaacaatatcatgcctcatatagacaacccttcagacttgtcactagatgaaaatagatacgttaaacctccacagtcatatgcctcgatgatcacccaagccattctttccacaccagatggcagcatttcattagcagatatttacaaatttatctctgacaactactcattttataggttttctcaaatggcatggcaaaattctgtgagacataacttatccttaaataaagccttcgaaaaggtacccaagagagctggccaacagggtaaagggatgaactggaagatcagcgatgagatcagacaagatttcttgaacaaatggaacgccggtaagttaagcaagatcagacgtggtgcatcagtaacaagacaattacaattacacatgtccaaatttggagagataccagcccccgaatcttcacttacagctacaagggagataaaggcgcagaaggtgaagcgaccttcccaaaacacaagaccagttttacaagagactaccccacaattgcaagaaacccaattgactagtcaaatgccgtccaagatgtcgatgaacatagccacaaatgccaacgtgaataatggttctctctga

SEQ ID NO: 3000 - DNA, 4092 bp, Saccharomyces pastorianus
atgcttcaggaacagtctgcgtcgatgagcgcggtgatgaataacacgcccacaacggtcgcggccttggctgcggtcgctgcagcctctgagacaaacgggaagctagagtcggaggaactgccaaagattataattcccaaacctaagagtagttctcaactagagcagctgctgtatcggtacagggccattcagaaccaccccaaagagaacaggttggaaatggcggccatagaggacacattaagagtcatatcacgtgaccaagatatttacgagactaaactagacactttgaggaagagcatcgatgaaggatttaactacaaagaaggtctacttcagaagcatttggttgcattacaattactggagaaagatacggacatccccgactatttgttagacttatcagatattgatagtgatgaaactgcagtagaagaggcggatttctctgggaagaagccaataaagatttcaatggattttaatgcaaaggccaaaagtttgggtttggaatcaaaattttcgaatactgcgaagaccgtattgggcgatccagaaaccgaaataactatttctgcccgtatatccaacagaatcagcgaattggaaaggttacctgccaatttgggtacgtactcattagacgactgtttggagtttatcacaaaagacgatttatcctccagaatggatactttcaagatcaaagctcttttggaattgaagagcttgaagcttttgaccaagcaaaaatctatcagacaaaaattaatcaataatgttgctagtcaggcacatcacaacattccgtatttacgtgattctccctttacggcagctgcccaaagatccgttcaaattagaagtaaagtgattgttcctcaaaccgttcgcttagcagaagaattagagagacaacaactgctagagaaaaggaaaaaagaacgtaatttgcactcacaaaaaataaacaacattattgattttattaaagaaagacaatcagaacaatggtctcgtcaagaacgttgttttcaattcggtagattaggtgcttcattacacaaccaaatggagaaagatgaacagaaaagaatggaaagaactgctaagcaacgtttggctgctttgaaatccaatgacgaggaagcttatttgaaattgttagatcaaactaaagataccagaatcacacagttattaaggcaaacaaattcttttctggattctttatcacaagccgtcagagtacaacaaaatgaagcgaggatactcagcggtgaagaagttcaaccaatcactgatgaagaaagagaaaaaactgattattatgaagtggctcatagaatcaaagagaaagtcgataaacaacctaccattcttgttggtggctctttaaaggagtatcaaatacgtggtttagaatggatggtctctttgtacaataatcatttaaatggtattttagcggatgaaatgggtttaggtaagaccattcaatctatttctctaataacgtacctttatgaagctaagaaagatacaggacctttcttggtcattgtacctctatccacgataaccaactggacattggaatttgagaaatgggcaccaagtttaaacaccatcatttataaaggcacaccaaatcaaagacatactttacaacaccaaattaggattgggaacttcgatgttctattaacaacttatgagtatattatcaaagacaaatcccttttggccaaacacgattgggcccatatgatcattgacgaaggtcatagaatgaaaaatgccaattccaaattgtctcacacaatttctcattattatcgtactagaaatagattgattttaacgggtacccctttacaaaacaatctgccagaattatgggcattattaaacttcgtcttgcccaaagtcttcaactctgccaagacttttgaagattggtttaatactccttttgccaatactggtactcaagaaaaactggaattaactgaagaagaaacattgttgattatcagaagactgcataaggtgttaagaccatttttgttacgtcgtctgaagaaagaagtggaaaaggatttgcctgataaggtagaaaaagttattaagtgtaaactttccggtttgcaacaacaactatatgaacaaatgttaaaacacaatgcgttatttgttggtgcggggacggaaggtgccactaagtgtggtatcaaagggttgaacaataaaatcatgcaactaaggaaaatttgtaaccatccgttcgtgtttgatgaggtagagggcgttgtaaacccttcaagaggtaacggtgatctactttatagagttgccggtaaatttgaattgttagacagagtcttaccgaaattcaaagcctcaggccacagagtactgatgtttttccaaatgacgcaagttatggatattatggaagattttctgagaatgaaagatttgaagtatatgagattagacggtagtacaaagaccgaagaaagaacagaaatgctaaatgccttcaatgccccaaattcggactatttttgtttccttttatctacaagagcaggtggcttgggtctaaatttacaaactgctgatacagtcattatttttgacacagattggaatccacatcaagatttacaagctcaagatagagctcatagaattggtcaaaaaaacgaagttagaattctaaggttaattactacggattctgtggaggaagttattttggaaagagccatgcagaaattggacattgacggtaaagttattcaagcaggtaagttcgataacaaatccactgcagaggaacaagaggcatttttaagaagattgatcgaaagtgaaacaaatagggacgatgatgacaaggctgagttagatgatgacgaattgaatgttactttagccaggagcgccgatgagaaaatattatttgacaaaattgataaagatagaatgaatcaagaaagggtgaacgccaaagctcatggactcagagtcccacctccaagattaattcagttggacgaactacctaaggtgtttagagaaaatatcgaagaacatttcaaaaaggaggattccgaaccgctggggagaattagacagaagaagagggtttattacgatgacggtttgactgaagaacaatttttagaggcagtggaagacgacaatatgtcgctggaggacgccatcaagaaaaggcgcgaagctcgtgaaaagaggaaattacgtcaaaataacacaaaagaaaacgaaatagaaactcttgaaaatacacctgaagcacccgagtctcaactcacagataccaatagctcgattacggctgtggatgtggacactgctattgataaggaatcggtagtttccacgtccaaacgtcgcacaactagaaggaaaagaaccatcgcagttatttcaggggaaggtaaagaaaacttagaagaagactatcgtccccaagaaaatgagagtccaaaggcagaagaagaactaaagaataactccgttgagattataggcggatcagaatctaggagaaagaaacctaagttgacagtcaagattaagttaaagaagacgcctgcgatggacaataatgataccagccaaccagaggagaaaccagaggggaaatcagaggaaaaatcacctgtaaagaaagctccagccaaaaaaatgaaagctaaacccaagcctcttggactgttccctttggtggaaaaactagtagaaatgatgcgtgaacagttggacgaagtagattcccacccaagaatttccattttcgaaaaacttccatcaagacgcgactatccagattacttcaaggtcatcgagaaacccttggccatcgacattatattgaagaactgcaaaaacggcacgtataagactttggacgatgtaaaacaagccttaaaaacgatgtttgacaacgcaagattttacaacgaagagggatcctgggtttacattgacgccgacaagctgaatgagtttaccgatgaatggttcaaagaaaactcgccctag

SEQ ID NO: 3001 - DNA, 972 bp, Saccharomyces pastorianus
atggccatcatcaccgctgttaagagaggtttgccaaagttaaccacatccgctgcttcaacaaccaccgctacttcagtagcagccggtacttcaacgactgctacttcagtcagttctataacatctgttgcctcttctaattcttctgcctcactttcatccacttcaacatcatcttctatcctctctagtattactccaccttccaaaaatgggaatccatatatcataggtaccagcagtgtgcctagtggtacagtttttattatagtgggtgccattgtgggtgcaatatttttagcaatattagtatggtggacaatggtaacgtattcttcacacaggttgactaaaagcgttcaagattatgagtcaaaaatgttctcaccacagaatactcaatactacggcgactctccataccaagactctgccaacgatcattaccaagatggtgtccatgattgtgatgacattactagagatgattccgtgaaaattgggctaatttctcagaatgtgaacgagaaggtaacatcaccgatcgatttcgaaagatctttgtccggattagtttcaaattcgaacagaaactccctctttatttcgccaacaggtgatattttaaacaagacaaggctatctaagctttatcaggaaagccctcgattgattcaaaaaccattcacaatgacgagtaacagcgaatcctcaaattctttggtttctacagtctcttcatcgtctgtttcgtcatctgataataccgatgagaagaaaatggcggaggacataaagaaacccgccaaaattgcagtttcgccacatcggacactacagagctcaccagggagtgataatagttctaaaagctctcgcagtagggggaatctgttatctgtggaagctagaagaaaagttacaccctccacctacctagaagatatgttagagggtaaggaaacataa

SEQ ID NO: 3002 - DNA, 1161 bp, Saccharomyces pastorianus
atggtttttgatttggaaaaaattgttagaccaaaaatatataacttggaaccttaccgttgtgctagagatgatttcacagagggtatattgctagacgccaacgaaaatcctcatggacccacccaaaatgaattgattaaaagcaatttacaccgttatccagatcctcatcaattggaatttaaaacagcaatgaccaaatacagaaacaaaaccagtagttattccaatgacccggccgtaaaacctctaactgctgataatttgtgtttaggagtgggttccgatgaaagcattgatgcaattattagggcctgttgtgttccgggaaaggaaaaaatcttggttctgccaccgacgtattctatgtactctgtttgtgcaaatatcaatgatatagaagttgttcaatgccctttggttgtttctgacaattccttccaaatgaatgtcgaaggtgtgctaaccatcttagaaaatgatccattgattaagttagtatttgctacttcaccaggtaatccaactggggccaagattaagacaagtttgattgaacaagtcttacaaaattggcaaaatgggttagtcattgttgatgaggcttatatagatttctgcggtgggtctactgcaccactagtcaccaagtacccaaacttagtaactctacaaacactatccaaatcgtttggtctagccggcattagattgggtatgacatatgcttcaaaggatttagccaagattttgaatgcaatgaaggcaccttacaatatctcttctctggcttctgaatatgctttaaaagccgttcaggaccataatctaacaaaaatggaagacaccgccagatcgattaacgaagagaagatgcgtctcttaaaagcgttaactgctttggaatatgtcgatgaccaatacgtgggtgggttggatgcaaatttcatcctactacgaatcaacggtggtgacaacactttagcaaagaaactatactatcaattggccactcagtcgggcgttgttgttagatttaggggtaatgaattgggctgtactggatgtctaagaatcaccgttggtacccatgatgaaaatacacaattaataaacaattttaaagagactctgtataagttggccaacaacaattag

SEQ ID NO: 3003 - DNA, 4422 bp, Saccharomyces pastorianus
atgtcctcgttacaagatgaagtgtcaacagagacctcggaagacttcggtttcaaatttctaggccaaaaacaaattctacctccctttaacgaaaaaccaccgtttgcatctttacaaaacctcgctatttccaacagcaaatcattatttattgctgcttccggaaacaaagtggtgattggggagctgcaaatgctaaaagaccacatcacatccgattctaaccctattccattggtgttcaaatgggaaaatgaagtcgtggatgtaatatttgtatgtttcaatggcggccagggtttaatagcaaccagagatacattatattcgataaacttggaaaaattgggagaactgcaaacagttttctcttttgagacaccaatttgccaactaaaggatttcgataacaccctgatatatctaagtacaaacaacaatttatcaacgctggatctaaaaacaaaatcaacaaaccaattagcccaaaatgttgcttcttttgaccttgcaaactcacaattgctagttctactaaaggatagaagtttccgaaacttttcgctgcaaaaaggtacgccggagaaaacattcgagttttcaataccgtcggaattggacgagttctctgtcgatgaatacgctcctttaaatgttactatactctccaaacagatataccttgtcgtgttcggtaatcccgtttcagagaccgatgaggaagcatcgtacgatcaaaagatgttcattatcaagtataccgatggaaacgcttcgtttcaagaaacttttgatattataccaccgtttggtcagattttaagacttccatatgtttacaatgtcaccttgccagatttaatcaaaccagctgaaaacgtgaatatactagcatcatcatgttcaagtgaagtaagtatatgggattcaaatgatgttatcgaaccctctcaggacgctgaacgagccgtacttccgatcagtgaggaaacggatatggacacaaatccaattggtgtggctgttgatataacctcctcgggtaccatttcagaaccttgtcccagtgttgataccatagagaggttaccacttgtttacatcttaaataacgaaggtaacttacagatcgtaggattattccatgttgcctcaatcaagaatggtaactataacataaaattggaatctgaaggaagtgagatgccagcctcaggctctaaccttccatttacggcacctttgaccttagaaagaaataatacggtagaacaagaacaagaaaaagaacaagaaaaagaacaaagtacatcctctccatctgataatccgttcatatcaccaaatacctcaggctttagcttcctcaaaaaggagcaacccagcacttccaacagcttgaaatcgcaaaatgcatcagccttcagcgcctcctcgtttggatcatcgggattttccttcagttcattatcaaacccatctgttgattctggtactgcatctaatgaacaaagtgccaccggcactgctttcgggaagccggcgtttggtaagcctgctttcggaactttcactaaagaaccatccattcctgcatctgcctttggtaagccttcttttggttcagccgcatttggttctgaagttacggctgccgaaccttcagcttctgcacctgccttcggtaaaccttcttttggtaaacctgcatttggggctgtagcttcagagtcgtctacttctgaatctgcttttggcaaatcttctttcggtacacctgcatttggaactaccgccaatgagccatcaacatctgtatctacgtttggaaagcctaccttcagttcatcaccctttgcatctattactaaagaattttttgactcaggttctgccgccgcaaaacctgcagttagtgcattgtgtgcgttttcttctaagaagaatacagaaccctcttcgacactatttggtgttgatcctaacacgtctaagcaaacaaataccaatgccttcagttttggaaactctacccttgggccttctggtttttcaaacgctttgaattcagtggacactggtaccaataccataagctttggaaccccggctttcgggtcctctggcgtctcaaatttttcgaacactgatacccatatcaattttggtactcagtcttcgccattttcttctcaactgggcaagacttcaccattcagttccctcgcaaaaaacagtactgaagtcgaaacaatagaaaagggctccgctagcgaagttgatgacgaaaacgataatgagtacgatgatgagcatgataatgaagacgatgattcaagcataagcgataatgacctaacggacactactgtagaacaaacgcctagtagattagctgaactaacctcgaataccaataatggagttgtggaagatgatagacccgaatcctccattggtagactcactgaaacaataaaaaagagtgctaatatcaatataaacgatttggagaaccctgtttttgagaataatgtaaaagcaaaatccgaatcacctttctcagctttcacgactaatatcaaaaaacccagctccaccactcccgctttttccttcgggaactccactctaaacaacaatagcatgtttatggcaccaagtgcttctaaagaggtaccttcgtcatcaaaagaaggaactaataatagcgaaagccgtgagaaagaagcgctaacctcgaaggatcaaaatacaagagaagaaaatccttttttgcctaaaggaaaagagaatgataaggaaacttctgaagaagagagcagtcaagaagaaagcgacgctagttctgaatcaaatggtgtgaattccgagaacaccccggaacaagtctttagcacttataaccaacagaaggacgagcggaagaatgtaataccgcaagatgagaacattattgaaaagcttgaaacgggatctaaagatagcaagcatgttgctaaatatggtgacaaccccaaatcaacagatgaagcatcagatactgatgaaaatatcgatcaagagacacaagaaggagaacaagaggacggccatggctcagaagaggagtttgagccaaatagggcagtaaaagaatttcaagaccacaattttgaagaagatgctgtgagcgaacaagatgcatatcaaaacaatgaaacagaagattctggtgaggataacccatcaactagtgatcgggaagaaagtatttctgaatcctacgacaagctagaagatataaataccgatgaattcccttgtggtggagaagctccaccagtaaatgatgaggaacattctgctgattctaatgtacaaacttcacttgaaaagaattacgtcgagtctggtatacaaacagatctttctgaaagttcccaggagaatgaagttcagacagctgtcgtacctgtaaagcaccattatacccaaactgtcgaaaaggaagtagttgacaatgatattcaaactgaacctgttgagacaagcaatttttcggtacaagcgtttgaaggtgatgagaactatttagccgaacaatacaaaccaaaaccattgattgaatactacactggtgcgaaagtatccaatattccctttctttcacaaaattccaccttgcggttgattgaaagcacgtttcaaatggtcgaggctgaattttctgttcttaaagaaaatatccaaaatatggacagtttttttattgaccaatcaagcacccagcttgaaacacgtacaatacattctgtcaataacatgtacacctggagaataccagaggcagaactgttgtcgaacatccttaatgatgttaagtcagaacatatgcaagtaacgagcgctaacgttaagaaattggaagaaaaagcgtcgagttacattgaaaaagatatcgcaagtgtaaatgacgatcttatggatgcaaaagagcagttcttgtttttatctcatttcaatgaggcctcgagtgaattcgttaaagatctcagtacgcaccaatttaagatgcaaacagcactacgtcagaaattatccaaggtttctgccgaaatcaatcatgttgaagaaatgttgaacattttaaaattattttctgtaaaaaacaagaggttggatgaaaatccattagtggcgaagctcgctaaggaatctttcacacgtggtggattattgcaggaaataaagtctttgcgagatgaagtaagtaggttgcaattgaaggatgaaagtaaagaaactacatcattggagtcatcttcttctttgactaaagacataaatggatccaaagtcgtagaagttgggttgactttgaatacgaagaaacaaattggcggctttttaaagaacctaaacctgggtaaatattag

SEQ ID NO: 3004 - DNA, 1134 bp, Saccharomyces pastorianus
atgtcattttctttcggctttacttctaatgattttgatgatgatgaactagtagtccaacctgacgcctcatttgaaccagtacaaaaaaatggaaaaaacgacactcaccccaatccattggattctgggtttttgttgcagcccaatgttgtccagccaaaagtggaaaatctagaaacgttgttacaaggtctcaaggatgtcagattaacttttgaagagtttcaatctccattatataaaatgccattaattagaagagaattatttgacgtcaaacaccaattgatgttagaaacggatactgattccagcaataactcaacggagctggatattttacttggtgatacttctgaagatttgagaaagaacgtttatgaagggggtctgaaatcatgggaatgttcttatgatttagttgatttgatatctgagaagattgacaaaacaataaacaatattgacgcagtcctagaaataggctgtgggaccgcactaccctcagaatttctgttcaaatcagctcttctacgagatgacacatccaacaatttaaagttcattttgtccgattataacgctagtgtattgagattagttactataccgaatttaattataacatgggccaaaacagttttgacaaatgaagaatggagcgctttgcaaaagggcgaaagcgaagacatcccagtaagtagcgaagaattgctcctgtcatccaacctgttaaccgccttttatgacgacgtccaaagaagaaacatcaccattgttcttatatcgggatcgtggggacgcaaatttaacaacttgattcatgaggtgttgttggacagcaaaaaggttctattgttaacctctgaaacaatttatcaacctgataatctgcctgttatcgcagaaacaatactcgacatacacagctcaccacaaactgaagttcaaacttatgtagcagcaaaggatatttattttggtgttggtggcagcattgttgaatttgaaaattatttgaataagaaaatatcttcaggaaacttaccaatccggtctgaaaggtttaaagttaactctggtttgaaaagatcaataatatgcattgagacaaatcaagctatgtattaa

SEQ ID NO: 3005 - DNA, 2094 bp, Saccharomyces pastorianus
atggtgagctcgaaggatatcgatctattcaatctgagagagaacgagcaaatcgtgtctccttgtcttattatccacgggaaatgcaacaagcagaatggtgcgaagactgtgcaggtgcagcatcctcagttacctcctgtgacctaccccatacataaccaattcttcaaggcaacagtactgttgacgcccggcgagaacaagctgacgttcgtcacggacactaatactgctaggactattgtgtgctattacacgccgctgttgcagaaccctcccgtgcatctttgtttgatcttggctaaggactctcctgagcagttcgactctcctcgagagcaaaaggacagagagggtgggaacggtcttcaattggccatcaagaagcttagactcggggcccggctcatgcaggcctacactaacgagcagatgctcaggaacggcatgggcaaccggaccttcccctttgttgaggagtttgcctgggacacgctgttcgaccagcctgggatgagaagcaccatcaaagtgcatgtgattcgctccgagaagacggtgaaggagatccaagaccctgacgtggcccagcagaactccaagggtaagaacacgggcgccctctttggtattgccatggacgcccttaagcactatggtgggccctttaccaacaatgagaagccggttcaagcagcatgtattttcatggacacccactgggatgggaagctgatcaggggtcacgccgccttgggtggcggtgacgacagcatcaagctggctatcttcgggtcccacgggctctattcatggccaagctcccttgagcaactgttgccctacttcaccgatgagacaagggcctctgtcagcgaagtggccaatgattgtaacgagtgtggcacctactgggagtgtttgaccatcactttgggggcgttcatgcacgaaattggccacctgttgggctgcccccacgaggaaagcggtgtcatgctaagaggctataccaccttgaacaggtctttcctgactaaagaggcattctcggtaagaacaaaatccaacggtgccagcccacccattttccccaaggaggagtgcacatggcaccgtctcgatacgctgaggttcttgtaccatccctcttttacattgccacaggatttctatgatccatcgtttatgagacctacgaagcttggcgggttccccaatacaaaacattcagtttacccaatggggaatggcacctgtcgtatcttgtccccgacgagtatttatctgattgagatcatatgtgatgacttgtgcaagggtcatattgagtatttacccacctctttaggtggaccaggtcctcaacgggaagtggtggtcactttgcaagatctacgtggcagattgcccaagaacgaacttgccaaattcggtgatacttttaaactaaaaatccactctgttaacgcaccggagattgagtttgataagttcccatcattggtgaacattcagccattggacatgtccaaatacgggtttgccaagaacgttcaaggtattaaatcaccattgtacggttgcagtgataggggcgccgatgctggagttatagcctttgatgtaagattagtcactgctgtgagaatataccacggttacgcactagatggtgtaagattctatttcaaagataagcacatatcatccaaggaatctcccgttgctaaaccatctgtaccaccaagaaattacttctcaaaaattacgcagactgtcaaaaatcaaatttcaatagatgatgaacacttgaaaagtgtactgtttggacatgaaactcaaaacttcacagatgctactttagagcctggtgaaataatcactggatttaacgtaagatgtggagcttggatcgatgccattcaaatgataacaagtcatggtagaatgaccgatatgttcggtaataaaaatggtggtggtttagctgaattgcaaccaccgaatggtcaatatattttgggtgtcataggtagagtcggtcaatgggttgatgcctttgggatcgtatatggatctttggagtaa

SEQ ID NO: 3006 - DNA, 1287 bp, Saccharomyces pastorianus
atgagtgactctacggaatccaagaagcaaccaagaaggagatttattggcaaaaagtctgttggtgggaattccgataaactaaccacggttgctgaaaatggtaatgaaattgtccataagcaaaagagtagaatctccttggctaggagtatcaaccatgtgtctgatgatattttaaacgacaaagatctaaatgaagccgtcaaattattacctttcaactacaactttgaaattcacaaaactgtgtggaacatcagaaaacataatgccaagagaatagcactgcaaatgcccgaggggttacttatttactcattaattattagtgacattctagaacagttttgtggcgtagagactctagtaatgggggatgtttcctatggtgcatgttgtatcgatgattttactgcgagagcgttggactgtgattttattgtgcattatgcccattcgtgtttagtgcctattgacatcacaaagatcaaagtattatatgtgttcgttacaataaacattcaagaagaccacatcattaaaacattacagaaaaattttcccaaaggatccaggattgccacatttggtactattcaatttaatcctgcggtacatagcgtgagagataaactacttaatgatgaaaatcatatactgtacattattcctcctcaaattaagcctttgtcaaggggtgaagtgttgggttgtacctcagaaagattagataaggaacaatacgatgctatggttttcattggtgacggtagattccatttagagtcttcaatgattcataatccagaaatcccagcgtttaagtacgacccatacaatagaaagtttactagggaaggatacgaccagaagcaactggtggaaattagatcagatgctatcaatactgcccagaaggggaaggtattcggcctaattcttggtgcattaggtagacaaggtaacctgaacactgtaaacaatttggagaaaaacttgattgcggcaggtaaaaccgtggtgaagattatccttagcgaagtttttccacaaaaattggccatgtttgatcaaatcgatgtttttgttcaagttgcatgtcctagattatccatcgattgggggtatgccttcaataaaccactattaacaccatatgaggctagtgttttattgaaaagggatgttatgtttagcgaaaagtattatccaatggactactatgaagctaaagggtatggacgtggtgaaaccccgaagcatgcaattgaatattctaattag

SEQ ID NO: 3007 - DNA, 468 bp, Saccharomyces pastorianus
atggatagagcaagagcactgcacggttacaggggactcataagagcgatcctcaaatacgaaaggccgagcaatgtggccaattgggagactttgcgaaagacaatgattacgaaattggagtatttcaagaagcaaaatccgaaaatctcacacgaggataccgacaagcaactagcaagctggaagaaactagaccctgtgaatgacagatctttgaacttgtatgtatccgactctaaacagctgcgttctatactacaaaacgatataaagtgggatgagaaaatcgcccagggccagaatgttgacgagatgttcgagcacactttcgacattatcagattcttggacaaccaaagagagtaccaagaactggtggataggtacaaccccggcaacaagttgacgcaggacgagaaggtcaaaagaaccgcaaacatcgtcgggttggacgttccggcatag

SEQ ID NO: 3008 - DNA, 1356 bp, Saccharomyces pastorianus
atgttttatggtgccaagggccctctactaattgaacgtataggccatctactctctacaaattacggcagtagggaagaaagaagacaatgggccatccaaggcataaactatttgcaaggaatccagtacacgaattctccctatataggtcttttaataaaagagagcggattaagacttccagatcaacttaaaagccaactagtaggtaaaccgcatttttcattgcttggtggattcgatgagagtactgcgcaagacttaatttcacataattttagtaatgctatatttcaaatggagtcaaaagaggttcccttgagtaaacaataccagcacttagagaaaattactcaaatatatttattatgccggaatttcaaaggcattgaagaaattgaatataatttgaaaagcttcactaatagccacgagaataatgataacttaaaattcgcccataatgagaagacgacaatggtaaaagaccgaaataatcacgatattgctcaagaaaatcttttttcacttataaggatacaactgatgttctgcgtttcatattttttacaggaaaggtactttgactgttgcacgaaattctttctaataataaattcagaacccctgacgttgaaagtcctttcagaatatgtagacagcatggagtttatttccaaagaggagtttctaatgatgattaatatttccgtgctcatttccattccgttggacaattatgacgattttatttatttaaacgatataaagccgttcttccaaatgacaccagtcctaatcaaatgtctcgaattattgatcaatacaaactttaatcagtttttccaagtatggcatggtgaaataaatagggtttgtatggaaagcttttttctagaacctagctggtcatcttccgctgctattataatgagatgcaagatttatttcttttatttgagaatttctagaagactacagtttagttatttatcatccacattaggtattgatctggaggatattaaagaagaactaactaatctgatagtgtcgggacagctaaatttcgaaattgatgatgacgtgatacactttgaggatagctcaatcctgcaaagtattatcaacgagattggaaaaaacggcaccataatcaacaaggccataggtgagctgaaaaatgaaaacatggatttgaaagacattattcaaagtaatcccgtacaatatagttgtacaaacaatgcaataaatgctatcaataatgaaagcagtgaagatatggatatagatgaaattatcgatacaagtgatatcagcaatacagaagacggtttatttggaaactga

SEQ ID NO: 3009 - DNA, 2415 bp, Saccharomyces pastorianus
atgtcttccgatccattgaaacaagtttgcgatctaataaagggagacctatcccttgaaagggtacgagatatcaaagaacaattactgaaggagaaatctgttgtagaatatcaattgaataaagaatcagataaatattatggtgaagtcgaagaatctcttaaactactaaatttgtccaaaagctcggtcacttcaataaaacaacagattaatgaggttaacagattaggtaatgacaaccgctttgcaattaatcgttatgatatacttttccaagccacaaaactttatgaaacaatcaataccacatcttcaatatatgaccggatatgtaacttcgttgcattgatggaccatatagaaagactattggtgacagaactggcggaggatgccctagagactggctgtcctcatcttttagaaattcactttctgttaacctcagcacgagacttccaagaacaaattactgtgatggctaaagaagctactgaggatgcacaacgtacagtcatgaagctgttttcgagactttctggaataatatctaagtttgataagttgctggatggactgacttatgatattgtagaaatggccagggcaggacaaatatcgttagcaatccgcctttttaaaatatacgacctagaagagagagaagacttgagaattgaagccattagaaacattatcaagaaaaaagaaatcgaaattgaaaaatctatgataaaaaaacttccaaatagtaaaaacactgcaagattacaagaggagaaacctacaattatagaatatccgacaaataagggattatatcaagaaataatgagcgggacaatttcgacaaggactgctgctcgcggttacaagcactttttgatgaatggtataaataattcgatttctgaaatgttcggagaaatgaaagagaaatatgttggcgatcaaaaatttgatgtccttgacaacatggactgggtttttaacgaattgattattgtaaaagaacatattgccaattgttgtccaccacattggaacatattcgatgtatactttaaccagtactataaggaattacattctttaattacagaccttgtggagtccgaaccagaaaccattatcatcctcgacattttggattttgataagacgtttcaaaacaccctcaagactgattttggtttcaccaagaacgacatcaaatctgttattggtgatgaagaaaaagaaacattattcaaggattatttgaacttgattgttgttaagatgactgaatggatcggtaacttggagaaagcagaatttgacgtgttcttggaaagaagcaccccaccacactccgattcagatggattgcttttccttgatgggaccaagacttgtttccaaatgtttacacaacaagtggaagtagcagcaggtagtaagcaggctaaaattcttgttggtgtggttgaaagattcagtaatttattaacgaagagacagaaaaattggactgtcaagataagtggagaaataaaaaaacaaatcaattacaatcacaaatatgatatagacccggagggtataactccggaagatgagtgtgcaggaggcttagtggagtatctgattgcagtatcaaacgatcaaatgaaagctgcggactacgccgttgccatttcatctaaatacggtaaacttgtttctaaagtttacgaaaagcaaattacaaatcacctagagggcactttagatggatttgccgaagttgctcaatgcagttctttaggcttgatcacattaatgttcgatgatttgagaaagccataccaagaaattttcagtaagaattggtatgtggggagccaagcacaacagatagcagacacactcgatgagtatttattggacattaaaccacaaatgagctctgtgttatttgtcaatttcatagataatgttattggtgaaacgatcacaaaattcttgagtgcgttatcatttgagcattctttcaaaagtaaaaacaataaatttttggaagcaatgaagagggatttcgaaatattttatcaactatttgttaaagttctggatgctaatgagagcaaagatgttttgatcacacaaaattttactgtgatggagtttttcatggatctaagctgtgaaccagtagataacatattggatatttggcagaaataccttgaagtatattgggattcacgtatagatttgcttgtaggaatactaaagtgcagaaaggacgtaggtagctcagaaagaaaaaagatcgttcaaaaagccacagaaatgttacaagaataccgtcgcaatatggaagtcaatggtgtggatcgggaaccaactttgatgagacggtttgcgttggaattcgagaattaa

SEQ ID NO: 3010 - DNA, 1872 bp, Saccharomyces pastorianus
atgacttctgaatcacactacagtgccaagtcggctgcctctgccaatgcctttgttgccggtgctgcgaatgaaaatacgaaggcaggtgcaaacgcaaacgcaaacgctgctccaaagaaaaaagtctactctcaggcaaaaggcatttccatacgaatcgataatctccctccgggcaagacgtgggcccaagtcaagtacctgattggtggggtcatataccatacttacatcctgcaggtgaaaatgctgcccccaatgacttccatgatccctcccttcgtcactttccagagctgcattgtcattctgaaaagctccatagacaaagagtccctggaaaacctgctgctcactttgaacacctatcaatgggactatcacgacttgtttgtgtatctcttgccgtacgcaaacgattccatgccgctgcgatattcagaagcgagtgataacgatctcgatagcgccaatgaggacatgaacagatcggtatcaccccggttcaaaaatcacgtctcatccgtcactccgcaaccattcgattccgccccgtcttctcagtatttcaatttctcacccgaactgggcctgcagatgaatgaaaatggtacgcctcttcccacgccaatgtcggtgcccgttagtgtgctaccacccccacctcatggccccttcccaacctcaatgctgcccatcttgggcgctccgccaggtgcccttccaaatatgcaaatgccctaccaagccacactgcctccatcaactgctgctgcttctggcccattgggctctccctcgcactatcctcgacgtcggcatttctaccaccagaaccaaagccagtttcaaaaatacatgcaaaataactccagaaatttgggaactggcacaggcccccaccccccacatcagcaccatctctcctcaagaaacaacaagataaacccatcctataatgaaatatctgcgctatacaacttgaacatggcatcgaatcccagtaccattaccggttctaacgcaaatacgaatggcgaagaccgtgttcttgaaattgaaggcggtggagcgattccgtcgtcacagactcaaatcaaccataaaagactaaagcacatcttcaatgagaaaagcttcagaaagcaaatgaccaatagaggtatgtggcagttgaaaatcttggacttcccacctttcatacctatagaactggtggagaggatatctgattcagcctttactgaattgttggatcaagggaaatacactgttattgagatcagggaaaagggccaattagagaaatttgggagactaagatggactgttctaaaagattttattaagctaaaatgcccgaagctactgcagttgcaagaaaggcaatttctgcaacaacagcggaacgacgtttctttgctcaatgagtcgatagacgcattgaagatatcagaaaatgagaacgccggtaagaatatgaataacggtacatacgcgaatggcgggtctcggtcatcgataaataacacaagagagttttacgtgggggtttatgaggaccatgaagagtcaactctgttaaaattcgaactaccgaacgacgagttggtggaatttaacaaacacgtgcagaatatctcaacgctgggtgaagacacttctgagttggaagataacaaccatgccaaatacttcagggtcagcgcaattgtgcacaacgcgatcgtcgggttccacgataaggaactgtccgacttgacattcgaatccttgcaagatcaagaatactcattgggatataagattcatgtaatggaactgccgccatttgacgaggatgatttcgaggatcagcagcaatactag

SEQ ID NO: 3011 - DNA, 3198 bp, Saccharomyces pastorianus
atgtctgccagaaaacgcaagtttaacagtctcaaaccgctagacactttgaatagccctcgcgctcgatctccaaggccctctgcttctttgccccccaagcggtacaacactttccgtaaagatcccaagatagtcgatcatcttaataatgcctccaccaaggatttcttacccattctacacaccagcactgaaaacaggaggcaggtcgaactgtccgacaacgacgaaggtaacagtgggccttcagaccgggagttcgagcctttggaaagctctcccttgaaaaggcactcggcgctcaaaagcacttcgaatggtcttttatttcagatgtcaaatagtattaatgacgccgccgcagcagcagcaacaacaacagcaacaacaacaatcctttctgaaagtgactccattgtttctacaaaactaaacctaaacggccagttttcttgtattgattcgaatacatttcaaatctaccggcataaatctccatgcataatgactttcatttcggatcataaccatcccagattttctttatatttccaacaattgctcatcaagaactcacagatcaaccttcttgaagatacgaagttgatcattctagatcaaaaaaactctttaatggctgtgattctaaaggattcaaaaaaaattaatatgacattgaatgtaaataattcttcagtcaatatcaacacgagagtcttgatatggtccaacactagctccaattcgaataaaagaataaaatccattaagaggtttttgttagcgtcttatgcctcgacaataaacgttcaaattttagataataaagaacagattctagaacggctaaatggtttagcgcactcgacctcttcatctccaccgccttctccgccttcatcaaacatggaaagggcaatcaattccaccaaaagtgcattcgattcgctaaggctcaaaaaacccaaattctcgaacaatgatgatgaccatccgcagactcacacgcgtttcttatcgaacaaaccccatggtttacaatccctaacaaaacgggcgcgtgtcacgaatgttgctagcaaagatcattccatatctataccaaaatcgaatatttcgcccctagatttttacaacagtggttcagcgaatacgttgcaatcacatacggtttctcaattaagacgatctaatagaattaaagatgttttgcagtcggactcaaattcaaactcaaacacagaaatcgacgatactattgcagaatttgaaactccagagccatttaagcctaatctttgctataagttcaatgatggttcaagttacactataacaaaccaagatttcaagtgtcttttcaacaatgactggatcaatgatagtatcttggatttcttcactaaactttacattgaatcgtccatagaaaattcaatcatcaagcgagaacaagtttatttaatgtcttcttttttttacacgaaactagtaagtaatccagcagattattattccaacgtgaaaaaatgggttaataataccgatctgttttctaaaaaatatgttgtcattccaattaatataagttgtcattggttcagttgcattgtgactaatttggacgcgatcttagatttccatcaaaataaagataaaaacgaagccatcaattcggacgaaatttcgatcaataacccactggttaatatcctgactttcgattctttaagacaaacccattcaagagaaattgatccaataaaggaatttcttatatcatatgcatttgataaatactcaattcaattagataaaactcaaatcaagatgaaaacctgcccagtcccacaacaacccaatatgagtgattgtggtgtgcatgttattttgaatatcaaaaaatttttcgagaaccctatggaaacaattgacatctggaaaaattcaaagattaaaagcaaacatttcaccgcaaaactaatcaacaaatactttaataaaagtgaaagaggtaatgcaaggaaagacttgagacatactctaaagctgttgcaattgaactacataggatatttgaaacgtgagaacctgtatgatgaaactatgaaaaatgaggagaaaaaatcctctaataccgataatgatgacgatgacgatgaagaaattcaaattattgagaatataaatcagcaatccagtaaggaaaataacgctcagttaacatcaaaagctcccagtcccgaggctacccaatcaccgccaccgggtgtaaacaatcccaccactaaaacggaagcgacgaatctgacaagatcggaaaatgtagttgaccaggaaatggaaccgcaatcaacaggcgaaataatatccgatggggaaggctctgtgcccgctgctagggaaaccccatcggtttctcctatcatccgccataatattctacaaagttcgtcaccttcgatgcctgaaagtgcaagtaaagcggaacaagaagagtttacatcaccctactttggaaggccttctttaaagacaagagcaaagcagtttgaagggatttcgtcgccaataaggaccggtcaagctcagtcatccatccacgatgtaactataccatcgcctcgaccaaaaaggatttacccaagcaaaaaaaccccaacattgtcaccgtatattcaaaccctctccgcagattctgcggatcgtccttctgaaatttacaatggcaatattatcatctcagatacagaacaagatttggaaactggactaaatttccagaacaatgatactagtaatattactaataaggatgactcagacgtgaatctgattgtcggtttgttgccaactacttcagagaaaattgccgataatagcaatcaagatagtaatggtaataacgacagtcttggaaaaatattgcagaacgttgataaagaactaaacgaaagattggttgacattgatgacatggcatataataaacccaccggggatctttcaagagctagcaaaaggagaaaggaaccaagtccacaacttcttctggattatgaaaatgacagtagtaacgaggaagtgatggtgcacataagcgagcgaaatgataatgacagcaataatcgatccccgaatagtgttcaggatgaaagaggagagacccatatactcttagaagacgacgcttaa

SEQ ID NO: 3012 - DNA, 786 bp, Saccharomyces pastorianus
atgacaagatttattgggtgtatagatttgcataacggggaagttaaacaaattgtgggtggcacgctgactagtaaagaggaagacactccaaagacgaactttgtatcccaacatccgtcttcgtattatgccaaactttataaaaatcacgacgttcaagggtgccatgtaattaagctgggccccaacaatgacaacgctgcacgcgaggcccttcaggaatcaccactatttttacaagtaggtggggggattaacgatacaaactgcttggaatggttacagtgggctagtaaagtaattgtcaccagttggctctttaccaaagagggcagtttccaattgaagcggttgaaaacgatggcaaaactatgtggcaaagaccgtattgttgtagatttaagttgtaggaagacgcaagatgggcgttggattgtcgcgatgaacaagtggcagaccttgactgacctcgagcttaacgcggaaacgtttcgagaactaaaagagtacacaaatgagtttctgattcacgccgccgatgttgaaggtttgtgcggtggtattgatgagcaactggtatctaaattatatgaatggaccaagaattacgacgacttgaaaattgtttatgccggcggagccaaaagcattgatgatttgagattggttgatgaattaagccacggtaaagtcgatttgacgtttggtagttccttggatatatttggtgggaacttggtcaaattcgaagactgctgtaaatggaatggagtgcaaaattag

SEQ ID NO: 3013 - DNA, 753 bp, Saccharomyces pastorianus
atgtcccaagaagaaaaagtcacttccaacacaacctcaagggctgagacgtcgaacaataaaaaaagcaacaaacaagaacttgaggtagatgagctcgtagggaaactgtctattgaaggtgccccccaggtctcacaaaagttaagcaaagaagagaaacacgcttatcaacttgaagctgattcccgttccatcttcgtaggcaacattacgctagatgttaccccggaacaaatagaagagctcttccaagattgtggtataataaaaaggataacactactctacgataggaatacgggtgcaccaaaaggttacggatatattgagttcgaaagtccagcatatcgagaaaaggctctccagttaaatggagcagaactaaagggtaaaaaaattgctgtatacagaaaaagaactaacattccaggatttaataggaactacaacacacaaaaccaatactttcaacaatggcaatggaactatcctttaatggcctatccgaatcccgacacattcccttattatccacagtatcctccaaaccaatctcctaatcagaattttggatataataagaatggatattatagaggcctatataccaataaaaacagaaatcatcaaaaaaagaataccagtagtgcaaaagattcttataagattagcagaccttcttcccaaaaatccgtcattattccaatgggtaatagtaaaaatatctcccgggatgaagttccagaatga

SEQ ID NO: 3014 - DNA, 1299 bp, Saccharomyces pastorianus
atgatggagccccaagaagagtttattaccaccgaagaagttgagcaagagattgtgccctctgtggaggcggaacaggacgctcctatggacattgaagaggagagtgacgatgatgcgatgggtaacgaagatgaggaggacaatttggaggtcgatatgtccaacaactcgcacacatacttcgacaagcacacggactctgtgttttctattggccaccatcccagcctgccgctagtctgcaccggtgggggtgacaatctggcacatctttggacatcgcactcacaaccaccaaaatttgccggtacgttgaccagttacggtgaatcggtgatctcgtgttcgttcacttgtgaggggagtttcttagtcactgctgatatgtccgggaaagttctcgtgcacatgagccaaaaaggcggcgcacaatggaaactagcgtcacaaatgcaggaagtcgaagagattgtttggttgaaagcccaccctaccatagcaagaacgtttgcattcggtgctacggatgggtccgtttggtgctaccaaatcaacgaacaagacggttctttggaacagttgatgtctggtttcgtacaccaagaagattgctccatgggtgagtttattaatattgacaagggtgaaaacaccttagagttagtaacttgttccttggatagcatcattgttgcatggaactgtttcactggacaacaattgttcaagatcacacaggcggagatcaaagggctgaatgctccatggatttccttatcattggcccccaccacattaaccaagggtaactcgggcgttgtagcatgtgggtccaataatggtcttttggcggtgatcaactgtaatagtaacggtgccgttttacaattgtccacagtgattgaattgaagccagaacaggacgaattagacgcctctatcgaatccattacatggtcgtcaaaattctcgctaatggccattggtcttgtctgcggtgaaattcttctatatgatacaagctcgtggagagtaagacacaaatttatcctggatgactctgttacaaaactaatgtttgacaacgatgatttatttgtgtcatctattaacggtaaagtctaccagttcaacgcaaggaccggtcaagaaaaattcgcctgtgtgggacatggtatgggggttcttgattttatagtattacatcctgctgccgacgccggtgctgaagaaaagaggaaaataataactgcaggtgatgagggtgtatcgttggtgtttgaagtgccaaactga

SEQ ID NO: 3015 - DNA, 432 bp, Saccharomyces pastorianus
atgggtaagaaagcgcaaacaggaaaggcgaagccaaagatcgacgacaatggcgttttgatagtgccaccaccgagaaccattgcgaaccaggatcatttccacagactcaactacctctaccaactatccgcgtaccagacaaagccgagagcgggcgccgtaaaggggcacacgcccttggcgcgcaactacatcaagtcgatggacttgatcagcaaaaagaccaagacctcgctgctgcccacactaaaaagaaccatctgcaaaagatgccatcggctgttatgggcgcccaagcggctggagatcacgcgcgacggcgcgctcgcggtggtgtgcgggtgcggcgccgtgaaacgctacaacgtcgcggccgacgccgactacaagacgtactccgagcgggagggtaacctcatcaacccgtag

SEQ ID NO: 3016 - DNA, 1089 bp, Saccharomyces pastorianus
atgacagaaaacgcagcaccaattgaggaagaagtcgttaggatactggggggtatataccttggtgggatccgccccattgtcgaccacagaccattaggtgcagacttcaacatcactcatatcctttccgttacaaggttccaagtaattcctgagtacctgataaggaagggctacacgctaaagaatatacccatcgatgacgacgacgtgacggacgtgctacagtattttgacgagactaaccgattcatcgatcaatgtttgtttccgaatgaaatcgagtattcgcccaagttagtagactttaaaaagaagccacagcgtggtgccgttttcgctcattgtcaagcagggatttcgaggtccgtgactttcatagtagcgtacctgatgtaccgttacgggttgaaactatcgatggccctgcatgctgttaagcggaagaaggcaaacgtggagccaaatgaaaattttatggaacaattagaactgttcgagcacatgggtggggatttcgttgatttcgacaatcctgcctataagcaatggaaattgaagcagtctatcaagttggacccatccggtaatgaattggtatccaacgctgatatgttcaaagactcagaatcatctcaagacctagataaattgactgaagctgagaaaagcaaagtcaccgctgtgagatgtaagaactgcagaaccaaattggcactatccacatctttcattgcgcacgatccgccgagtaaggaatcatcagagggacatttcattaagagagcagccaattctcaccgtattatcgatattcaagaatcacaagcaaactgttcgcatttcttcattgaaccgttaaagtggatgcaacctgaattgcagggcaaacaagagttagaaggtaaattttcgtgtccaggctgttctaggaaagtaggtgggtataattggaagggctctaggtgcagttgtggtaaatgggtcattcctgctatccacttgcaaactagtaaagtagatcaatttcccctgcagtccactgtcttgcctaacatggttaattttgaatccgaaaaaaaataa

SEQ ID NO: 3017 - DNA, 738 bp, Saccharomyces pastorianus
atgacagaagcaaatatacttgttgtcaatcctaatagttcgaaatcaatgacggcttccttacaggaagccatcgaaaagacatttccaagaaaatcgtataaggtcagctattttacagggccggatacttccccatcacagattgacggttgggagacaagcatgcagagtatggaggcctgtcttcctctcctggttggcgacaaaggatcaaaatataactatcggaagtttgatggggtattaattgcctgtttctctgatcatcctttggtaaccaagataaaggatgcggcggctgtagaaaaatccgatactccgattgttggtttgttagatagcagtatccagtattgcaatttgatcggaaagaagttttccatcattacctcaaataaagagtggatccccatattgaatgactctgtagaatcaaaatttttgactggaaacacaatcaatcgaaatctgtggaaggggacggtgtcaactgatttacaagtgctcgatctgcatagtccggagaatttccagcaaattgcagatgttataggaagggaaaatattgaaaagcttggttccgagattgtaatattaggttgcgcagggttttcaggattacaaattaaactagcaaaacgttttgagaaggacggtatatttttcttggataccattggaataggcttagaaattttgatcacaatgataaagtttatcaactctcaaaaataa

SEQ ID NO: 3018 - DNA, 792 bp, Saccharomyces pastorianus
atgggcaaagtcattttagttactggtgtgtcccgtgggataggcctgcaattggtgaagactatgttcgaaagggacgccggatgcgtcatatacggtgtagcaagaacagaggctagtctgcaagccttgcagaaggagtatggcgcagacaggttcctgtaccgcgcctgtgatatcacagacaggtctcaagtgcaggctctggtggaagagatccggagcaagcacggccggttagacagcgtcatcgcgaatgccggaatactggaaccggtgaaggccgttacgcagtccagcaccgagcacgacatggagcggtggaaacggctgttcgatgtgaacttcttcagcgtcgtggccctggtgacgttgtgcctgccgctgttgaagacctcgccgctcgtgggcaacatcgtctttgttggctctggagccagtgtgaagccatacaacgggtggtccgcatacggctgttccaaggctgcactgaaccactttaccatggacatcgccagcgaggagcccagcgaccaagttcgcagcatctgcgttgcgccgggcgtcgtggacacgcaaatgcaaagggacatcagggaaaccctgggcccacagggcatgtcgcccgagggcctggagaggttcacccggttgtacaagacctcgtcgctgctggaccctgtggtgcctgcggcagtgctggcccagctagccctggaaggaatttccgatgctctgaacggccagtatctccgctacaacgacgaccgattgggccctgtacaagcctag

SEQ ID NO: 3019 - DNA, 708 bp, Saccharomyces pastorianus
atgatgtcgttgcctattatcagagttcattggttggaccaatccagagcattcagactcttgtggttattagaccatctaaaacttgaatacgaaatcgttccttataagagagatgcaaactttcgtgctcctccagaattaaagaaaatccatccattagggagatcaccattgttggaggttgaagacagggaaactggtaagaaaaaggtgcttgccgagtccggtttcattttccagtacgttttgcagcatttcgaccactctcacgttttaatgagcggagattctgatattgccgatcaagtcaattactatttgttttacggtgaaggttcgttgcagccacctttgatgatcgagttcgttctgtcaaaggtcaaggattccggtatgcctttccctatttcatacttggcaggaaaggtggcagacaagattagccaggcctattctggcggtgagttgaagaatcaactagactttctagagggtgaaatcaaaaagaacaacggctacttggccgacggaaaactgagcggtgctgatattctaatttctttccccttgcaaatggcatttgagagaaagtttgccaaagctgaggactatcccgttattgcaaagtggctggaaaccataacatcagaggactcgtatgccgtttccaaggagaaggctcgcgctttaggcagcaagttctaa

SEQ ID NO: 3020 - DNA, 987 bp, Saccharomyces pastorianus
atgagtagtaggatattattgtctggtttggtaggattaggtgccggtacgggcttaacataccttcttttaaacaaacgttctccagggcaaattgttgaaacaccgttcccggtcaccgaaaagccaaatggtaaggtccaacctcattcattcaacatcaatcctgccggattcttcaagtatggatttccgggccccattcatgatctacaaaaccgcgaagaattcatttcgtgctacaacagacaaactcaaaatccatattgggtcttagaacatatcactccagaatccttagctgcaaggaacgctgacagaaagaactcctttttcagagaagatgaaatcattccagaaaaatttagaggtaaattgaaagactattttaggtcagggtacgatcgtggccatcaagcgccagctgctgacgcaaaattttctcagcaagctatggatgacactttttatttatctaatatgtgtcctcaagtaggagctggcttcaatagggactactgggcgcatttggagtatttttgcaggggattgaccaagaactatcggagtgtaagaatcgttacgggcccgttatatctgccaaaaaaagatcctgttgagaacaaatttaaagtcagttatgaagtgattggcaacccacccagcattgctgttccaacgcatttttttaaattaattgttgccgagtcaccaacaaacaatcctactagagacgatattgctgtcgctgcgtttgtattaccaaacgaaccgatatccaatgaaacaaaattgactgattttgaagttcctctagacgcgcttgaaagaagcactgggttagaatttttgcagaatgtaccattgccaaagaaaaaggcgttatgcgaagaagtgaattgtcaaatcgtggtgagagacttttcgaacgctgcgatcaaacaatcaaatggtgtgaaattattgcctcctccaaagaagagctga

SEQ ID NO: 3021 - DNA, 2661 bp, Saccharomyces pastorianus
atgagattttcacatttcttgaaatataacgctgtgccggaatggcagagccattatatggactacagtgacctgaaaaaccttatttatacactgcagacagatgagcttcaagctggtgataacgaagacgggttatctggggctggtaagagccccaccattgctggtaggttcaaaaataagttctcgttcaaaaatggcaaggaggatgctccctccggcatcaacaaagatgcgggcatcgtagaggaaaccatcgaactgcgggagctgcccaaggtgcccacgagtggtgccaaatcttcgggacccttcaggaggatgaaggagaagatattcgacaagagaaggtcttcctctgtgtcctctgcctcttccaccactaacgaaacgccggaattggacacctaccacacgttcgttactgatttaacaggggagaagctaaaagtggacgatttctataagaggactgaagcaaagttctacgagaaatttgacgccttggtgaaggacctgaagaaaatcggcgtgatagaatatgatgtcgacgaagacactctcttcagcgaaccggccgcaaacggaaacgcaaacgaagagctttctccacaggacctggatgacgatgaagaagacgacgacgagttctacgataaccaatccaacaccgaggacaacactgcattgttgcaccattcgcaatataacatcaagtctcagaagagatctctgttgaagaagtccatcgtgaacctgtacatcgatctgtgccaactgaagtcgttcatcgagttgaaccgtattgggtttgctaaaatcaccaagaaatcagacaaggttcttcgtttgaacacaagggtggagctaatcgaatctgagcagttcttcaaagatgcgtacgcattccaagcagacactcttgcaacattgaactccaagatatctgaactggttactttctatgccgccatcacggatcaaccccacaacattcctcacagcaagcaagaactgaagtcctacttgcacgaccacatcgtttgggaaagaagtaatacctggaaggacatgttgggcctactgtctcaaacggacgaattgacgccgaaagaaaaggagtacaacgcaatcaagctggtgggcaagctggatctggaatactacagatggccgctccctaaaccgataaacctgaaatttaccaccataaacaacttcacaatacctaaattatttttcaccaggaaagcgtacaaaatttacttcatcatcctggttacgggacttctcttgggtataaagaccttcaatgaccctgctcaacaccgttgtatggcccttgtcgagtgtgttgctttcctgtgggctagtgaagccatcccactacacatcactgcattcctcgtgccactactggcggttcttttcaaggtcttaaagacctccgacggctctatcatgggtgctgctagcgcgtcatccgaaattctggctgccatgtggtcctctactattatgattttgttggccggtttcactctgggtgaagttcttgcacaatataatatcgccaaagttctcgcctcatggttattggcctttgccggctgtaaaccaagaaatgttcttctcatggcaatgtgtgttgtgttcttcttatcaatgtggatttccaacgtcgctgccccagttcttacgtactcattgctatcgcccttgttggacactatggatgccgatagcccattcgcccaggcattggtcctaggtgtagcattaggtgctaacattggtggtatggcttctccaatttcgtcaccacagaatatcatctccatggcatacttgaaaccctacggtattggctggggtcaattcttcgctgttgcgttgccatcgggaatattagccatgcttttggcttggatcttactgtttacgtctttcaaaatgaataagaccaaattggaaaagtttgagccgataaggacaaaattcaccattaaacaatactacattatcgctgtcaccgtcgctaccatcctgctatggtgtgtggaaagccagattgaaggcgcgtttggatcttcaggtcaaattgccatcatcccgattgttttgttttttggtactgggttactatccacacaagatttgaatgctttcccatggtcaattgtcattttagcaatgggaggcattgctttggggaaagccgtctcatcgtcagggttattgtctactattgcaagagcattacaaaagaaaattgagaatgatggtgtttttgcaattttatgtatttttggtatcttgatgttagtcgtgggtacctttgtttcacatacagtctccgctatcatcatcattccattagtaaaagaagtcggagataagcttgataatcccaaggctgcccctatcctggtctttggctgtgcattattgtcatcttgcggtatggggttagcgtcttccggattccctaacgttaccgccatttctaaagtggataggaagggtgaccgatatttaagtgtcatgacgttcttgacaagaggtgtcccagcttcaattttggccttcctgtgtattattacgcttggttatggtatcatggcatctgtccttaagggtaccgctacctctggataa

SEQ ID NO: 3022 - DNA, 1542 bp, Saccharomyces pastorianus
atgtcagttatgcccataaccccaacgaagcgcattaggagaactctgtttgacgatgtcccagcaacacctccaaggcctctgaagaagaagagattgctcttcacaagtatcacacctgagtcctctccagaaaaactacagttcggtcctcaatctatcttcctaaggacgaaggcacttctgcagaaatcatcagagttggtaaccttgaataacaatggcggtgctttaccagcaagaaccaaggaatatgagcatgtgatgaaatttttgtccgaatctatctctgagcacaaatctgattcgctatacatcacagggccaccaggcaccggcaaaactgcccagatggacatgattataagacagaagttccaatcattaccactgtcactatcaatgtcaagttcggcccacccaccaaggcacacgaacccgcacttgcagaacctgtcttggtttgaattgcctgatggtagactggagtctgtggcggtgaccagtattaactgtatatcactaagcgatccgtcttccattttccaaaagatttttgattctttccaagatttgaatggccccactttgcaaatcaaaaacatgcaccaattacaaagatttttagagccttaccataagaggaccaccttcgtggtagtgctagatgaaatggatagactattgcattccaacacgaatgagactcaatcagttagaacaattcttgagttgtttcttttggcaaaattgcccaccgtgagcttcgtgctgataggtatggctaatagtctggatatgaaagatagatttctttccaggctaaacttgaatagagatctgttgccacaaacgatagttttccaaccatataccgctgagcagatgtatgacattatcattcagaaattaagcagtctacccagcatcatcttccaaccaatggcaattagatttgcagcaaagaaatgcgcaggtaacactggcgacctgaggaagctttttgatgttttaagaggaagcgttgaaatttacgagttggaaaaccgattgctgctctcgtcgatgagcaagtccatgaggtctaagcaggtaccgttaacgccaacgacatcaccagtaaagcaaccatcgtctcaatcacaaggcaaaataggtttgaactatattgccaaagtcttttccaaatttatgaacaataactcgacaagaacgagaattacaaaattgaacattcagcaaaaattaattctttgtactatcatccaatcgcttaggataaacttggacgctacaattgacgaatcgttcgatcattatatcaaagttatcactaagactgacactctagccccgttgcaaagaaatgaatttttagaaatttgtacaattttagaaacatgcggtctagtctccatcaaaaagacgaagtgtaaggggaaaaccaaaagatttgtagataagattgatgtggatctcgatatgcgggagttttacgatgaaatgacaaaaatttcaatcttgaaacctttcctacgctag

SEQ ID NO: 3023 - DNA, 702 bp, Saccharomyces pastorianus
atgttttcccggattgttcttctgttatgcgtactcggatctgtaattaatgctacagtcacaggaaccattaagggcaggttagatttagcagcaaataatatcaccggctttgttttaacaagaacaagttttaaactctatcagatcggtaatttctcaacggaatacccttacacagctactactacctttcaagatgatgaaggtaattttgagtttgtaaacgttcccctaaaccaaggtgttaatgcaaccacatattatgttatgtatccagcatccatggatttcaatttgaaaccgaatagaattcttattgagttccagaacctagaaaatggcacattgcaattgaacgcattcaagaacttttttggaagggagaatttcccatcaaaggatataacgtatccagaaaaactagaatctatgattgtagacccttacattcaagtggaaattttacagaaagcaccaataaggtcgtattttcaagcaaggaatgtcagtatcttttccacaggtatagttggtagcatcttgaattcacgttggaaattggcaggtgtcattacattaatcgcccttgtcattttcccaatcatagtggaaaaactggacccagaaactgcacgagccatcaaagaggaagcaaaaagaaaacaaagagaaaagtatggagctattacttcgagttag

SEQ ID NO: 3024 - DNA, 375 bp, Saccharomyces pastorianus
atggcgttaccgatggcagagtatagtgcaccagacggtgtcaataagagttttgtgccaatacccgacgacccgaggtacttgaccacagagggcagaaccacaggccccagtgaccatgtactgaacgctggacaaattgacagagacaagccctcagaacccaagagggtacagggcggaacacaaatgacgtacttgggtcagctgcgtacgcagctgacgggtctacaggacgacatcaatgagtttttgactgaaaggatggaactagccaagaacaagaagaagaaggcggacgctgacgaaaagcggatacaggaagagatcaaccagctgctggacggtggcgacgccgaggaggaagccgattag

SEQ ID NO: 3025 - DNA, 2211 bp, Saccharomyces pastorianus
atgtcaatgaaccacagtgtaagtgcatcggaagatgaaaaagaggtacccagtgccaatgacaagggccataatactccaaagctatttgatcaggagcctgactctacgaaggaggtcttgaccaaattcgaaaacttggaagattgtatatatgcgaataagaggatcgggacatttaaaaataatgatttcatggagtgtgactgttatgaagaattctctgatggggtcaatcatgcctgtgacgaggattctgactgtatcaacaggctcacgttaatagagtgtgtgaatgacttgtgtttgacttgtggcgataactgtcaaaaccaacggttccagaaaaagcagtatgctccaatagccatattcaaaacaaagaataaaggatatggtgttcgagctgaacaggatatagaggcaaaccagttcatctacgaatataaaggtgaagtgattgaggagatggagttcagagatagattaatagactacgaccaacgtcatttcaagcatttttattttatgatgttgcaaaacggcgaattcattgatgcaacaataaagggttcattagcgagattttgtaaccactcttgtagtcccaacgcatacgtcaataaatgggtcgttaagggtaaactgcgtatgggtatttttgctcaaaggaaaatcctgagaggtgaagaaatcacttttgactataacgtggatcggtatggtgctcaggctcaaaaatgctattgtgaagaaccaaactgtattgggtttcttggtggtaagacacaaactgatgcggcgtcattattacctcaaaacatcgctgatgccttgggggttaccgtttctatggagaaaaaatggttaaaattgaaaaaattgaatggcgagccaatcattaagaatgaaaacgaaaacgtaaatattgaattcctgcaatccttggaaatcaaacctattgatgatcccatggatgtcacgaaaattatgagtgtattgctacagcaagataataaaattattgcgtccaaactattgaacaggcttttcaccattgacgacaattctttgcgccaccaagctatcaagctgcacggttatacgtgttttagtaaaatgatcaagttgtttgaccccaaacaacaacaaaagcaacaagaagatgaatttgacaatgaggaagacgaaaaaagttcaatgatcaaaaaaatcctggacttcttattagaactgcccaaaacaactaaaaatggtatcttgtcatcacaaattggtgataatataacaattttatctgcggaatgtgcagacttaaagccagaatgcgatgaactattagagaaatggtcgaagtttgaaacctataaaagaatcaccaagaaagacattaatgttgcatccagtaaaatgatagatttgagaagaattagattgcccccgggctgggaagtcattcatgaaaatggtcgtccattgtactataatgcagaacaaaaaacaaaactacactaccctcccacagggtcttcaaagacatttagttcaagatcaagaacaccagttgaagccatgagtagtggtggaattgtgaaaaccattaatgcttcagatatcaagaaacacaaactgagtgatgaagagtacgaaagaaaaaaacgcaaaagactcgaatatgaaagaaacgctttagaaagagccaaacaagaagaactagaaaatttgaaacaaaagctaaagctcgaaaatgaaaggaaaagtgtcttggaagatattatagcagaagctaacaagcaaaaggaagcacaaaaggaagaggctaaaaaattagtggaagctaaagaggccaagcgtttgaaaaggaaaacggtctcgcaatctcaacgattggagcacagctggaataaatttttcgcgtctttcgtgccaaatctaataagaaacaatccgcaaagtaagcagtttgatcatgaaaatatcaaacagtgtgctaaagatattgtgaaaatgttaaccacaaaggaattgaaaaaagatttatcgagagcaccacccgatgatttaagcaaagagaaaaagcataaggttaaagaattcataaagtcttatatggacaagataattctcaaaaagaagcaaaaaaaggcatcgatctcggcatcggcatcaattaggatgtcttctcccccaccttcaacatcatcaaactga

SEQ ID NO: 3026 - DNA, 408 bp, Saccharomyces pastorianus
atggatagagaccaccgcgacggagaccgaatgagatattccatcaacaaggacgatttgttgctgatggtgctggccgtgttcatcccaccgctggccgtatggaggaggaagggcgtattcgatagggacacgttactgaacctgctgctgtttctgctgctgttcttcccagccatcatccacgcctgctacgtggtgtatgagaccagtgacgagcgcacctccgagcggtcacgtggccgcgatctagaggcgcaccctcaggaggaactccccgaagaagctcaagcccaggctcaaggccagattcagcccccagcctacgactatggcgacgacgacgaggcccgcgctgacgtgcccctaatggataacaaacaacagctgccatccacccgtgcctag

SEQ ID NO: 3027 - DNA, 891 bp, Saccharomyces pastorianus
atggcaacgaagttcaacagtgacaatgagaagcaggttttcgataagcttaaaaaggcgcttcccgttattatcaaggaaaaatgtgaagggtatgatgaactgtatggctataagttgaattctgagggcctcactccagaagaggttgaaaaatactatgacgaaaagattgcccattgtttgcttcataaactttgtaaagcgtaccaattcgaatacgacaccattgtgcaaaacttggttgatatcttgaaatggagaaaggagttcaatccattgagttgcgcctacaaagaagttcacaacacagagctgcaaagcgttggcgttttgacattcgacgcgaatggtgagactaataagaaagccgtgacttggaacttgtacgggcagttggtcaagaagaaggagctgtttcaagacgtgaataaatttgtgcgttacagaatcggcctcatggagaagggcttgagtttgttagatttcaccagtgaggacaattcttatatgacccaggtccatgactataagggcgtttcgatgtggagaatggactcagacatcaagagctgcagcaagaccgtcattgctattttccagaaatactatccggaactgctgtacgcaaagtattttgtcaacgttcccaccgtgtttggctgggtgtatgacctcatcaagaagttcgttgacgagagcactaggaaaaagtttgtggtgttgactgacggtaagaagctaggccagtacttaaaagactgtcctcaggaagagtacggcgggaaggacaagcaaaacaacttaagcaagcaaaacatcactaacgtccacccaacggcatacggtttgtacatcttgcaaaagcaaattattgaagacgtcgagtaa

SEQ ID NO: 3028 - DNA, 1143 bp, Saccharomyces pastorianus
atgattaagaaagttgctctttgcacgttattatattcacgggggtatttacctggtgccttaactttagcgtaccaattacaaggactcttgagccagactgtagtagaggacgaaataactatatgtctattagttgcaagaacgttgttcgaagatgaatttactccccaggaaatagttttgataagaagcctcttcaaggagatcattatcatagaatcgttagagggtcaagcgaagagcgtcgaaaataacaaggcaaatcttgacttgttgaaaaggccggagctatcttttactttactaaaagccagattatgggaactggtgcagttcgatcaggtgctgtttttggatgcggatactttaccattgaacaaggagttttttaaaattctacagctatatcctgaacaaacgaggttccagatcgctgctgttcccgatatcggatggcccgatatgtttaacaccggtgtcttgctactgattccagatttggaaatggcgaagagcttgcaggattttttggtcaagactgtatcgattgacggggctgatcaaggtattttcaatcaatttttcaaccccgcatgcaattacagcaaggagatcttgcacaaaatatctccgcttatggagtggatacgacttccgttcatctataacgtaacaatgcccaattacggataccagtcctcgcctgcgatgagctttttccagcagcatatcaacctagttcatttcatcggaacgttcaaaccgtggtcacatagtgcattcaaccacgataattattattatcaattatggagggatacagagagggatctacacaacgaacaccacttgagtaattatttcacacgcttgcaactcggcaatctcgaaagggaaacagatttccatcacgaggctccctgcatcaacacgctgctaaggcaaaactcaagggagaatcaaaagcaggttagccctgatgaaacccaggtaggtcctaatgctgcacaaaatatacctatacaagaacacgatcaaaaagtgacaactgctgatactcaaagtgccttcaagtttgagtgggagaatacggactatttgcaccacgtccagagagcgttcccagactccgatatctaa

SEQ ID NO: 3029 - DNA, 2247 bp, Saccharomyces pastorianus
atgactaaatcttggctgcttgtctttatcatctgcttaagtacctcgtttgtaaaaaaattacaggctgccggtgttaccacccatctgttttatttaacaagaggtgctcccctaactttaaaggaaaactactatccttggttgaaagctggttctttcttcccagatgccctatactcgtgcgcaccatccaataaggattggtctgattttgcagaattcactcattggccaaacttcttaataatagctttgtcttattggcagcaaacgtacggtcaaaacgatcaactccgggaatcacatcgttcgctaacgctgaaatcgttcctgataggagtattcactcatcaaatagtcgacacctcttggcattcactagtttccgattatagaacgcacggtttacttcgtgttctcagcgaaactgaatttgattcggatatcgaaactgctcatacatttttagacgtaatgggtgaattcataaccttgaacaatgtgattcgtgataccgccaataacgaaaactggaattacttcacttattcagactgggaactgcctaacaaaaaagatttgacggcaatcattcagaaggcaggactttctaaggaaaaactaacatacccagaattagagttctgcgttaaaaggggcatggcggctgctgtaagtgaaagctacatatttcgctctcaaagacacaagttattaagcaatatttactcgacctcccccagagctaatgatttagtactaaaccattggttggggggagaatccaacctagtggcgatgctgcaaaaatgtgtgcctttctttgagtctttatttcatggtaaaactagtaatgaggcccaaattgaagaattgagactatgttcaaatttaccgccagtctcgcaccgagaggtagaaacttatacttcgatagctcccattgaagtgcggagagagaacaatcatatcgtcgtatcccccatgagatctttctccaagtttggcacaagcttcacattgggaaaatttttaggtgatgatgcaaattatcttgctgtaagtgccccactggaggatacgattggtgcaatctacttggttccatgggaaatagtatctatatcgagcagagaggattttagtgttttgcaaccaatcacagccatgtacggttcaaaggttggcacgtttagcataggcgatgttgattacttggttgtttcggaacctgataggtgcaagattcatttttattttaagcagacaaaaattctaactatggaggaccgcaccactgaagaagccaatcagttgcaaatagctttgacagaagactttgatggagatggaattcccgatttgataatatcaagcacaagctacggaatcaacgaaactggaattgtggcgtttatcccaggatcttcaataattccatatctgataaattcaaataaatatcaaattattgatatttcgactttaaaaggcattgtcagccttgatggatatccttttcaaaacccttttcaacactttggcgcatcagtccagttatccaacacacttaataaacaaaagttaatatacgttacgtgtcagagcttgggtaccgtgtttgtttatttgagcaatgacttacaggattcgtcaaccccaaaatattacataactagagatcgtgtaatctcagcgaataataaggatcgcgtcgatttgggcgtgattccttcaaaagagcatggcatgttcggttcagcgatacattcttggcattttggtggctacgattttgtagccatttctcaacctatgttcgatgccgtctttatatacattgagaactctggtgaagtcaaatttttcttgaagctgactttaaaagttggtacccactcaggaactattcccaatgggtttggtacttccttgttgtttagtaaagaggaaaaggcactgtatctttcatcaccaggaagttttgacgagagaggaagtatatggaaaatcgggatgaacgaactactgaaagctaacgaacattcaaagcgaaagagccttttgatcaacaacttaaagtaccttgtgctcataaaccctgacaaagatagtaaaggtgtgacagattttgggaagagcatgatttttggcccccaagaccatcttgtagtaggcatccctcaatatgggtatggaaatttggaccatatgcaattaaccggcagaatattggtactataa

SEQ ID NO: 3030 - DNA, 1071 bp, Saccharomyces pastorianus
atgctagagcttttattgagaagaggactttttcataggtcgttacctctaggaagtgtgcgttattttcactgtacaaagtactttcacaaagacaatgcatcatccactacagatatatttcgcaatgcaatgaaacgcaaacgtgaactagggggtcttagagagcaaagtcattcgaatggtgctaggaatgtcgcttttcctaaagagtatataaagcgtcaaaagcaaccgccgaggaatgctaccaagaagaaacgaatcttaatcacttgggccaccggaacagatagagcaaaagaggcggcaaattcagtggtaagtgaaatattcaaaaaaaattccaagggaaacattaaaattgttgatcccactacccacagaatcgaaacgtctaatattcgatattttgccaagggcattgaccttgataaagtcggcttaagtgtcgtcaacgttgaacaaatcgacgatgaaaaccaaattccccttgtaaaactagttgaaagtcgtgtggctttaaaaaggtattccgactttttagctaaaagaaaagaaatggagctaatgaaactcggagtgatgaatagatctttcaggacattagaaaccgataaaaaggaagataatttgaagcagataaaggtatcatggcagattgagagtgacgatttacgaaggcagaaagctcatgaaatagtatcgttattgaagaagggaagtaaggtaacgctatatcttgatgacaagaataacataaattcaaataattggcttgagggttttgaagagctggaccgcgttcaggaagatggcacaaataggctaccaaaatctgtattgcaaaaaagggctgatgttttggagacattgaaagagacggtcattgaatatgccaatgagcctataatagtaggcagcatcgctacaaaaatgataatgaaactaacaccaaaagatgtgaagccatatgacaacgataaaagggcattaaaggagttgaggaagaaagagaggcaggaaaaattgcaaaagagaatagagaaaaagaagctaaaggacacgtaa

SEQ ID NO: 3031 - DNA, 3711 bp, Saccharomyces pastorianus
atgcaccttagaggaactatgagtagagtgcccacattagcctcatttgaagtgcgatacaaaaaatccttcggtcacaaatttcgtgattttattgctttatgtggtcactattgctccccaatcaaaaaatatgttttccctaattttatcgcagtccattatttttatacgatagttctcacaataataacctctattatgttgtatccagttaagaacatcagatatattgatgctttgtttttggcagccggcgcggtcactcaaggtggtttgaatactgtggatgtcaataatctaaccttatatcaacaaatgattttgtaccttatttgctgcatatcaacccccattgccgttcacagttgtttggcattcgtaagactctattggtttgaacgttatttgacgggtattagagactcttccaggcgaaatttccaaatgagaagaactaagacaatcttggaaagggaactaaccgctaaaaccatgaccaaaagtaaaacaggcactcaaagaatgtcacgtcccgggaaatcggataaaagagacgatttccaagaaaaattgtttagtggagaaatggttaatagagatgagcaggactcggttcatagtagccacagttctcgtgatagtaatagtaatagtaagagcaataacaccagtaataacaatgggagtagtggcagtttggacgattatgctaaggaagacgaagcggatgaggtccaaagatacccaggaaacaagtcctattcaagtgtaggtagttcttccaatacagccacagacgaaaacataagccaaaaattaaagccaagtagtcttcgatttgatgaatcacaaaataaaagaaaacgtacaggagttccctcagaaaaatttgcgagaaggagaggttcaagagatattactcctgaagatatgtatcgatccattatgatgctacaaggtgagcacgagggtactgcagaagatgaaggaccacctttagttatcggatcgcctacggacggtacaagaagtatgggcaacagtaataagttaaaatcagcttctatgaatgatggtaaagtcaagattcaagataaaggagctaaaattagtctagaccaggactatgtatcacatagttcaaattcttccgcatgcacttcggatgaagattctcttcccacaaattttggaggtactacaccttcattaagcggaaagacacagaaatcaagttcaggcccaatagcgtttactgaagggggggaagctgacagaaaacagggtccatcgattcagtttaatatcactaagccgccaaggagggcttccaagtctaagagggtttctactatggacgacttaaacccaagatcatttcaaaaaaaaacatcgaagggatacataatgaaacatttcccgagagcccagcgaatacggcagcagattaaaaggagactttccacgggttcgatcgataaaaatagtagcaacgacgctctcgatagagagcccgtttctggtctagacgatggtgatgatgatggtggcaacgaaggtgataacatggaagagtactttgccgacaacgaaagcggggacgaagatgaccgaatgcagcattctgaaccacaatctggctcagaacttaaatcgaaacaacagcaacaacaccaattgcagaaaaacctgcatcgtatgtacaagacgaaatcctttgacgataatcgttcaaaagctgttcttatggaacggtctaagactatcgatatggccgaagctagagatttaaatgaacttgccaggactcctgactttcaaaaaatggtttataagaattggaaggctcatcataaaaataaaccaaacttcaaaagaagaggctggaatggcaagatgtttgaacacggtccttatgcctccgacagcgatcataactatcaggataatggcaataatagtaatattttagttcactacgcggaatccattttacatcacgataattctcatagaaatggaagcgaagatgtttcttcagattctaatgagaccacttatcctgtgaatggaaacaatgattacaaccaaaacgataccaatggatatcccacttacaacgatgaagaggaaggctattatggtttacatttcgattcggattataacttagatcctcgccatgctctaacccgtagtggtaccaaaaactatttgtcatggcaaccgaccattggacgtaattcaaactttcttgggttaacaagagcccaaaaggatgaactgggcggtgtcgaatacagagccatcaaattactatgtaccatattggttgtctattattttggatggcacatcgtctcttttgttatgttggtgccttggattaacttgaaaaaacactatagcgatattgtcagaagcgatggtgtttcacctacatggtgggggttttggacggcaatgagtgccttcaatgatttaggattaacgttaaccccggactcaatgatgtcattcgataaagccgcatatcccttgatcgttatgatttggtttatcattattggaaatacagggttccccatccttcttagatgcattatttggataatgttcaaactttcccctgatttgtcgcagatgagagagagtttaggttttctcttagatcatccacgtcgttgttttactctattgtttccaaaggctgctacatggtggctgcttttgacccttgtaggactaaattttacagattggatcttatttattattctagatttcggttcaactgtagttaaatcgctatcgaaaggctatagagttcttgttggcttattccaatctgtcagtacgagaaccgccggtttcagtgtcgttgatttgagtcagttacacccctccgtccaagtatcctatatgctcatgatgtatgtctccgtgttaccattagctatttctattagacggacaaatgtctacgaggagcaatctctggggctgtacggagaaatgggaagtaaaccagaagatactgacactgaagaggacggcgacaacgacgacgacgatgacgatgacgaaggagaagaagaggcgagccaagaaggggcaagtaatcgtaggggcaaaccaaagaaagaaaataaaaagaaaaaaaagagaaaagaaaatgagaaccccaacgaagtatcaaccaagtccttcattggtgcgcatttaagaaaacagctttcttttgatttatggtttttgtttctcggcctatttatcatctgtatttgtgaaggtgacaaaattaaagacatccagaggcccaacttcaatgtatttacaattcttttcgagatcgttagcgcatatggtacagtcggactatcattaggctatccgaacactaatcaatcattttcaaggcagctaaccacattatccaaattggtcatcatagctatgctgattagaggtaagaatagaggtctgccatattctttggatcgtgccattattttgccaagtgatagacttgaacatatcgaccacattgaggacttaaaattgaagaagcaggccagaaccgatacggatgatccaatgacggagcatctcaagaggagttttagcgatgcaaaacatcgttgggacgtacttaaaagcaagagtagccattcccggagttcgagaagaagtaccaaaaccaattga

SEQ ID NO: 3032 - DNA, 1656 bp, Saccharomyces pastorianus
atgaattttggaaatcaaacacccacgattgtggttctaaaagagggaacagacgcatctcaaggtagaggtcaaatcatctccaacatcaatgcctgtattgcagtccaagaggcactaaaaccaactctaggtcctttaggctctgatattctaatcgtgacatcaaaccaaagaactactatttccaacgatggtgccacaatcctgaaattattagatgtggtgcaccctgctgccaagactttagtggatatttcgagagctcaagatgctgaagtgggtgatggtaccactagtgtgaccattttagccggtgaattaatgaaggaggccaaacctttcctagaagaaggcatctcgtctcatttaatcatgaagggttatagaaaagcggtttctttggctgttgaaaagataaatgaattagcagtggacattaccaaggaaaaaagcaccggcagagaactattagaacgttgtgctagaactgcgatgtcatccaagctgatctataagaacgcagattttttcgtcaaaatgtgtgttgatgccgtactatcccttgatagaaacgaattggatgacaaattaataggtattaagaaaatcccaggtggtgctatggaagaatcccttttcatcaatggtgttgccttcaagaagacattttcttatgctgggtttgaacaacaacccaaaaagtttaccaacccaaagattttaagtttgaatgtagagttggagttgaaagcagaaaaggacaacgctgaagtacgcgtagagcatgttgaagattaccaagccatagtagatgcggaatggcaattgattttcgaaaagttaagacaagtagaagagacgggtgtaaatattgtactatctaagttaccaatcggtgatctagccacccagttctttgctgatagaaatattttctgtgctggtagagtgagcgcagatgacatgaaccgtgtcattcaagcagttggtggttccatacaatctaccacgtctgatataaaaccggagcatttgggtacctgtgagttgttcgaggaaatgcaaattgggtctgaacgttataatttattccaaggttgcccacaagccaaaacatgtacattgctgttgagagggggtgctgaacaagttattgccgaagtggaaagatctttacatgacgcaatcatgattgtcaagagagctctacaaaacaaactggttgttgcaggtggtggtgctctagaaatggaggtatcgaaatatctaagagactattcaaaaactatagctggtaaacaacaaatgataattaatgcattcgccaaggccttagaagttattccaagacaactttgtgaaaacgctgggttcgatgcgatagaaatactaaacaaactaagattggcccacagtaaaggtgaaaaatggtatggtgttgactttgaatcagagaatattggtgacaattttgccaagtttgtatgggaacctgctctagtaaaaattaatgctttaaatagtgccacagaagctactaacttgattttatctgttgatgagacaatcacgaataagggaagtgaaagtgccaatgctggtatgatgcctccccaaggagccggaagagggagaggtatgccaatgcaataa

SEQ ID NO: 3033 - DNA, 2037 bp, Saccharomyces pastorianus
atgggactgttagctttgggaacgcccttgccatggtttgagtccaggacatacaatgagcacatcagggacgaaggtgttgagcagttattgtacatcttcaaggcggctgccaaaagagacaatgatcctctttattggggagatgaggtcgaatacatggtggtggacttcaatgacaaggacaaaaactctatgcttgacgtctgtcatgataagatactcactgagctcaacgaggaagagctgccactctgtgaggccaacgacgtcagcttccatcctgagtatggtcgtttcatgttagaggcaacgccagcttcgccgtacttgaactatgtgagcagttatgtcgagttgaacatgcaacaaagacgtgccatcgcagaatacaaattgtccgaatatacgagacaagataataagaataacgtacatgttggttccaggttggtgcctttgacactcactgtctttcccagaatgggatgccctgactttataaatatcaaagatccttggaatcacaaaaatgcagcttccaggtcactgtttctgcccgacgaagtcatcaatagacatgtcaggttccccaatctgacggcgtccatcagaaccagacgtggtgaaaaagtgtgcatgaacattcccatgtacaaggacacggataccccagaatcagacgattccatctatgaccgagattggtttctccccgaagacaaagaggccaaggtggcttccaaaccagggtttatttatatggattcgatgggattcggtatgggctgctcttgtttacaagtgacttttcaggcccccaatattagtaaagcgcgctatctgtacgattccctggtaaatttcgcacccatcatgctagcattttcagcggccgctcctactttcaagggttggttggcggaccaagatgttcgttggaatgtcatttctggcgcagtggacgaccgtactccaaaagaaagaggcgttgagccattgttgcccaaatacaacaagaacggatttggtggaatttccaaagatgtccagagtaaagtcatcaaaataccaaagtcgaggtatagttcagtagatctttttttgggtgggacgaaattctttaatagaacgtataacgacacaaatgtcccaataaatgataaagtgctgggaagactactcgaaaatgacaaagctccattagattacgatatggccaaacactttgcccatctttatatcagagatccggtatccacgttcgaagaactactgcatcaagacaacaagtcatctacaaaccattttgaaaatatccagagtactaattggcagaccttacgtttcaaaccgcccacgcaacatgctactccagacaaaaaggatgcgcccggttggagagtggagttcagaccttttgaagtccaactgttggattttgaaaacgccgcatactccatgtttatatatttgatcgtcgatagcattctgacattttctgacgacatcaatgcttacattcatatgtctaaagtttgggaaaatatgaagacggcccaccacagggatgctgtcctgaatgaaaatttccattggaaaaaatcgttccagaacaaagatggcgtggaaacggaagaatgctcggtagacgaaatttttcacaattcagagaacggtattttccctcaattcattacaccaattctatgccaaaaaggttttgtagcgagagactggaaggaattgaaacactcttcccaacataaaagactatactactacctaaaactcatttctgaaagagcaagtggtaaactaccaacaacagcgaaattttttagaaattttgtattacaacatccaaactacaaacatgattcgaaagtctccaaattagttaattacgatttgctttccacgtgtgatagaattactcatttagacgattcaaaaggtgaattgacctcctttttaggaagtgagattgctgactatataaaaaataacaagccgtcgatagaaagaaaagcgtaa

SEQ ID NO: 3034 - DNA, 654 bp, Saccharomyces pastorianus
atgtcaaaaaaactttcatccccattgtcctttctaccactgtataatttgttttctgcagttggttggtcgtatttgctttactcggtcgtttctctctatccaaagattggtcagccatcattcttctaccaaactaggaatattgccactcttatccaatgtggtgctgtaattgagatcatcaattcattattgggaattgtgcgctctccattgtcaaccactgttgctcaagtgtcttctagattactagttgtcataggtatattccagttgctgccaaatactagcggcgttcaatcgattgtgtacatctcgttattgctggcatggtctataactgagattgtcagatacttgtattatttttttactttagtgtttaaaagtggtgcaccaaagatcttagtcctattgagatataacttattctgggtcttgtaccctacaggagttgctagcgaactatgcattatttactgtgctctgaacgctgccgaaactcagtattgcctactttataagagattattacaggtcgcaatgatagcttatatccctggcttcccagtgttattcttacatatggtaacacaaagaaagaaggttatgaagggcttgagttctccttccgggaaaaaactaagttaa

SEQ ID NO: 3035 - DNA, 3153 bp, Saccharomyces pastorianus
atgcccatggaccagcctatctcatcgccggtgtttcctgcggaaaagagtatcgatatttctctagataccacgcctttggcacagagctcttcattgcagctcttcattcatctggctgagccggttgtatttcttcaagggtttgaccctcaaagaacggaatatccctcagtcgttcttcggggctgtttagtggttcggatactgaaaccggcaaagctcaaaagcatcaacttggctttcaaaggatattctagaactgaatggcccgagggtatcccgcccaagagacaagagtttgtagagatcaaggatattgtagaccatacatgggctctgtatccgccaactgaacagaagggaaagaaaaaatcatttgctaccgatagcggcaatgcaaatgataattttttgaaaagggaaagtggtgcctccctttatagaacactatcagatagcggtgctttgaacagtaggaaaaactccatatcaggtttatcctctttgaacttatcacctctaggtacgccaggtaattcatcggtcaatgtgagagatagagaaagtaggcagagatctagatcttcctcggttacttcctccacggctccttcaagaaatttgtctccgataaatttgttgaaaagagctacatctccttctacatcccatcagaatttcaagcctactaccacctctatcttttctgacttgctaaataacacattttcccataacgactcaccgtctcatcataatcatcatatacccgccagtagcggtcacctggcaatggcaagcaatcactacaccagcgggcctggtggagattccttcatcttccaaccaggtgactatatttatgccttcgaagaactaattcctcaagaatacccggaatcagttaaagccgactttgggttcgtagagtatttcttatttgccagtatagagagaccgggtgctttcaaatcaaacattagtggaaggcaggttgttgacattgtacggacacaagctcacaattccgtggaagaaagtgaaccgatcattatatcgagagattgggagaaccagttatactatgatatcgtcatagcttccaaagatattatactggatgcttttttgcctatcacattcaagttcgctcctcttgataaagttacactgcacagaattagaatttacgtcacagaaacaatggaatactactgcagggataaaaaagttcatagaatggagcctaccaagaagtttttattaacagaacaaaagggtcctagactacctaacttacccaatgatgcgaatttgtcgaaggccaagaatatgggcaacctattgacggacccaaaaaatggagacttgattaataaggagtatgaatatcaaatttttgttccaagccgcttcaacaaccatcaacagctacatccagatacttcatatgaaagcatcaaagcgaaccattggataaaaatttgtttgagactatctagagtagtagataataagagaaagcattacgaaattagcattgattctcctatacatgtcttacataggttatgttcccatgcaaatactcttttaccaagttatgatggccgtataacggctattccagaagaattaaactcctccacttcttcaatattagaatcatcggaaaacaatgccaacatgtatcataattcaaatatttttttccccaaggaagttctgtcatcaccagttctttcgcctaacgttcaacccttggatattttgattcctcacttaccgtccacctcatcgttaagaaactcaaggcaatttattagaaattcaaaatctcattcgaaagatagcactgttttcaattccgccaaattgaagtcgaacatttatcaaccagaaactatacaaagagaactcgcatcgcctcaggcaatcccgctttcaccaataacatcacctatgtcaaacatggagataccgccgccagatttcgatttttcttccgatttgatatctgatggtacgtctgaaaccaccactactgaagtgtcctcatcagaatcgagcaccttgccaaaagacccgccatcttataaggattccatgctgcacgataatagtcaaaagaggaaacaaacctcaaggcaccccacgcccgtgagtttaaaaggttcacgctcgagcaaacttttggataccagtactcccgagactatgaatgaacaagaatcaatgtcacgagtagaagataataaacacgaaaagaacagcacacctaagaagagagaaaatagggacataattaaaaacgcagttccacaacacgaagaaagtaaggaccccgtacccgataagaatcaatgtaaaggaaagaaaaatgaaagggacaggaagagggtactgagtttatcgtcctcacttcatagcttgccaaccaataacgccttcatatcttcgacacattccactttaggcaacctgagcagtgattcattacgatcattgactaaaagagaaagtgtgcaagacaacctgccatccacagtaagacatgatagtccatttttcaccgacttaaatcaagtcttaatagacgatgagctcaacaatcatgacaaaaacgaattgaatcgaaacgttacgaattcttcgagcacacccgcatcggccagatcttcttttgattactcgggaataaatataagtaaggacaagttaactatggaacccttgttaagcaaaacggagactttgaccaatagaatgaatgacgactcctttttagggcctaatgattcctttgtcaacttgcttgaaccctcggtagacaccacggttgatatcacagctccgtatgcaagaaattcctctgcatggcatccttcacagtatgacacagagaacaatcaattctctcccctcttaagaagtaatgaaaactttttgaacctgattaacggacaaaattcaactgagtcagattacaataatgatgttactacgcagggctccgggttaacgggaagctcgaaaaattctgacactgaggaaagaattatttcaagactctcttcacctgagaaattgttgattaatactttagacaacgaatccggattacagagcattgatgaaagcacgcattag

SEQ ID NO: 3036 - DNA, 1938 bp, Saccharomyces pastorianus
atgatactgattacaggctgttgtcttctactctatagtcttattttaccaacactgatatcggcctctaaatcatgtaacttagcggagttgcaacgactgaacaagcatttgaaagtagacactgagtcgctgaccaagtaccaatggatcgcaggccagttggaacgaaattgtctaacagcggaaccaaaaagcgaggatatgacagatgtcatcaggctagccaaccagatatactacaagattgggctgatacagatgtctaatgatcaacacctgagggccattgacctgttcgaaaaaattgtctccaatgaaacctataaggactcctttggaaagcttgccgagaagaggctgcaagagctttacattgatttcggtatgtgggggaaagtgcatcagaaagatgaacgttattcaaaatatctttcgttgaatgaaactattggaaagaaactacaatccagagatgtttctgttgaggaggatctctcagagctacttcgaattacgccatataatataaacgtcctatctacccatattgatgttcttttccataaattggctgaagagattgacgtttcgttagcagcatctattattttggattatgaaactgtccttgacaagcatctagccgtcttaagcctagacacaaggcttaccattcattatgttatatcagttttacaaacttttgtgcttaactctgatgcgtcctttaatctaagaaagtgcttatccattgatatggataatgagaaatgtaaacgtctaagtttaactatctctaaattaaacaaagtgaatccatccaaaagacaaatcctagatccagcgatatatgcttttgaggaagcaggatctacaaactgggataagactatagatttttatctaaaggataaaaagccatttattgctcaaaaaaaagctcttaacagagatattgctttcaaaaataattactcatttttgcaagaaattatcaagcaattgattgttgacgttcaagtattaagacctttgacagcaaatttatttgaggatccatcaaacaccgacaatgttgtcaaaccaaactcctacttccatactgactacctaatctatattgactccatcctttgtcaggcttctacaacgagtttggacgccaagagagctaaaatggctgctccattttgcaaaaccgttttaaaacaatcactaaccctagaaacatggaattactaccaggatgcgaagtctcagcaaaaacgtcttcctgaaacaatattagacgatgtatggaactccaatcctcatttggtaatgtatatgataaattcaatcttgaacaaaaataagtctaaaccacattctcagcctaaaaaacagctactagatcaaataaacaaattttttcaagacaatggcctttccgagtcaaccaatccatacgtgataaaaaatattcgtttactacagaaacaactacaaacttataaagagcaaaagcatcggaatttcaaccagcaatacttccaacaacagcaacagcaacagcaacagcaacgacaccaagcgccaccaccaggagttagccataaccctcaaaaggattattacaagattcttggagtagcacctggtgctacttctaaagaaataagaaaagcgtacctgaatctgaccaaaaaatatcatccggataaaataaaggcaaaccataatgacaaagaggaaaccattcacaaaaccatgtcccaaatcaatgaggcctacgaaacgcttagtgatgacgataaaaggaaagattatgatttctccagatccaatcctcgtcgaaacacattcgcccaaggacctagacagaataacatgtttaaaaatccgggaaatggatttccgtttggaaacggctttaagatgaattttgggttctga

SEQ ID NO: 3037 - DNA, 756 bp, Saccharomyces pastorianus
atggggttctatcaaggtgacgacgatgacaccgacaccaagacatttaacgacaagttcatcaaagaccggaagttcgccacggctcccttctggagcctcttccccaagttgaaggacatcgacgaggacgatgactcgctcttcccgctgcccttcaagttcaacttcaaggattttggcgacaatgccttcgccatggcatcaggaattccgaccgtgaagcagttcgacaagtgccaggagctaaagggccagtccgcgtggacaacccagggcatttggaagtgcctagtccccggccaagcgatccctccactgcccaacctggacttcctcttgccgttggaagacgtccagtcagacaagtcgcattcccgtgggctgttcttcaacgacttcaacctttttttgaaatggagatcgcacatgaacaagctgcaacagcaaagaaccatcaagtccgctgccctggaacccgtggctaggaccccggaggacctcatgttgagctgggacgacttgcatttgagtaacgatgctgagtacgcaactgcgaacggggccaagaaaatcgtcggtagggcacagtccatcaacactactagggactccagtgattcaaaacctaacactgtcaagactgagaaaatttactacgacgacggcaccgtggagatcaccaccaccaccaccgccaagggttccaagcctcaggtgaatcatgaagtggtgaaggccgatcaagataaatag

SEQ ID NO: 3038 - DNA, 258 bp, Saccharomyces pastorianus
atggttttgaatccctccaagtaccaggacacgcgcacgtggaagatgacgcccgccatgatccgggctcgcaaacccttctttaagggcaatctgctcgggctcacggtgctgctgggcatcacgggttccgtctactactatacatacagcttcctgcacaaggacaacgactttgcagacgtgcccatcccgcccatcgacgcgaaggagctcgaggctctcaagaaagagtacgaggccaagaagaagacctga

SEQ ID NO: 3039 - DNA, 747 bp, Saccharomyces pastorianus
atgacaatggagagtggtaacggaagtagcggctctagtagtggccgccaagagcacggcaagtctgtgtgtgtgtactgcgggtcttcgtttggaactaaaacgctgtactccgagagcgctgaagagttgggcgcccttttctataagcttgggtggcaattggtgtacggtggaggtaccaccggtttgatgggcaagatagcaaggtccaccatgggcccagatttgaacgggcaagtacacggcatcatcccggatgcgctcgtgtccaaggagagaactggtgaggatgaagaggaaatcaacgaggcgctgatggagtccgtggaaaaccataagggctccacccccatctccaaggagtacggggagaccacgattgtgccagacatgcataccaggaagaggatgatggccaatttgagcgacgcgtttgtggccatgcccggcggttacgggacctttgaagagatcatggagtgcatcacgtggtcgcagttgggcattcacaacaagccgatcatcttgttcaacattgacgggttttatgaccaactgctgcaattcatcaaccactccatcgaagagggcttcattagtgccaaaaacggggaaatcgtgcaggtcgcatcgacctcacaggaggtcgttgacaaaattgaaagatatgtcgtccctgaaggccgtttcaatctgaattggaacgacgaaggtcgaagccacgagcattgtgccaaacaatag

SEQ ID NO: 3040 - DNA, 1449 bp, Saccharomyces pastorianus
atgacttctgaacccggaaagcctgttacgaagcctgctaagaagcctgctaagaagcctgggtacaccaatccggctttcaaagcccttggcgtacccaccttgagactgccctccagaaactggatgatcttctggtccgtgctaacggtatccatcggaggcctggcctacgacaagtacaaacaacgacagattttgaagcgggcgactggctcggtggaaccgttggcggaagaagttttggaggtagacagaattccacggaagatcaccgttttcattgcacctcccccaaacgattatctggagagttcgttgaaagtttggaggcgttacgttaaaccagttctttaccatgccggcttggactacgaactggttcaggaggacagacagggaactataagaaccaatgtggccaatagaatcagacagctacgaaaggagctattggcgcgaaaggatgaacagttaccaaacgggtccaagccaatgaaaacaacagtagattcgaagaactctttatcgagtaggctttcgtcgctgctaccgttcagtaggactggctcggttgattcggcagacgatgagccatttgatccagagattggaaaagaattcaagaaaaacttcgattggagaaacgtcattggtattttctatacaacgcccaagccaacagatataataagtgaagattcactggtagaagaccctattctatctgggggtgttatctgcttaggcagaggtgcatataaggagtatattgccggtatacatgaaggtttgctgggccctattgaaagggaaatcgaggtggttgaggctacggaacccaggataacagaagttcctgagatcaaggatattaaggcagatgcaaacgaaccgaaccctgctgcgttgccggatgcaaagaacgatgctgatcctgcagagacgaaagtggatgatgatttgaagctaaatgaggaaaacgctacagaggagtcgcaactttttttaaagcctttcatcaccccagaccaataccctgagttgcaaatcgctccggaattacaaacggcagatggcaaattcataagaaaccccgacacaaatatccctcttttcataaaccaaccattactagtcatccccatacccaatttaataggattcactacgattcccacaagaatttaccggttctaccagaagcgtttctatgtcgaggatgtgtgttccaatgtagttaactgtgcacaacagtcacacattagaccatttgacatttcaaaggacatcgatatggcgaaggatgaagaaaaggactggcctcaaaactggatcaaacaaggtaaagagaaaaacagtgaatggacccaagaattggaatgcgatcctagagtcacagagcacatgtccgtctatgagaatccatccaaggaagagcccaaatag

SEQ ID NO: 3041 - DNA, 1350 bp, Saccharomyces pastorianus
atgaaattggaattaccagaatccagattgccgtccttatatagggattttaggccattgaaagatttaaaccctgatggctacgatgcaaacatcaacacatggaaggagtacttacgcgaacggtatctcagttgctcaggtaaagtcacatttgcgataggaacgagactattgcaagagttaactcatgaggtttatggagtgccaaaaagtatcgatatggtaatcgatgcccttgttagcgaaggagatctggtgcctatggaagtcttccaccgaggtggtttatactctgataataacaagcttggattttggaggtggattagaaactggaaaggatccacgaatacatataggagcagaagagatgaatctaatttttacttgaaggaagatgaatttgttatcaagacaagattggaaaaggagtatcaaagatttcatgacctactgaaaaatagcgtgtttacaaaagcttcaactattacagatttggtatttacagtgaacgattttgtaactgaggagagtatagggcccttttttgagacttataatgaaatggcaaagaaggtttttttattttttttggagaattataagcacgtcataatttcgaaggataatgtcgtcaagatcattgcacccgaggttgaagatgtaattagtagattttctacagacgtcacagaaaacgacgttagaattgctactgttaaagttgggatactgaacattagcaaacaaattacaagactacgaaaagagattgataaatctggagctaggctgaatgatcccgagttcaacgatctacctaataaaatacggattgaatataaacagaccagattattatctgaaagacacctttccaaacttttgaagtttcaaaataacttagctgaagtacgaagccaaatagatactagtcttaccaacgcaatgttatttcaaactctgagcgaatccaatgaagtaatcaaatcgatcaacgggtacattggatcaactgaaaaagtggaagacttgctagaagaaatcaaagagggacacgatcgtacagaagagatcaacgatcttttaactaattacaaaacagggcaagacaacgaagaggacgaagaaattgaaagagaactagaaagattacaaattgatgagatgaataagaacagagaaaacgactcaaaccggaatgcggatgagtcaaaagaaagtagtaacgaagacttgttggatagactgaacagtttgaaaatagatacgagtgaagaacctgtgaagaatgatacgagtcaagataaagaaaggaggaaagttatggtggaagaactacattaa

SEQ ID NO: 3042 - DNA, 1191 bp, Saccharomyces pastorianus
atgccaagtataaatagcctcttccaagaaggtgtggtccatgaccagtccagtattagtgagcaggctgtagttgtctatataagctcaggagttgatgacgattcatggcttcaacagtggtttagaccaggcaacctcagcagcctggaacgtgaaaacatagtgtgggtgaagctggtaaataacaccaaagagtgctttctcttcaggagtattttcccctcattgtctgcgccaagtataagtatactgcagaacggcctactcgagtgttccattcaaggtaatagtgtctcccgggatctggatctttgggaaacattcgttaatgggctagagctaaccgttaggggacaaacaataaagaggaagttattcaccaagggcaatgaagagtaccaaagagtcaagagaatgattcagaatgacaagctggaaaggaagtacgtatttcaaaacgccaatgaccctcagaggacacaacagagatggaagcagcttatggtcatggataatgttagctataagagtcagagggttttcctcgcacagaactattgtaccctgcagttgaagctgcccaatggctacaccatttcaaacacctttcctcctcaaacgaagctgcacaaagtgagaatgtggttggactacaattgctacgacgatggtactccgtaccttttccacaggaacgtgccaagagtgacccttacgcaagacgacgagttgaaaagtcttcaagaactagacctactgcccagatcgacccttattttggagccgctggaagcccataataattactttgacgacatggaacaatcatctatattatacaaagtctattccgggttaacttcgttttgggcaaaaggaccggaagcaggcccttcctcctctcatctaggctaccagagattaggcacaaacgtctcgaacaggacaagctacagcatacagaaaatatcgagtttagagattgtgtctgacggaaacgattcgatggccccttcagcgtataccactccaagaatgtacccttctggtggaactactcaagtgcgacagaacatatctgaattaaatctatcttccaataattctgcatctaacaccaaagtccgtacattaggctattctagtaaaagtagtaagagtaataatagcaatagtggcagtaattga

SEQ ID NO: 3043 - DNA, 1383 bp, Saccharomyces pastorianus
atgaaggatgtcttagaatgggcaattgaccactacgagacacgagatcagctgatccagaagggcatttggaaaggtgaactgtaccgcggatccatttttgaagagagcagcagaggttggctctggaaggcgttgcttttgtacgatgagaataacagcggcctgctggccgacaattctaaggaccgggacgttaaccagttcggcttggtgcccgtgccgatactgacggatgaggaggaaaacgatgagggcaagaagaatagcggaaacgtgcctgaaagggtcttgcactctaacgtctcgtcttcgctcgggatcagacggctgactcccatcgaggctgtcgacaatcatcccctgtccggcaacaagactaaagctagttcttccaacaagggtgcacccaaggcgcgggaggacaatccattgacactaagggaaacgctggaaattatagacttggacctttcaagaataatgctcgacgatatattccaggaacccagagttcatgctcaaatgagacagcttctgtacaactatcttctcatccataaaaacgaacaattgcagtacaagcaagggttccacgaaatattaagcgttatttatctgcagctataccatggcagcgacgtcgataatatcaatcttcagaatgtgctgatcatcttcaataagctaatgaaccagatcgaaccgattttttataacgaggaaaacctgatcaactgggataagacagtattcaccaagatcttcaagatatgtttgcctgatttatttaccaagatcttctaccagccggcaaaatccggcaacgggaggaagaaaggtgcaaactacttggttcattcgaacttaatctggctaatccggtggacgaggttgctattcttgagagagctgcccttaaagaaagtgctgattgtctgggaccacgtcttgacgtttaactatccattagaaattttcatcgcatgcttcgtcatcactctcttcttatccatatacgacgaactgcacgacctcgtgaaccaagacgactacgaacaagccaacaacaatgacgaattcatcgaactgattttgcatttcaagaaaaacttccaaaaggaacacgccagtacaaatgacgagagcttcttagaactctgtaaaattacgggcaatttatgcgaattgtggtacgggaaaaaccatgcggatatgcggctgatctgtgatacctttatcaatacgaatttcggcatcaaaactggcgatatcctgagcatggaaaccgcgaaattgactattgaccccaacagacaatcactagaaagtaagctgaaagaaagggtgaggcaaacactattgaaaaacaaaaaaaagtaa

SEQ ID NO: 3044 - DNA, 1032 bp, Saccharomyces pastorianus
atgaggttatgctcttcgttattgtcacagaacctcaagagccgattggtggtccgaccatccaccactatacatgcaagtgatccgttttcaaacttcattgtaactagagatactgagccactctcactagacaatcttcaaagaggtgattcagttaatcgtgcagtggtagtttctttcaagaatactgcgcttagcaaggtcacagacttacagaagaaacaagatatgaaatgggatccagtgaaatatgttgctggtagacttcgagggataatttctcccattcaagcatacatatccattagcaaaagattctcttctcattcattggtgtacgatagcagattttttcagttacattattttccagaggatcatttcatctcttgttttaggaaaagcaaaccttccattacagttaaatcaacaaaaaagttttatttgaatggtaaggtactgaatcaaaatcaccagtattacaacgaatctagaatattgaaaaccgatgaagcggaattgaccaaaattcagaccacaatggcacgattggcatctaaacataggaacaatattccttcagaatttgcatacttgaggagagatttgaaattgaaggtgaaaacgccgtttatcgaagaatggtgtagactaaatggcgataaggctattcgagaacgtgatcggtctgagtctaggaatgccgttgagagcaaagcaaagaaaagtctactggacaagtttggtagaagtactgttggcacagcaaaagatggatattatttgtacattgtaaggatatttcctgatgtagacactctgaacgagtttaacaaggaaatcaataaaagcgtccagaaggttgcagatttgaattgggataaatttttgatcccaaaaaaaggtcccaaaggcaaaacttgggtggaagcattcaacgacagtataaacgtaaacacaatcaacaggatactcaagattagtaagttcccttttgagttaagaagagagcaatctagagatcagtaa

SEQ ID NO: 3045 - DNA, 1608 bp, Saccharomyces pastorianus
atgcaagctccagtggtgtttatgaatgcttctcaagagagaacaaccggccgtcaggctcaagtttccaatatcaccgctgcaaaggcagtcgctgatgtcatccgtacttgcctaggtccaaaagctatgttgaagatgttgttagatcctatgggtggtcttgtgttgactaacgatggtcatgctattctgagggaaattgatgttgcacaccctgcagctaaatcaatgttggaactatcccgtactcaagatgaagaggttggtgatgggactacaactgttatcattttagcgggtgagatcttagctcagtgtgccccatatttgattgagaagaacattcatccagtcattatcatccaagctttgaaaaaggctttaactgatgcattagaggtcatcaagcaggtaagtaaacctgtcgatgtggaaaatgattctgctatgaaaaaattgattcaagcttccattggtaccaaatatgttatacattggtcagataaaatgtgtgaattagctctggatgctgtcaagaccgttcgtgaagatttgggtcaaaatctagaaggcgaacctaattttgaaatcgacattaaaagatatgtccgtgtagaaaagatccctggtggggatgttctagattctcgtgttttaaagggtgtgctattgaacaaagatgttgttcatccaaagatgtcccgccacatagagaatccacgtgtcgttctattggattgtccattagaatacaagaaaggtgaatctcaaaccaacattgaaattgaaaaggaagaagactggaacaggattttgcaaattgaagaagaacaagtccagatgatgtgcgaacaaattttgtcggtcaaaccaactcttgtcattactgaaaagggtgtctccgacttagcacaacattacctactaaaaggtggatgtactgctttgagaagagtgaagaaatcagacaataacagaatcgcgcgtgtaactggtgcaaccattgttaaccgtgtagaagacctaaaggaaagtgacgtgggtactagttgcggattatttgaagtagaaatgattggcgatgaatatttctcatttttggataactgtaaggaaccaaaagcctgtactataatgctgcgtggtggttccaaggatatattaaatgaaatagaccgtaatttacaagatgctatggctgttgctcgtaatgttatgttgagcccttcattgtccccaggtggcggtgctaccgaaatggcagtttccgtaaaactagcagaaaaagcaaaacaactagaaggtattcaacaatggccataccaagccgtagcagatgctatggaatgtattccacgcacactaatacaaaatgcaggtggtgatcctatcagactattatcccaattaagagccaaacatgcgcaaggtaatgtcacaatgggtattgacggtgacaagggtaaaattgtagatatggttgattatggtatttgggaacctgaagtcattaaacagcaaagtatcaaaactgctattgaaagtgcatgtttattattaagagttgatgatattgttagtggtgtaagaaaacaagaagagtaa

SEQ ID NO: 3046 - DNA, 972 bp, Saccharomyces pastorianus
atgcctagcacttttgaaacccagctctttttttctaggccttttctgtcgaaaaggcaaattcaaagggcccacaagaacacgatatcagactatcgaaattataaccagaaaaagctggctgtattcaagtttttgagcgatttgtgtgtccagttgaaatttccccggaagactttagagacagcagtatatttttatcagagatatcaccttttcaaccgcttcgaaaccgaactttgttacactgtggcgacaagttgcctaactttaagttgcaaagaagtggaaactatcaaaaaagctaacgaaatatgtacattgtcattgcatttgaggaacgtggtcaaaatcaatacggaaattctggaaaatttcaagaaaagagtttttcaaattgaacttcgaatactggagtcatgttcattcgactatagagtgaacaactacgtccatattgatgaatatgtcattaaaattggcagagaactatcctttgattataaattgtgtaagctagcctggttgattgcctatgatgccttaaagctagaaacagtcttggtcataccccaacattctatcgcattggccattttgagaatagcatatgaactactagacaacaaaaactggtcgagtaagaggtattcgttattcgaatcagacgaaaattcggtaaatgaagcttattttgatatactaaacttttacatcaatttttttgatctctgcgacctacaacatcatttacctgagggcgtaccgcccgtaagtattgataggtttatggttctgaagaaaaatgcagggccggaattcggtttacagcaagttactgatcacgagttagatgcggatccttatatcactatctctcgggagaatactgttcaagaaagaagatacgtgctttccatggacttaattaacggtgaatccaattcggtccactctacgaaacaggtatag

SEQ ID NO: 3047 - DNA, 6075 bp, Saccharomyces pastorianus
atgtcatcaaatcatgctactagtccagaaacctctggctctcatgaacaacaagatttacagaatttaccctcggaaacatatgatgtgaaagcacacgatgactcacccaagttcaagaagcattacgaacaaaataatgggaacaagtcaagaaggaatagtgcatatagttattatagccctcgttcgctttccatgactaaaagcaaagaaagcattgctccgaatagcgtagacgacgcaaatacttcaaacacaggacattcaaggcctgcagagccaagaatgaaaaggggcccacatctgctgaagaaaacattaagtagtctttcgatcaatagcaaccatgatgattctaaaaaccacgattacgctttgaactcctccaaaacccataactacctatcctcttacagccatcatgagccacatcatgaccaccatcatatgcagtttttgcccaataggaagcagtcgtttgctgaaagcttgttcaagagatttgcaggatcgagtagccacgacaataataaggcaggtaaggataatagagttgctagcttatccctgtcaacagccactcccgcgcccgcaaatagaaagccatcgaaggactccacactatcttcccacttggcagataatgtgccgaatactttaagaagaaaaatgtcctctttagttcgtggatcttctgttcatgatgtaaataatataagtgcggacaaacaaatcaaaccaaaaattgctccaccaccagagagtacgttgcattcgtcggatgttcctaatagcaaacgttcacacagaaaaagttttttactaggatctacatcctcttcaagcagtagaagaggttctaatgtgagctcaattacaaacagtgacaatgcaagtatggcgacttcagggagccatgctatccatcataatatacctaatatatcgccgactactaaaagtaaagaaagcgttgatagcgaatctgctgatcgctctaataacaaagtcgcactaaagcccaatgataacatttcagaaatccctagtattgaagatgaaagcgaagctgtagtaccgacgatggaaaagcctattgcatataagccatcccttttcaggttggatacgaaccttgaagatgtgactgatataacaaagactattccgcctacggctgccaactctacaataaattctacgtatggtactgaaacagcctcgcctaagacggtagctatgccagaaggtccaagaaaatctgtttcgatggctgatctcgctagagctgcagctgttcctaaccctaattttacctcaacttcaaatgataggtcacaatgggtagcaccacagagttgggatgtagaaactaaaaggaaaaaatcaaagcccaaaggaaggtctaaatcacgaagaacaagtatagatgccgacccgcttgatccaatgtcaccggcaccgctatccaaaaaagactctcgttaccacaaaagtcgccatcaccatcaccatcaggacctgaaagataatgcgtcgtcaattacagcggacgctagtaattcaagctttgttgatatattaaaagaaaatatttcaaacgacggaaagaactcagttgacccgaagtctgtgaaccgtctaagaagtaacttgactatgagccccccgagtatacgagatgctccatcaaatttagacggggactacgacacttcatccacttcctcatccttgccgtcttcatcgattagctcagaggattcttcctcatgtagtgattcgtcttcatataccaatgcgtatatggaagctagccaagatgaagataacaaaacaccgactttgaataaagcgaaatcgtatactaaaaaatttacatcatcctcagtaaatatgaattcgtcagatggcactcagaatggttcaggattattattacaggatgagaaagatgatgaggtcgagtgtcaactggaacattactataaagacttcagtgatctagatcccaaaaggcattatgcaattcgtattttcaacactgacgacaccttcactactctatcctgcactccagcaactaccgttgaagagataatccctgcactgaaaagaaaattcaacatcaccgcacaagggaactttcaaatttccttgaaagtggggaaattatccaagattttaagaccgacatccaagcctattttaattgaaagaaagcttttacttttaaacggctatcgaaagtcagatccgcttcatattatgggtattgaagatctaagttttgttttcaaatttctttttcatcccgtaacgccttctcactttacaccagaacaagagcaaagaataatgagaagtgaattcgttcacgtggacttgagaaacatggatctaactacacctcctataattttttaccaacatacgtcagaaatagaaagtttggatgtgtcaaataatgcaaacattttcttaccgttggaatttatagaaagttcaataaagttactcagtttaagaatggttaacatcagggcctccaaatttccttccaatattacagaggcatacaaactagtatcattagaattacagaggaatttcataagaaaagtcccaaattcaattatgaagttgggtaacctaacaatactaaatcttcaatgtaatgaacttgaaagcctacccgccggatttgttgaattaaagaatcttcaactgttggatctgtcttcaaataagttcatgcactacccagaagttatcaaccattgtaccaaccttttacaagtagatctatcatataataaaattcagagcttaccgaagtccacaaagcagctagtaaagcttgcaaaaatgaacctctctcacaataaagtgaactatataggtaacttatcggaaatgaccaacttaagaactttgaacctaaggtataacagaatatcatcaattaaaaccaacgcatctaatttgcaaaacctctttttgacagataatagaatatctaattttgaggacactttgcctaagttaagaacccttgaaatccaagaaaacccaattacttccatatcttttaaagatttttatcctacgaatatgacaagtttgacgttaaacaaagcgcagttgtctagtattcctggagaactactcaccaaattatcgttcctcgaaaaactagagttgaatcagaataatttaaccagaataccagaggaaatctcaaagttgaccaaattggtttttctttccgtagcgagaaacaaattagagtatattccaccggagttgtcgcagcttaagagtttaaggtcattagacctacattctaacaacataagagactttgttgatggtatggaaaatcttgagctaacatctctaaatatttcatcgaacgcattcggtaattcaagcttggaaaactccttttatcataatatgtcatatggttcgaaactgtcaaagagcttgatgttttttgtggccgcagataatcaatttgacgacgctatgtggccgctctttaactgctttgtcaatctaaaagtgctaaatctcgcttacaacaatttttctgatgtatcgcacatgaagcttgagagtattactgaattgtacctctctggtaacaagcttacaacattatcaggtgatacagttttgaaatggagttgtctgaaaactttgatgttgaatagtaaccaaatgttatctttacctgccgaattatcaaaactgtctcagctaagcgtatttgacgttggagctaatcaattaaagtataacatatcgaactatcactatgattggaattggagggacaataaagaattaaagtatttgaatttttcaggaaatcgtaggtttgaaataaagtcctttgcaagtcacgatattaacgctgatttgtcagatctaactgtactacctcaattaaaggtgttggggttaatggacgtaactttaaatactaccaaagttccggatgaaaatgtcaattttcgtttaagaactactgcatcgattattaacggaatgcgctatggtgttgcagatacactgggtcaaagagactatgtatcatctcgtgatgttacttttgaaagatttcgtggaaatgacgacgagtgcttactgtgtcttcatgacagcaaaaatcaaaatgccgattatggccataatatctcgagaatcgtcagagatatttatgataaaatattaattagacaactggaaagatacggagacgacacggacgacaatataagaactgctcttcgttttagttttttgcaattaaataaggagatcaacgggatgctaaattctgtcgataatggcgctgatgtcgctaacctatcatacgcggatctactaagtggtgcttgttctactgtgatatacatcagaggaaaaagactttttgcggcaaacctgggtgattgtatggcggtcttatccaagaataatggtgattaccaaacgttgactaaacaacatctcccaacaaagagagaagagtacgaaagaattcggatatctggcgggtatgtaaacaatgctaaattggatggcgttgtagacgtatctcgagctgtcgggttttttgatttgcttcctcacattcatgcctctcctgacatttctgtcgtaactctgacaaaggcagacgaaatgctaatcgtagcaacacataagttatgggaatacatggatgtagatacggtctgtgatattgctcgtgagaatagtaccgatccacttcgcgcagcagcagaattgaaggaccatgctatggcttatggttgcactgaaaacattactattttatgtcttgctctttatgaaaacgtccagcaacagaatagatttaccctgaataaaagctctttaatgacaagaagaaacacattcgaagataccacattaagaaggctacaacctgaaatttctccaccaacaggtaacctagcgatggtattcaccgatataaagagttcaacgtttttgtgggagctatttccgaacgcaatgaggaccgctataaaaactcacaacgatattatgcgtcgtcaactacggatttacggaggttacgaagtaaaaacagagggtgatgcctttatggtagcgtttccaacaccaactagtggcctaacatggtgcttaagtgtccaattgaaacttttggatgcacagtggccagaagagattacctctgttcaagacggttgccaggttacagatagaaacggcaacattatttatcaaggtttatcagttagaatgggtattcattggggttgtcccgttccagagcttgatttagtgactcaaagaatggactatttaggaccaatggtaaataaggcagcgagagtccagggtgttgctgacgggggccagatagcaatgagtagtgatttctattccgaattcaataagataatgaagtatcatgagcgtgtagtaaagggcaaggagtcgttaaaggaagtatatggtgaagaaattgtcggggaaatcctggaaagggaaattgcaatgctagaaagcatcggctgggagtttttcgattttggtgaacacaaactaaaggggctagaaaccaaagaacttgttacgatcgcatatcctaagattcttacctccaggcatgaatttgcatctgaagatgaacagtcaaaactaattaacgaatcgatgttgtttcgtctaagagtagtttcaaataaactagagtctgtgatttcggctttgagtggtggcttcattgaattagactctcgaacagagggaagttatatcaaatttaacccaaaggtagaaaatggtattatgcaatcaatctcagaaaaggatgctttgttattttttgatcatgtaatcactagaattgaatccagcgtggcactactgcatctacggcaacagagatcttcaggattggagatatgtagaaacgataaatcatatggtcagagcaatatttttagtatcgttgatgagcttttagaaatagtcaaagtagttaaggatctatcagcatga

SEQ ID NO: 3048 - DNA, 2007 bp, Saccharomyces pastorianus
atgcaatttttttttaagttagttgttttgctttgttctttggcattggcctctgcggcagatattgacaacatctcattttctaatttagaaattgccccgctgacttccaataaacaacctgatcaaggctggacagcaagctttgattttaccgtcgcagactcatcttccatcaaagagggtgatcagttcacgttatcaatgccacatgtctatagggttaagttatcagacccatatcaaatgacaaccatttctttaaatgatggtactgaggctttcaaatgctacgtttcccaacaagccgcctacctatatgaagatacaattttgacttgcactgctcaaactgatttgtcttcttataattccattgatggctctataacattttccctcaactttagcaacggtgattctaactatgagtatgagttagaaaacgctaaatatttcaagagtggacctatgctcattcaactcggtgatcaaatgtctggtgtggtaaatttcgattctgctacatttacagaaaacgttttacattctgggcgtacaactggttacgattcctttgaaagttatcacttgggtatgcgctgtccaaatgggcatttcttaggtggcactgaaaagatcaattatgataattctaatcacaatgttaatctggattgttcttcagttcaggtccattcctctaatgactttaacgattggtggttcccacagagctataatgatataaatgccgatgtcacttgttttggtaacagtttgtggattacactcgacgaagaactagataatggtgaaatggtatgggttaacgcgttacaatcccttccagttggtacgaatactatcgaccatgtcttgcaatttcaatattcatgtcttgataccatagcaaataccactcacgttacagaattttcgactactagggaatttattgtttatcagggcgagaacctcgctacagctagcgcagaaaacgcatttatccctagtacaaaacttatatcaaccaccacaactggatggacagacacatacacaagcacgtactccactgactcgacttttacagtcgggacagacactcaaaccacgccggaggtgatcatccacgtggagacccctagcacaagacttacatcaaccaccacaactggatggacaggcacatacacaagcacgtactccactgactcgacttttacagtcgggacagacactcaaaccacgccggaggtgatcattcacgtggagacttccagcgcagagcagaccttggctacggtagtaacttcaactagtactaccgcatggtctaaacctgtggaaactgacacacagcgttatacttcatctttttctgtaacaattaatagcacgtcgtcagtctttttatccacagaacttgaaacttcgcataccccggttgttagcactaaatccgggcacactacaataaccactagtggtactcctgtttcctctgaaaagtctactacgaccaccgatagaaatctttcatcatctgcgataaattcctttaataactctgccagcaactcacaaacttctagccctttcatttccagttctgctccgtatgagtcatctgtgcacctaagcaaatcatcattaagatctagtctcgtgcatacttccgagcaagtccctagttcatctattaaaacgaaaactaaagtaacctctgggtatacaactttgtcaacaacatctagagcttgctccagttgtttagatgaaacggcaagtccatctcagaacactaaaattgaaacgcccataatatcgtccatggtacactactcttctgctccaagtagccgaccatctccgttcaacttacaagtaagctcgatgtctacttcccattctttttcaatctacgagggtaaagcttctgcgtttttctcaagtgagttcagtaccatcttttttcttgttttatcgtacttcctatactag

SEQ ID NO: 3049 - DNA, 1017 bp, Saccharomyces pastorianus
atgacaatacgtccagcaacacacgccggctcatggtattccaataaaccccaagagctatctcaacaattacagacttacttgactaagagtacaaccaaagggcccattcataacgctcgaattatcatatgccctcatgccggttacaggtattgtggacatacgatggcccactcgtatgcgtcattagatttgaatagtaaaaccaaaagaatattcatattgggcccctcacatcatgtttattttaggaatcaaatactagttagtgcattcaacgggttagagacgcccttgggtagtttaaatgtggatacagatctatgtaaggcattagtaaagagagaacatcctgcaaacggcaaaaagttgtttaaattaatggatcatgacactgacatggctgagcattccttagaaatgcagttcccaatgttggtagaaactttaaaatggagaggagtttccttagaagaagttaaggtggttcctatgatggtttcacataatagcaccgatatagatcagtctattggcgaaatcctgtttgaatacatcaaggatcccaataatctatttattgtaagcagtgatttttgccattggggccgcaggttccagtacactggatatgttggaagcagagaagagttgaatgaagctattcaagaagaaacggaagtggaaatgttaactgctaggagtaaactttcacatcaccaagtgcctatttggcaatctattgaaattatggatagatatgccatgaaaacgttgagtgaaaccccaaattctgaacggtatgatgcttggaaacagtacttggaaatcacgggaaataccgtatgcggtgaaaaaccgattagtgtgatactaagtgcattatccaagattgaaggtgccagagctacaaatattaaatttcaatggcctagttattcacagagttctcacgtgacaagtattgatgatagtagcgttagttacacttcaggatatgttactttagattag

SEQ ID NO: 3050 - DNA, 3264 bp, Saccharomyces pastorianus
atggcggataaagaacagcacaccagtgtgaaactcgagaataataagtcattaagggacctgggggtcaacgtgctttcccagagcagtttggaggagaaaattgctaatgatgtgaccaatttcagcaatctgcaaacgttgcagcaagaggagacccgtttagagcgcagtgagactgctctgcaaagatatgttggcaagaaaaacttacttacaagaaagttaaacaatgccactaggatatctgttaagcaaaacctccgaaaccaaattaaagatttgcaaactgatgatattgaacgagttttgagagatattgaagatattcaggcaaggattaacgatttgaaggtgcagataaatcaaggaggtgaaaacaagactgctaaagtgggattgcaaaggcctggagaaagtgagaaggagtttttgattagaactggtaagatcactgcatttgggcataaggcgggtttcagtttggacacaacagatacagagtatggggataatgaggagcaagagggtaaagatttcgaggtggctactgaacaaatggtacagaacttaactgatgaagatgacaacctcgatgaccaagattttaggatgagtggcgaagaaagtgaggaatatgaagaagaagaaaacgacgatgaagttattgaagacttggagaatcttgagtttaaaaatcaacctggcgaggcaaaggatgacggagatgaattgtattatcaggtaagattaaaacgatggatcaaacaacgttctgcagatagaccaaagacaaaggcggcatcggagattccggaatggcggaaaccccatcccaatatcccggatgcaaaactgaacaacgagttcagaataccaggtgaaatatattcattactttttaattaccaaaagacttgcgtacagtggctttatgaactttaccaacagaactgtggcggtattatcggcgatgaaatgggtttagggaaaacaatacaaatcattgcctttatcgcagctttgcatcactcagggttattgacagggcccgtcttaattgtttgccctgccactgtgatgaaacaatggtgtaacgaattgcaccattggtggcctccattaaggacggttatattgcattctatgggttcaggaatggcgacgaatcaaaaatccaaaatggacgaaaaggatctagaaaacttgataatgaattcaaatccaactgagttttcatacgatgattggcagaatccgtcaaaaactaagaaagctatagagtcaaacttccatttggaccagctaatagataaagtcgtcactgatggccacatattgattactacttatgtcgggctgagaatacattcagacaagttgttgaaagtgaaatggcagtatgccgtattagatgaaggccataaaattagaaacccagactcagaaatttcattaacctgcaagaaattaaaaacacataatagaattattctttcgggtacacccatccaaaataatttaaccgaactctggtcactttttgatttcatctttcccggtaagttgggaactttgcctgtatttcaacagcagtttgttatacccataaatatgggtggttatgcaaatgccaccaacatacaagtacaaactggctacaaatgtgctgtggcgttgcgtgatttgatttcaccatatcttctacgtcgtgtgaaagccgacgtcgcaaaggatttaccgcaaaagaaggagatggttctcttttgtaaactcacgaagtttcaaagaagcaagtatttggagtttttacattcatcagacttgaatcaaattcaaaatggtaaaagaaacgttcttttcggtattgatattttgaggaaaatttgcaaccatcctgatatacttgatagggaaacaaaaaggcatgatccatcctatggtgaccctaaaagatcagggaaaatgcaagttgtcaaacagttgctgttactatggcataagcagggctacaaggcgctgcttttcactcaatcgcgacaaatgcttgatatcctagaagattttatagccatgaaggatcctgatttatcagagctaaaatacttacgaatggatggtacgacgaatatcaagggaagacagtcgttggtggatcgatttaataacgagccttttgatgttttcctgcttaccacaagagtcggggggttaggtatcaatctaactggtgcaaatagaattattattttcgatccagactggaacccatctacggatttgcaagctagagaaagagcgtggagaattggacagaagagagaggtttcaatatacaggttgatggtaagtggtactatagaggagaagatatatcataggcaaatattcaaacagttcttgactaatagaattttaaccgatccaaaacaaaagcgatttttcaaaattcatgaactgcaggatttgttttcacttggtggtgaaaatggacactctacagaggaattgagtgaagaagttcaaaagcacaccgataatttaaaaaattctaaatcgcaagagagtgacgattttgaacagctagttaacctatccggtgtttctaaactagagagtttttataacggtaaagaaaaaaaagaaagcaacaagtcagaggacgatagattgattgaaggtttgcttggtggggaaagtaatttagagacagttatgagtcatgattcggttgtgaactcccacgctaacagttcttcttccaatatgattacgagggaagcatctagagtagcaaccactgcggtaaatgcgctaagaaaatcgagaaagaaaattaccaagcagtatgaaatcgggacacccacttggacaggtagatttggtaaagcaggtaaaatcaagaaaaaaggtacattaagaaataaatcggctgggtcagctgccattttgggtaacattgctaagtcgcaaaaggaggcgtccaaagaagtacgccaagaaaatcatgacgatgatatcgacgtggtaaaatccgaagagtttgatcctaataccaagatactaaaagatattcaaacatatttgcaaaatcaaaacaattttttctctccaagtgttagcatcatcgataatattggggttgaccttgccgataaaaaagatgttatcaaagttagagcgttattacgaaccatagcgcaattcgataaagagcataagggatgggtactgaatgaagagtttcggaatagcatcgactga

SEQ ID NO: 3051 - DNA, 696 bp, Saccharomyces pastorianus
atggaacgattacattcactagaatccagtttgcctccagagcaaccccccacaaagcaagctattgataacctcaacctagaactctctcaagaattcaagctagccgccaatgcggtaacaagactgtatagagtagccaatgaaaagaactctttaacaaaacaccaagggtacctgacctgtttagatgatatgctgtatgcgctggactcaaatatgacgactgatgagttaaaggcatggtgttacaaacaaaaaaatgatattttgtcaaattctcaggacaagtccataaattgcgtaaaagaaaaggaaaggaaacccaaattgagcgaaaaccagcaacgtgaatctgagactcaaaaagagcattccaaaagagattacgagtctaaatataactttaacttcaatgaatcaaattcgaatctcgcagatgccaatgtaaacgtcgtacctaaatttagactctccgttcctcccttgagtgttgagcacccaccgagaaatgctaatcgtataaaatcctggaaaatacgaacaataaatcacggtcggggggatatgaattccaatgacgtaacagcgttagaaaacgagcatgaagagacccatcatgaaaaaaaaccgaaactatcctctgatttggaggcaggtaaaatggaaatccatgaggacatggagttggaatag

SEQ ID NO: 3052 - DNA, 657 bp, Saccharomyces pastorianus
atgggccgtggtaagttaatattgatagaaggcttggatagaactggtaagactacacaatgcaatatcttgtaccaaaaattgttaccggattgtaaattattaaagtttcccgaaagatcgactcgaattggaggactcatagaccaatatttgacggacgatagtttccggttatcagaccaagccattcaccttcttttttcggcaaacagatgggaaatgattaatagcatgaaagaagcattgctggaggggaagaatatcatcatggatagatatgtttactccggagtagcatattccgctgccaagggtacgaacgggatggacctaaattggtgtttacagccggacataggactactcaaaccagatctgacattgtttctaagcattcaagacgttgctagtaacgcagtaaaggatggatttggagaagaaaggtatgaaactttaaagttccaaaaaaaagtgaaacagacgttcgtaacactattggaaaatgagataaagaaaggtgatgagtcgatcaagattatcgacgtcagcggtaaggatatccaagaagtggaagcgctaatttgggaaatagtagagcccacgttgactacagaaatagatcatgataatttttcattttttcaacataaatag

SEQ ID NO: 3053 - DNA, 2811 bp, Saccharomyces pastorianus
atgttatcagttcgcaggttttctatgtacgtattaagatccttacggctacatctcaagaaaatcgttgttacacttctagccgtccaactgttgttcattactacttatgtgctgaatggccattcgttgattatggacggcagctggagatcatttaccgcaccttttttacagccgcttacacctaccaccaaaaaccatacatatcctgtatttgatttgaaatcaacggacagtataaccagactatacgaaaaaatgaatttcgacacttcaggagaatggatcgatacatacaccctgaagaacgatctcctcactatgaaaatgggccctgacaaagggcgggttttggactcggtggacgatttgaggtactataataacgatccgaggttaatatggtctgttgttctagaccacttgctagcatccgactctaatgaatacgatttttcgtggtatgattgggccagctttgaatcgttgaacaaacttatcgctttgaaggatacaaacgtctcttgccaatttgtttgcgaaaacgctttcgataaggacgtactggaaagcgtggagaaggaaatccaagaacccttatttatcactaataggaataaatatgacgaagaagtttggtataatagggaaagaaagatgctgaactctaattcggtaacgcaaattgtgcacgaccactgtaaagacaatgacgtatactataagggtgctcctttcgagcttcccttcattatcagtgaattatatgggaaaatgaggccagaagtttatgacttgcatgccaagaatcacttattatatttcggtgccacaccgttgtcgctgactgttttagatagtgataaagaagcgtacagaattaatttaaaggaaagtgattcatcccaatccaatattgtacaatccaaaatgttgcaaggctacattcaaaggcacactaatgaaatgcaaaacggcgatcttcttttcaatcacaccttaacttttgagaaattcttgcaccacaaatcgactgaaaaacggaaacttgacatcgaaggtttagataaaacaatattttctaaggaatatctagacctatctccatctgattttcacttcgatgccaagacaaaaatcggtgaattggaggccaagctaagatccgaaggtctgtcgttgcacgatacccggtatttacaaagtttaaaaacgtctattaggacagctcctgcattgcagggaaagtattttgcagaggcaagcgaggtggctgatgcaagtgctgatgggcatcatagagacaaaaggtttctgtcccttggatataatctcctgaacgatcctcaggagtttgaagctagattgagctccatgataagaactttccaaaagtttaccaaggctaatgggttgatttcttggttgtcacatggtactttgtatgggtacttgtacaatggattaaaattcccctgggatgtcgatcacgatttgcaaatgcccattaagcatttacactatttaagtcaatatttcaatcagtccttaatattggaggatccaagagaaggtaacggaagatatttgctagatgtaggaagttccattactgtgagaactcacggaaatggcgaaaacaatatcgatgcccgtttcatcgatattgactcaggtatatatattgatatcacagggctgagtgttagttctgatgcggctagaaaatacatggccaagtttgttgaagaagaggagagttcagacaaggacttctccactctcatcgaagactacaactttgatgaaaacgagaaatttgatgaagttgatgactgtgaagactttgccaaatacaccgtatatgaactaagagaatgggtcaactctcatccagacgattttgacaaatcagaaaaggacctagtgaccaaagcatacaaaaaagaacttgtaatgtcgaaaagcgattctcctgaaagagacttaactccaaagcaaaggtacttgctgaataaaaaatataatctctttaattgtaggaataaacacttttccagtctaagcatcttatcgcccttacggaatacaatgttcaatggtgtgccagcgtttattcccaataaacctataacggcgttgaacaacgagtatgtggttccaccgagatacgggtttttgacatttcaagggaaagtgtatctacctgaactgagatactggtttttgtttccagatgtaaaaaaatttgcaaatttacaatcgagagaacccaagataacacggttggaaaatcccctaaatgacttaaaattcagtgatataaacctgctattaacaaatatcataaagtgtgatttccactccgtatttgccagtctgttcaattctctcaatagcactgtctaccgacttaaagagctagaaatacaatatgatcctgacttgagtgaagaagaaaaaagaagtctattaaagaccttaaggaatggtggattgtcgaagaacatgaagtctcctgagaaagacccaataatatatatctatgaaagaaaactatggggaaaagtgaaaaaaatactgaatgctgcaaatatttataatattgcttcccaggttgaaaataaaaaaattgaagagttcgttaaagtatctaaagacctatttgaaagaaaccttgaagagttcaatattctcgatagtgacaatggtaaaacggtaattgacttgaattccaaaggcttgaaccttttcggtgataataagaaaacctcaaatgtgatatttggttctgacgaaaaatattaa

SEQ ID NO: 3054 - DNA, 423 bp, Saccharomyces pastorianus
atgtcaaacgcttgggaggatgtatggggatcagacagcgatgctgaggttgagcagtcgccggatttgctaaaattaagagatgaacacagcaaaagagggtatttggatgggattgtaagttccaaagaagacaatctgcaacaaggtttcgatgacggctttcccactggggctcaattaggaaagcaagttggcacaattatagggatcttacttggcttgcaggcgcgctttggtgatgaagatgaagatctcaggaaggcttacatcaacgctcaaaaagaattacaaatcaataaagtgctcagcaaatcaatatttgatccgaattttgatttgcatgaaaaacatccagtcataatcaagtggactgaaattgccaacgtttattgtaaaaaatatcatgtagcttctatttaa

SEQ ID NO: 3055 - DNA, 975 bp, Saccharomyces pastorianus
atgtccaccaacttcgaaaaacactttcaagaaaacgtcgatgaatgtactttagaacagctaagagacatcttggttaacaaatccggcaagaccgtcttggccaacagattcagagctctattcaacttgaagaccgttgctgaggaattcgctaccaagccggaagaagccaagaaggccattgagtacatcgccgagtccttcgttaacgacaagtctgaattgttaaagcacgaagtcgcctatgttttgggtcaaaccaagaacttggacgctgctccaactctaagacacgttatgctggaccaaaaccaagaaccaatggtcagacacgaagccgctgaagccttgggtgccctaggtgacaagggctctttggatgacttgaacagagccgctaaggaagacccacatgttgctgtaagagagacctgtgaattggccatcaacagaatcaactggacccacggtggtgccaaggacaaggaaagcttgcaacaatctctatactcgagcattgatccagccccacctctaccattggacaaggatgctaccgttccagaactacaaacactattaaacgatccaaagcaacctttgttccaaagatacagagccatgttcagactaagagacatcggtaccgacgaagccgtcttggccttggctactggtttcagcgcagaatcatctcttttcaagcatgaaatcgcttatgtctttggccaaataggtagcccagctgctgtcccaagtttgatcgaagtcttgggcagaaaggaagaagctcctatggttagacacgaagccgccgaagccttgggtgccattgcatccccagaagtcgttgatgtcttgaaatcttacctgaacgatgaagtcgatgtcgttagagaatcttgtatcgttgccttggatatgtacgattatgaaaatagcaacgaattggaatatgctccaactgcttaa

SEQ ID NO: 3056 - DNA, 1194 bp, Saccharomyces pastorianus
atgatgagcaagacaacgaaaagagtctccagcatcaggaaattggcagtgtttgcactagtagccctggtcacgttggctttggcagttcgatttttattctacaactccaatgccactgatttacagaaaatgcttcaaaacttgcccaaggagatttcgcaaagcattaatagcgccaatactattcagagcaccgatctggacctggtccaacattttgaaagtttagccaaggaaattagacatcaacaagaggtacaagcaaagcagtttgaaaaacaacgtaaagtcttggagaagaagatccaagatctgaagcaaaccccgccagaggccacattaagagaacgcattgccctgactttcccatacgattcccatgccaggttccccgccttcatttggcaaacctggtccaatgacaaaagtcccgaaaatattcaagacataaagggcatgtgggaaagcaagaatccaggctttgcacatgaagtgttgacacacgacgtgataaacgcgttagtacatcactatttctattctatacccgaaattttagagacttacgaagccttgccctccaccattttgaagattgattttttcaaatacctgatcttgttggtccatggtggtgtgtatgcagatattgacactttccccgtgcagcccattccgaactggattcctgaggagttgtcaccttccgacatcggcttgatagtaggtgttgaggaagacgctcaaagaccagattggagaaccaagttcattaggagattacagtttggtacgtggattatacaagctaaacctggtcatccgatattgagagagatcattgccaaaatcatagagaccacccttcaaagaaagaaagaggaccagctgaatgttaacctaagaaacgacctgaacatcatgagttggacgggttctggtttgtggacagacacgatcttcacatattttaatgattttatgagaagtggggttagagaaaaggtgacatggagattgtttcataatctaaaacaatcaaaactgttaagtgatgttttagtcttccccaagttctcgttcaattgtccaaatgaaatcgctaatgatgatccgtacaagaaactttattttatcacacatttggctgcgcagttttggaaaaacactccaaaagtggaacaaaaataa

SEQ ID NO: 3057 - DNA, 1272 bp, Saccharomyces pastorianus
atggatgttgatatagggaattattttaagcagaagtgctatgatgacaaattgttagatttcatccgatacgatgtcaaaacgcctaaaaggatcaaatacatattacaaaagtccatggcgatggatgaagaaagtgtacgattacaaagattttaccaattggggctagacctgaagttgaagcatttcaaaaggaaatcattaaagaagcaagggcgaatcaaaaatgctagtgaggagttgttacgattagccaatgaacaattgaaactatttaataggatagtagagagagaaaccaattggataatctacccgttatgggtaatggccaagcaattgatttgtctggcaaatgaatcaaacgaactcaatagagactctattgaagaatgtgggcgtaccatccatagaagttttaccatatgtctcaatgatagaaacccaagactgaatgaaaacaagaaaatcggatgctacatgtttgccaatttagaatttgccatctatcatcgattaaagaataaagatatgattaaaaacctggtgaaagtgctcgagagccgagtaaatgctcgggatatcccgcccttgaatcaaagtttggccatagagcacaaatctcagatagtgctgtataattactatttgggccaatactatggatgcctggaaaatgaccacgaacgcggattcttccacctaaatgaggcactcttgcaatgtccattgctctatgtggaatccacaggcaagtttgtcttacagcaccaaatggaaaagataatggcactggtggtcccgctcgggcttctaaccaaaaggctgtatcctcgttgggaccatccagtaataaaagggataatcgttggaagtaagcgtttgggccaagtttatccgaccttagtgcgcagtgtgatcacaggaaacttgccactttttgatgccactatggccaagcatgagaggttcttcctgaaccaaggcctgcacgtcacaatggcattacttcgagaagtggttttcgttcgtttggtacagcggtgttggcaatggggcaacgaccagaaaagcgtcatgcccttacatatcctgctggcaatgactttccagtccgatcccgcggacgagagcgaagaagagcaattgaattcccttgagtgccgcttagcgagtgccatatcaaacgggctagtacgtgcttacctttctcactccaaccgttgtatcgtttttagcaagaaagaacctttcccccatgggaattga

SEQ ID NO: 3058 - DNA, 3444 bp, Saccharomyces pastorianus
atggatcacgaagataataataacaatgttggcagcaataggctgtattcagagcacgcaaacctcgggcctccaacttgggtgagttccaataatattaattccaacaatagcgataataacaataatgacaacaacgatacaaacgcaagaccacaaatgcctttccgaagtagggaaatggcaattccagatagatatgcaaatgaagttaacgaccaagcactaaacaatacatccaggttcaataatgcccaacgggaaacgctatcactcaatagcactggacaacagctaaaccagcggttttcatcgacatttcaaccacagcagcaaacaactgcgctgagtgggatcgatattaacactgtaaacacaaatcttatgaacggcgttaacgttcaaatagatcaattaaaccggctattacccaatctgccagaagaagaacggaaacaaatccacgaattcaaactgatagtaggcaaaaaaatccaagagtttctggctgtcatagaaaaaagaaggaagaagatactaaatgaaatcgatctcgataacctgaaactgaaggaactgcgcatagacaactctccacaggcaattagttatttacataaattacaaagaatgagactaagggcactggagaccgaaaacatggaaattaggaatttgagattaaaaattttaacgattatagaagagtacaaaaagtcattatatgcatactgccattcgaaattaagaggccaacaagtggtaaaccccacagataatttcgttgtttggataaactccatagatactaatgaatcatctgatttgaaagaaggtttacaagatctttcccggtattcaagacaatttatcaataacgtactttcaaatccatcaaatcaaaacacatccacaagcatgacccgtaagtcacctgtgtttgccctaaacctactaccctctgaaatattacatctgatattagacaaactcaatcaaaaatatgatattgtcaagtttctcaccgtttccaaactatgggccgaaataatcgtgaaaatcctctactacagaccacacataaacaagaaaaaccaattagacttgtttttaagaactatgaaattaacgtccaatgaaactgtattcaattatcgtttgatgattaagagactaaatttctcatttgtgggcgactacatgcatgatgtggaactaaattacttcattggttgtgtgaatttggaaaggctgaccttagtgttttgtaagcatatcaccagtagcccaatatcggcagtcttaaaaggatgtaaatttctccagagtgtggatatcactggaataagagatgtgtctgacgatgtatttgacactttagcaacatattgtcccagagtgcaaggattttacgttcctcaggcaaggaatgtaactctgggttcactgcgtaatttcatagttcattccccgatgctgaaaagaataaagataacagcaaacaataacatgaacgatgaactagtggaattattagccgacaagtgccctttgcttgtagaagtcgatataacgttaagtccgaatgtcagagactctagtttattgaaactcctcactaaattgacgcaattaagagaatttaggataactcataatacaaacataacggataatctttttcaagaactttccaaagtggttgatgacatgccctctttaagactaatagatctttcagggtgtgaaaatatcacagataaaacaattgaaaggattgttgatttggcccctaaattacgtaacgtttttttaggcaagtgtagccgaattaccgatgtatcattgttccagctatccaagctaggtaagaacttacaaaccgtgcactttggccattgttttaatatcactgacaatggagtaagagcactgtttcattcatgtacaaggatacagtatgtggattttgcatgctgcacaaatttaaccaacagaactctttacgaattagcagatttgccgaaattgaagagaattggccttgttaaatgtacacaaatgactgatgagggtttattgaatatggtttccttacgcgggagaaacgacactttagaaagggtgcatttgtcttattgctctaatttgacaatttatccgatatatgaactattaatgtcgtgccccagactttcacacttgtctttgactgcagtaccatcattcttacgtccagatataacaatgtattgtagacctgcgccttccgatttcagtgaaaaccagcgccaaattttctgtgtattttcagggaaaggcgtacacaaacttcgtcattatttagtcaatttgacttcgcctgcatttggatcacatgccgatgtaaacgatgttttgacaaaatacattagatcaaaaaatttgatatttaacggtgaaacgcttgaggatgcccttcggagaatcattgtagatttaaatcaagactctgctgccattatagctgctacggggctaaaccaaattaacggacttaataacgatttcctgtttcagaatattaattttgaacgaatagatgaagtattcagctggtatctcaatacttttgaaggcattagaatgagctcggatgaagtcaactcacttttactgcaagtgaacaaaacattttgcgaggaccctttcaacgatgtcaatgacgaccaagagtatgtagttgcacctggtgtaaatcgcgagatcaataacgaaatgtgtcatattataaggaagttccatgaattgaatgatcacattgacgactttgaggtgaatgttgctagtttggtaagagttcagtttcagtttactggctttttacttcacgaaatgactcaaacctacatgcaaatggttgaattgaataggcaaatctgtttgatacaaaagacggtacaggaatcaggaaatttagactaccaaaaaggactcttgatatggcgacttttattcattgataaattcataatggttgttcaaaaatacaagctatccaccgtagttttgagattatatctaaaagacaatatcacattgttaactagacaaagagaattattaatcgcgcatcaaaggtccgcatggaataacaacaatgacaatgatattaatcgtaacggtaataccgtaggaaatatcgtgttagatactgacaccaacaatgatgaaactaatagcggaaatgatgacaatgaaacagaaaatccaaacttttggagccagtttggaaacagaatgcaaatatcacccgaccaaatgaggaatctacaaatgggacttcgaaatcagggtatggttagaaacaataataacgctaacatggaggagtcaatgcctgatactgccatagattctcaaatggatgacgcatctggaacaccagaagaagacatgttataa

SEQ ID NO: 3059 - DNA, 612 bp, Saccharomyces pastorianus
atgatggcttcattacctccagtgtattcattcccgccgctttacacacggcagcccaattctttaacgagaagacaacagctaagtacgtggatagatatcatatcacaatattgtaagagcaaaaaaatctggtacatgtcagccgatggcactgtgatcgatgacgacagatcagaaaatgggaaaacagataacgaagattcgaaaaaagtcggtaagaaccttttcaataacgaagaaattcaaagatctgtatcgcaggtatttatcgatgaaatttggtcacaaatggtgaaagaaggcaagtgtttacctattgaccaaagtggtaggaaaagtaacaataccacaactacgaggtatttcatactgtggaaaaacttggacaactgggcttcattgatattgcagtggttcgaagactccgggaagctgaaccaagtcattacgttatacgaattgagcgaaagtgatgagactttaagttgggaattccacggtatgccggaaaacttgttatattattctttgaagccattgtgtgatagaaacagggctacgatgcttaaggatgaaaatggcaaagtaattgccattaaagttgtttag

SEQ ID NO: 3060 - DNA, 2172 bp, Saccharomyces pastorianus
atggactgggcaatcaaagtggcccatccggaattactgtacggggaccctaaattgtcgatagcgtttattgtgccgagcctgttacacatcatcatagcgttcgtgttactaggcatctgcgcgtctgactttctttgccccaatgtggcccatatttcagaccccaacagtcttcgatcgaatggttcgttagtagcgaaaccagcgtcccatgcttctcatacgggggccttaatggcgattctgctgtcatggtgtaattcttcacctgacctgttctcaaacctggtgagctgggcgacctctaccagagaaacaaggtctgcttcagcatcgctatctatcggcgaagtgctaggtgcgtgcggaatcatcatgtgcatcgtggaaggttccatcttcatgattatgtccagaacccagattgaaatctcgcagatccaaaaactttctattattagggatttggtattcactttggtcgccatgtgcatgatgagttacatttcttttatgaaccaggtcactgtgctaaattgccttttaatggtttttctttacgcattttatttagtcgttaaactgacttttaaattcaatcattccccagaacccgctgctaacgttggtgctgactcggacctcagggagaactctgtctctccgtcttcagatggctcgcttatggcctcaggcctactaccgcctgtacagcccggctttgacgtgtctaattctttaacacacggcatcaagccaagtttactatctgccatggattttaatagtttcttatcaatgctcgaaaactcgtccatggaggaagatgactcaaggaatgaaatggctgaactaactaccttgcgtagcctcacaccacctaaatactggcccactattacaacagctgctgctggcgcggctgaacgaccctttagtgagccaacaaacggctttgggcaatatgctgattctgatagagccataaatagttctcctgcaatgttcgctccttaccacgataactctgacgacgaagaatctgaagaacggacatcactagaacccccaatacatgatcacttcaggacacgggagatgcgacgaatctcaaagaaatctgcaggttggatcttaaaaatatttttaccacatttgtcaaatttttctcaaaaatctacctcagatgcgatattctccattatcaccattccatttttcattgtgttcaagttatcatgcccacaaccacctacagatatgctcagttatgacgctaccctaaacaaatattctttaacaactttgcccatagttttgttatttattcagtcggttactgcgccattcctcttttgcaatacgctttctgttcttctggccgcccatctgggatatttcgtttatcttctcccttttattgtatcccttggtttaattctactattaacggtgtttatcacaaaggtaaatttgcataataaattcactctatcgttagatagctcgaatattctacaagaaaaactacaaaaaagaaagttactcgaaagactcaatacctgcatccaggtgattttcttggccgtcgggataataaatattatactatggatatcccttttagccaactgtcttattgaaatgatggaaatatatcaacaaatattgggattatcgaaagccatactgggcctaactatttttgcatggggtaattcaattggtgatctgatctccaatatttccatgtgcaggctttacaagacgcaaactcatcatcaagaaaggatacacttggcaacgaagtttttcatgatatcatgtgcatcttgtttgggtggtgtaatgctaaactccatgggcggtataggtttcagtgggctagttgcaatgctttttattggcgtttttaatgataacgactggtggtttttaagaaaagtcaaattacaagagccgagccaacttgacgatggattaaattacaaattcgtcgtttcttgcattttcattattctacagattattctcttgcttctattctttggcggaccgaaggatattaagcgatacctcgcaagagatatgaagttagtcggaatgtgtatgtgcgggttatgggcactcgccactttaattaatgtacttctagagctttttcagtag

SEQ ID NO: 3061 - DNA, 3357 bp, Saccharomyces pastorianus
atgagttcgatttatacgtctacggaacccaccaattcagccttcacaactgatgactacaaaccacaattggttgaaggtgtaaattcggtgcttgttattgggtcaggtggtctttccatcggccaagctggtgaattcgattacagtggttctcaagccatcaaagccctgaaggaggacaacaagtatacaatattagtcaaccccaacattgccactaaccaaacgtcccactctctggcggataagatctactacttgccagtcacaccggagtacatcacatacattatcgagcttgaaaggcccgatgctatactcttgacctttggtggccaaacagggctgaattgtggtgttgctctggaccagtctggtgttttggccaaatacaacgtcagagtcttgggtactcctatcaagactttaatcacttctgaggatagagatcttttcgcatctgccttgaaagacatcgatatccctatcgcggaatcgtttgcctgtgaaaccgtggacgaagccttagaagctgctgaaagagtcaactaccctgtcatcgttagatctgcattcgccctgggtggtctaggttcaggtttcgccaataatgctggtgaaatgaaagaactggccgcacaatctttatctttggctcctcagattctcgtagagaaatcattgaaaggttggaaagaagtcgaatacgaggtcgttagagatagagttggcaattgtatcacagtatgcaatatggaaaacttcgacccgctgggtgttcacactggtgattctattgtcttcgctccatcgcaaactttatcagatgaggaatttcacatgttaagatcagcagctattaagattatcagacatttgggggttattggtgaatgtaatgttcaatacgccttgcaaccagacgggttagactatagagtcattgaagttaatgcccgtctatctcgttcctctgcattggcctctaaggctaccggctacccattggcatacacagccgctaaaattgggctaggttatacattaccagagttgcctaatccaattacaaagactacagtggctaattttgaaccctctttagactatattgtggcaaagattcccaaatgggatctttccaagttccagtatgtggatagatccattggctcctctatgaaatcagtcggtgaagttatggccattggcagaaattatgaagaagctttccaaaaagcattaagacaggtggacccatcagtcttagggttccaagggtccactgaatttggcgataaactagacgaagctctaagaactccgacagatagaagagtgcttgccatcggccaggccttgatccatgaaaactatactgttgaaagagttaatgaattaagtaaaattgacaagtggttcctctacaagtgcatgaatattgttcatatatataaagagcttgaatctgtaagctctttgagtggtctaagtaaagaccttttgcaaagagctaagaaactagggttttcggataagcaaattgcagttactattaatgaatactcccacacaaatattaatgaattagaaatcagaagtttaagaaaagcttccggcataattccattcgtcaagagaattgatactttggccgcagaattcccagctcaaaccaattatttatataccacttacaatgctaccaagaatgatgtagagttcaatgaacacggtatgcttgttttgggttctggtgtttaccgtattggttcctctgtggaatttgactggtgtgctgtgaacaccgccaagactttaagagctcagggtaagaaaacgatcatgatcaactataacccagaaactgtctccacagattttgatgaggttgatagattgtattttgaagaactttcgtatgaaagagtaatggacatttatgaaatggaacattctgaaggttgtgttatttccgttggtggtcaattacctcaaaacattgctctaaaacttcacgataatggctgcaagatactgggtactgatccaaatgatattgatagagctgaaaatagacacaagttttcttcgattttggattccattaacgtcgatcaacctgagtggagtgaattaacatcagtggaggaggccaaagtatttgcatctaaagtaaactatcctgttttgatccgtccatcatacgttctttccggtgcggcaatgagtgtcgttaacaatgaagaggaactgaaggccaaattgactttggcatccgatgtttctcctgaccatccagttgtcatgtccaaatttattgaaggtgccgaagaaattgacgttgacgcagtagcttatgatggtaccgtcctggtgcatgcaatctctgagcatgtagagaatgcaggtgttcattccggtgatgcttctctaatcctaccaccacagcatctttctgatgatatcaaaattgccctgaaggatattgctgacaaggtcgctaaagcttggaaaatcactggtccattcaatatgcaaattattaaagatggagagcatactttgaaagtcattgaatgtaatattagagcttctagatccttcccatttgtttcaaaagttttgggtgtcaacttcattgaaatttctgtaaaagcgttcttgggaggtgatatcgttccggaaccagttgatttgatgctcaacaagaaatacgactatgttgccactaaagtaccccaattctcctttacaagattggctggtgccgatcctttcttaggtgttgaaatggcatctactggggaagttgcctcttttggtaaagatctgattgaaagttactggacggctattcaaagcactatgaactttcacgttcctttgcctccaagtggaatattatttggtggtgacttgtctaaagagtatctgggccaagtggcttctatagtggctactattggttacaagatttatgccaccaatgaaaataccaaaagctatctacagaagcatatcaaagagaagaatgcacaaatatctttaatcgatttcccaaagaatgacaaaagaaaattgcgtgagctattccagaaatatgatataaaggccgttttcaatctggcttccaagaaagctgaaagcactgatgatgttgattatgttatgagaagaaatgctattgattttgctattcctttattcaacgaacctcgcactgctttactatttgtcaagtgtttgaaagcaaagattgctgaaaagataaaaatcttggaatctcatgatgttattgttccatcagaagttcgttcatgggatgaatttgttggttttaagccggaataa

SEQ ID NO: 3062 - DNA, 1503 bp, Saccharomyces pastorianus
atgttcatcagtacaagatgcagaaataaaggcttcatccttaggaactttgtatgggcaaaatcatcgatttttcgttccgtttcgaatcaatcggtgcagccaaaagtggctacaaaaccagacggtattttcagctatgctctgatagacaacaaatcctacatcaagatacgaggacccgacactgtgaagtttttaaatggattaattacctcaaaactattgcctaattttatcaagaaaaaccttaccactatagaaaacagtgaggcatctccagaaaatgacaagaataaggccaccctgaatgttcctgtgcccgagttcgatgcgagcctgggaaattggggactatacaatgaaacaggtactcaagggccttatatctccagatttggtttgtattctgcctttttgaacggtaaggggaaactgataacagacacaattgtttatcctacacctgtatcagcaagtgagggaactccgaactaccctgaatatttgttggagcttcacgagaatgtcgttgataggatcctacatgtgttgcaaactcacaaattggccagtaagattaaatttgagaaaattgatcatctttccctaaaaaattggaacgttgaaatccaattccccaatttgcctgaagatatggaaaatccatggtttgacaatttgttagatcccatggctttggcaaagacatccgaagatgcaagtaatttcgctgccaatgttttacagtcccttttcaaatcggatcccaggattttgggcgtttatgtggagagaaggaccgagtcaatctcaagacacaattccacctttccacaatctttcaggctcgtgacctcacagcaagtggaggatccatctaaattatttaattttgacgtttttgagttctccttccaaacgaagaaaacgaaccctgctgaaatcagacagaggaggtttcaaaacggtcttgtagatagtactcaggattacaagcctgagacattactgcctttagaactgaatttcgatttcctacccaatactataagcacaaataaaggttgttatgtaggtcaagagttaacggctaggacgtatgctaccggtattctacggaaacgtctagtgcctgttaagttagaaaatcacagccttttgaatacggatccagagaaaaaatacgcagaaatccacctagattcaacatcgacaatcgaaaaagatcttgctcatcttgactcagcggctgttaatccgttctctaataaaacggcagcactgcccaagaggaaacaaagaccagccggttcgttgattgctaacgagggacaatacggcgtagcattattgaggattgaacatttctccgcagccttctcatctgatgaccctgtagagttttctataactacagcaaagggtgaaaacgtcaaggtcatacctcaaagaccattctggttcgaaaattggcaagaaaacaacgacctttgtaaataa

SEQ ID NO: 3063 - DNA, 1350 bp, Saccharomyces pastorianus
atgacaccagacattttggttaagttcaaaggtgcaagcaaagacattaaattgttatgggcatctgtgtttcttagactgttgtcctatggtttaacaaaccaagttttaacgttatttctcaatgcaattaatatggcagaagataaaatcggtttgttcatgtcgttgacattggctggagacgtgatttgttcctatattttaacttggtatgcagattcttggggtcggagaaaagtgctaatatatggttgcgcaatgatgctaatgagtgggttggttttcagtttcagtgaaaatttcactcttttgctaatatttgctattattggtgtgatatcaccttcaagtgatgaagttggacctttcaaatccatagaagaggccatgattgcacatttgagtcctcataatacaagacccgaaatatatgctattcatgccttggttggaacaatggggagtgcattaggtgcaatagtctgtggtgtattcgtggatctcttgaaaagaaccggtgtagcccatactgatttacaatgctataaattagttttcttattgtatgcctttttcgcattttgcaagatggtcatcatgctcttattatctgatgccacagaaatggatgggaattatgaacatattaatcaccacaatgaagagacgccagagcctctggatgtcaacgatgagaccgcaccattaatgagacaagcgacccatccagaggaaagatccaatagtttatccaaagaaacagtttcagtcttgctgaagttgttagtcatctttatggttgattcacttggatctgggtttatgacaagtggctggatggtttattactataataagcaatttctaatgggatcgctggcattgggtaccttgtttttcgttacccaattggttatggcttcttctaccattccatcatctatcattgccaggtatttcggcccagtaagagccacattactggtccagattccgtcagggatattctcgattcttatccctatggcccaagactatttacccttatctattctttttttgaatcttcattttgcaacaactgcgatggatgtgacgccaagacaaattctattgacaaatatcattaagccaagagacttaaccaaagttatgggggtggtaaacattggtaaaacatttgcacgttgcattggcccaatcttcacaggactacttgccaagaataactacttatggctatgttatatcattagtgggtccttggtaatattagcagatttgatcctagcatgcatgtttttgggagtggatgctaagatcaaaaaacaaatgaaccaccgttaa

SEQ ID NO: 3064 - DNA, 816 bp, Saccharomyces pastorianus
atgatgagaaccaccctaagaatcagaggacacgcgtcgcatgttgctcaggtttgccagatgaggacggctgcgagtagcgcaggtactgctgcagcagggacagctggaatagtaaagaaaagttacaatagtacagaaagcaaatctgcgtttgcagcaaaaccggaggctagcaatggaaacggcatgaaggaatattcgggtagtcttaacaccagactcgagggcacacctttggaatcccgcagcacgcccactaatactttgaacggtagtcataagccggtcagggaagaaattgactggtacacttcgtggtatgggctaggtatgaagccattcgaatcgcaagtgcagaaggagctggttcaacctttggaacctaaggatatcgaagtcaaaccagacgggttgatttacctgcctgagattaaataccgtaggattttgaacaaggcatttggagcaggcgggtgggggttggtcccaaggtcggaaactatagtaacgtccaaactagtgaccagggagtacgggcttatttgccacggccaattgatcagtgtggccagaggtgagcaagactatttcaacgaatctggtataccaacagccacagaaggttgtaagagtaatgccctgatgagatgttgcaaggatctaggtgtcgggtccgagttatgggatcctgttttcataaaaaagttcaaagtcgaacattgcactgagaagtttgtcgagcatgttaccaccaagaggaaaaagaagatttggttaagaaaggacagacaggtcgagtacccttataaatag

SEQ ID NO: 3065 - DNA, 915 bp, Saccharomyces pastorianus
atggttaagataactactgcagctactgccgtcgcgctagcgacaagtgccgccgctacttctgcgaccaccactttatctccatatgacgaaagagttaatttggttgaattggctgtttatgtctccgatatcagggcccatctagccgactactacgctttccaaggatcgcacccaactgaaacataccccccagaaattgccagcgctgttttcaattacggtgaattcactaccatgttgaccggtatttcaggagacgaagtcactagaatgatcactggtgtcccatggtactctaccagattaaaggctgccattgctcaagcgctttcggacgacggtatttacactgctttaccaacatctacctcaacttccgctgaaactactgcctcttctgctgaaactactgcctcttctgttgaagtcacttcatccaatgacgctgttacctcagcttcaggttccgtcgttaatcctacttctgctgcttcttccccagcttctgctgcttctgtggcttcttctaccttgatctcttcagttattactagaaatggcaatgaaacttccagtagtacttccaacagtaaaatcacatccgttgtatatggtaataatgcaactttgacagccactaaagtctcgactgatgacgctaccattactagctgcaagggtggctgcactaaagaagacaccacttcaaccaaaacccaactttccaccgttgaaaccactgtgacgagttgttcagccggtgtctgctccactttgaccgctccaatcactaccgccacttcatcagcttctcatgcaattgaaattaacacgaacggtgctcataagttcgggaatggaggcgttttgggtgctgctatcattgctggtgccgctgctttattataa

SEQ ID NO: 3066 - DNA, 1848 bp, Saccharomyces pastorianus
atgtcgtcaagaacagaagataaaatttccgatgaacaacagctgcccgctgctagaaagctatactacaactcaagcacttttgccgagccacccctggtggatgaagccggcaaccccattaactacgagccggaggtctacaacccggaccacgaaaagctgtaccacaacccatcgctgcctgtgacctctattcaggacactagagatgacgagttactagagagagtttatagtgtggaccaagaagtggaatatgaagaagacgaagcagacaaaccgaatttgagtttcgcatccatgaaaagttatgctttgacaagattcacgtctttgctgcacgtccacgaggtttctttgagaaatatcaacccggtcccggaattgaggaagatgacgctgcaaaattggaactattttttcatggggtatcttgcttggttgacggctgcctggtgtttcttttgtgtttcagtgtcagtagccccactatctgaactgtataatagacccactaaggacattacctgggggttggggctggttttattcgttcgctcagcgggcgcagttatatttggtttatggacagacaagtcttccagaaagtggccctacatcacctgtttgtttttatttgtcattgcacagctttgtactccatggtgtgacacttacgaaaaattcctgggcgtcaggtggatcactggtattgccatgggtgggatctatgggtgtgcttccgcaacggctatagaagatgctccagtgaaagcacgttctttcctatcaggtctcttgttctctgcatatgctatggggttcatcttcgcaatcattttttatagagcctttggctacttcagagaagatggctggaaaattttgttctggtttagcattttcttgccaattttactaattttctggagattgctatggccagaaacaaaatatttcaccaaagtcctgaaggctcgtagactaatactaagtgacgctgtgaaggccaacggtggggaacctctgcccaaggccaatttcaaacaaaagatggtgtctgtgaagaaaactgttcaaaagtactggctgttgtttgcgtatctagtcattatgttggtcggtccaaattacttaactcatgcttctcaagatctgctgccaaccatgttgcgtgctcaactaggactatctaaggatgcagtcaccgttattgtggtcgttactaacatcggtgctatctgtggtggtatgatatttggtcaattaatggaagtcacgggtagaagattaggcctgttgattgcgtgtgtaatgggaggttgtttcacgtatcctgcatttatgttaagaagcgagaaagctattttgggagctggattcatgctatacttttgtgtttttggtgtctggggtattctacccatccacctggctgaattggctcctgccgacgcaagggctttagtcgctggtttagcttatcaattgggtaacctggcctctgcagcagcctctacaattgagacggaattagctggaaaatatccactagaagtggattcctctggtattgttataaaggaagattacgctaaagttatggccatcttaactggggccgttttcatcttcacttttgggtgtgtctttgtagggcatgaaaaattccatcgtgatctatcttctccagttatgaagaagtacataattcaagtggaagagtacgaagctgatggtgtttcaattactgagattgtggagcaaaaaacagaatacggttctgtgaaaatggttgattctactatctcaaagacatttgaagaacacattgagaccgtttaa

SEQ ID NO: 3067 - DNA, 3873 bp, Saccharomyces pastorianus
atgaactgtcttcgagatttcaagaatggaagacgataccacatcttccagaacttaagcatacgaaatgactacaaactgctatcggtaatggtagtgagtacagtggcaacgggtctggtaccggcagttacttctgtcttgacaggcagggtgttcgacttactatcggtgtctgtacttagtggggcccatcatgatctgtacccgcaactggtgcgaagatcaatggcagtaatggcacttggagttgcctctgtaccagtaatgtggctttcattaaccgcttggatgcgtattggtgaaagacaaggctttagaatacggtcgcaactactggaggcatatttggagacgaagccgatggaatggtacgatgccaacgaaactttgctaggagatttcactcaggtaaacagatgcgtggaggaactgagatcaagctcagcagaggcatctgctgtaacgttccaaaaccttgtcgccatatgcgcccttatagggacatcgttctactattcgtggtcactgactttgattatcctttgtagttctccagtaatcaccgtatttgctgtgatattttccaaaatgatccatatgtacacacaaaaggaaaatacagagaccagcaaagcagctcagttgttcacatggtcgatgaatgccgctcaattagtgagattgtactgtactcagcctttagaaagacagaaatttcaagaaattattttgagctgcaacacgtttttcatcaagagttgtctctatgtcgctgctaatgctgggatcctgagattcctaacattgacaatgtttgtccaggggttctggtttggctctaccatgatcagaaagggaaaattaaacatcaatgatgtcatcacttgcttccattcgtgcatcatgctaggctccactttgaacaatactctacatcaaattgtcgttcttcagaaaggtgaagttgctttaaagaaaattatggctttactggagagtaattccaaacagaatgccttaaatactagaaggcatatccaaccagcattaaactatgccgctagtgatttggtttttgaaaacgtttcgtttgcatatccaagtagaccttcagaaaccgttttgcaaaaagttaatttaagatttcctgcaggtcagttcacttttatagttggaaaatcaggttccggtaaatctacaatatccaacttattattgaatttttacgataactatgatgggtcgatcttaatcaatggccgaaatactcaatcaatccaacgaaaaagcctaatcagcaatatcaccgttgtggagcaacgttgtactctatttaatgataccttaaaaaagaatatacttttaggctcaacaggttcaataagaaatgctgacaccaacatcattggaaataacagtataatcaaagacgcatgtaggatggccctcctggataggctgattctagatctccctgacggactagaaacattaatcgggagcggaggtgtatcattaagcggtgggcaacagcaaagagttgctatcgcccgtgcattcattagagatactccaatattattcctggatgaagctgtctctgcgttagatatagttcatcgcgacctattgatgaaggcaattcgacactggagaaaaggaaagaccacaattatactgacacatgatctaagtcaaatcgagtctgatgatcatttatacgtgatgcaagaaggtagagttattgaaagtggtatccaatcggaattgttggctgactccgctaccacattcagtaaatggtactgtctacaaaacgacttttctgatgcgaaaactatcatcaatacagagactgaggaagattccgtatacaccacggaaagctttaactctcaactggaaactcccaaactcggagtagacctaaacaaattagagtatagtgaaacagatcagttatctttttatgaaacaacccatcgccagagatcgaactacaagacaaaaagaataagagtcgaagacgaagaaaacgtacatactgtaaaacaagaaaatgatatcgaaagctcaaccgggccccaaatcttaagcatttctgcaatcataaaaagaatgatcaaggatattagatataagaagattttgatcttagggttactgtgctctctcattgccggtgccacaaatcccgtattttcatacacattcagtttcctgatggaaggaatcgtcccatccacagatgggaataccggttcttcattttacttggcgaaatggtcatttattgttcttggtgtggctgcagcagatggtatttttaattttttcaagggattcctgttaggtcactgtagtgaatattggattatggatcttagaagcgaaatcatggacaaactaacaagaaagaacatgaactggttttctggtgaaagtaacaaggcttctgaaatttccgccttagtcttgaatgatctaagggatttacgatctttagtctctgaatttttgagcgcaatgactagttttgttactgtatccactataggactagtctgggcattaatatcaggctggaaattaagtttagtttgtatatcgatgttcccgctgatagtgattttctcagctatttatggtggcatcttacagaattatgaaacggattacaaaacatctgtcgctcagctagaaaattgcttatatcaaataatgactagtatcaaaaccattaaatgtctacaagctgaattctattttcaattatcgtatcatgatttaaaaaaaaaaatggaacatattgcctataaacgtgccgttgctacgggctttggcatatcagtgacaaatatgattgccttatgtattcaggccattctttactattatggactaaagctggtcttggttcatgaatacacctcaaagaaaatgtttgaaacgttcaccttgctattgttcactattatgtcgtgcactagtttaataggccaaattcctgatattagcagaggccaacgtgccgccagttggatatatagaattctcgatgaagaagaggatactctagagattgaagacagcgatgcgagagcactagacataagtggtgctgagtattatagagacaagaatatacctattgtttcgatacgaaatctgacattttcctacccatccgctccaaatgtccctatttttaaaaacatgaaccttgaaatgttttgtgaacaaacaatgggaattgtaggtgagtcagggtcagggaaatctacactctctcttttactaacaaggctttataactgtgaggcaaacaacattataattgacggtacagatgtaaatgattggaatttgtcaagtttgagaaggcaaatttcagtagttgagcaaaaaccttcttttttcgatggctccattagagataacttaacttacggctgtctgggtgaaatgcttgaagttgatatttacgacgtactaaaatacgtggggatttatgatttcgtagcttcattacctcacgagctggatacacgtattgatacaaacttattgtcgggtgggcaagcacagagactttgtatagccagagcattattaagaagatctaagattttgattttggacgaatgtacctcagctttggattctgtcagttctcatattatcaacgatcttgttagaaaagggccacctggcctgctgactttggtcataacacatagtgaacagatgatgaggtgttgtaattctatcgctgttttaaaacatggtaaagtagttgaaaaaggaaactttgatgatttatataataaggaaggagaattgtttcgcattgtttctaacagaagttaa

SEQ ID NO: 3068 - DNA, 810 bp, Saccharomyces pastorianus
atggtgaactacggaacacacagtagtgaggctttgagagtgctgaaaacgcctaagtttgtatcaaagtatggcaacgtatcgagcaagcaacgttttttccttaaatggaagatacaagacaagatctgcgagagcaaataccaagagtacttgaatgagtacaacacctttgtgctttatgattgggaaggcagcaacgccgctactgccggcgacgattcttcttacaatatgccctacctgtggcaagaattcataagggagggagtgtcgacaggaaagataaacgacaggcttccgacggtcttcatgaagaagaaattgaggaactctgccatgggtcgctgcttggggcttgagttcctcactgagcccagccagtcgacgcacgaataccgatgtttgtttcagacagtacaggatatcacgtacctgtcgcaattgctcctattcaatagcacacaaaacatcccgatgaggttgaaagtgcacaccatcggcataaatatcaactctggccccaaacgttccgtggtgggcaatgccagcgacactggcatgaacgaagcggtctcgtatatccagccgctgctggaagaatcctctcagatgtaccgcagcctgaactactggaagcttctaaagatagcacgtagagacgcacataatgaacctctggacgggagcacaagcatcaagtcgcaagtcaagcttttactggaccaactggccacgaaccagatgacctcgccctcgatcaccgaccacaagggtcacaactggcttgtattcacaagaagtcagtag

SEQ ID NO: 3069 - DNA, 558 bp, Saccharomyces pastorianus
atgaacaccaacgccaacactatggtaatgaacgatgcgaaccaagcacagatagcgtccacgttcaccaagaagatattggcacatctggacgacccagaccctaacaagatggcccaattcgcacagctcttcaacccaaacaactgcagaataatactcaatgcgacgccctttgcgcaagccgcggttttcctacaaatgtggcaaaaccaggtggttcaaacacagcacgcgctaaccggcatagactaccacgttatcccgggctccgggacgttaatatgcaacgtcaactgcaaagtcaggttcgacgaaagcggcaaagacaagatgggacaagacgcgacggttcccatccaacccaacagcagcggaaacggaaaccgcctcaacgatatgaacaagccaaggcctctgtggggcccatatttcggcctttctcttcaactgatcatcgatgaccgtatattcagaaacgacttcaacggtgtgatatcggggtttaactacaacatggtttataaacccgatgactctctgctgagaattcaatga

SEQ ID NO: 3070 - DNA, 930 bp, Saccharomyces pastorianus
atggagaaaaaaccgaaatgccaaatagcaaggaccaagccgtcgattgaaaacgtcataccatacaaccaattcaagaaaacacagccgcgattcaacggcaacttttcctccttgaccaacgatgaggaatacgtaatactgtttggcggaggtcgagacttggttctaggctctttgacgccctgcgcgagctcccatttgaccaaccaagccggctctcaggaccccagcgaatacgggacagacctctttattctcaacagctgcattgtcatctggttcaatgggctgggctacgggctagaaataccatacatcagcgttctgtaccatgcatcgagacgactgccggagggaagagacgggcttcgactagagattttgctaactttggaaagagacgaagtgttggacatgctataccaaagcctcgcgccaaacaccagcgaattcggcgaggacgaagacgaggtccacaatttggccttcaccatgcagagcgtggagctgaccatcaggcccgaatactcgatatacgatcggcattacaacaacgaaatcgaaacacttttcaccttcgagaacttcggcgtgaacaggggcgatgacctggtgaacaactgtaatgaagcgctagccgtatgcatggacctgcacgggaccgacgcgggagaccaagatcaagaacaagatcaagacctcggcctggggcttgagggtgcgctcgagtccaacgccacgtacgctgggcttggagacaccctccatgtaccgccagtgttccagaacgatggcctagcagacgatctagacggggatctcgttatggacaacgtggtctctaggggcggtccagaagccagcatgtctatggagttctacgcaaatcaaaacctgactggcacgaagaacgcaagagacgaatga

SEQ ID NO: 3071 - DNA, 1413 bp, Saccharomyces pastorianus
atgtcatacaagtcagcaataataggactatgtctacttggagtgatattactcataccacctttagcgtggcattccaagaccaagaatattccggctataattttgataacgtggttgcttataatgaatataacgtgtattgtagacgcggctatatggagtggtgaagacttcctaacaagatgggatggtaaaggttggtgtgatattgttatcaaactgcaagtcggtgcgaatattggtatatcttgtgccgtcactaacataatctataacttgcatgctattttgaaggcagatagtgttctaccaaatttgtcatcgtggacaaagattgtcagagatcttctgataagtctactgacaccgataatagtcatggggttctcgtatttattacaagtgttcaggtacggtatcgctcgttataatggttgccagaacctactgtcaccaacatggattactaccgtcctatatacagtatggatgcttatatggtcactggtcggcgccgtttatgccactttggtattgtttgtgttttataaaaaacgcaaagacgtcagggatattttacattgtaccaattccggcttgaacttaacaaggtttgcaagactattgatcttttgctttatcattatattggttatgtttcccttttccatttactgcttcgttcaagacctccaacaagtgggtggacattatagcttcaaagatacacattcgagtacaatctggaatactatcattaaatttgaccctggcaggccagtttataatatttggctttacgtttcgatgtcctgtttggtgtttctaatctttggattaggctctgatgccttagagatgtattctaagttcctgcgttcaattaaattgggcttcgtactggatctatggaagaattttgttgataagaataaagaaaaacgtgttgggaaactactcaataagttatcctcaggtaaaaagcgccataatcctttctccacagactccgaaaattatattaccacaggtacagaagggtactcccctggtgcaggcacgccgatatctcaagcacatttctatgttgattatcgaattccagaagatcttggaaaatcgcaaaatagaagcaaaaagagcttgttcaatagcaataaagcagacggtatttttaatgatgtggaacttaaagagagcaggcacataccttaccttacacaaggacagaacattgatgacggaatctcactcgacggtttttcaaaagtcacattagattgctcggaaaagtcagataattgtgcaagctcttattttgaaggagaaagcctctgttactcgccgacttctaagcaagaagactttagctcaaatgaacctagttcagaagacaccgcatttcgttga

SEQ ID NO: 3072 - DNA, 1014 bp, Saccharomyces pastorianus
atgttagcagagctatcacacaaagaattgattaaactggcacaaaaaagatgtattccacctttgttggcgaagtttcataagggacaggccggtgggagagtctgtattgttggagggtgtgaagattatacgggagcaccatacttcagcgccaatgctactgctttaatgggatgtgatttgacccacgtcatctgcgaatacaatgcaggtacagttattaaatcatacactccgaatctgatggtgcatccttaccttcggatgagcaacaccaacctggatgttaatatggatgatcagagaggaaaaatcaattccatattggacaggatccatgtcgtggtcattggacccgggttgggtagggaccccctaatgttgaaatccgtcaaagatatcataaaatacatacttgaaaaacatgagggtaagattccattggtcatcgatgccgacggattatatctgataactcaagataaggaggtcaaagaaatgttgaaaagctaccccaaaggtagaatcatcttgacgcccaatgtagtagaattcaagagattaagtgatgccatggacaagaagggggactcgcatgcagagatgggcagcttgatcgctcaggagttgaactgtattgtggtagagaagggccagtcagataagatcttctcacctaatggtgggaaggatacgctgacaaacagcacagagggcagtaacaagagagtaggaggccaaggagacaccttgacgggggcaatatcatgtatgctagcgttcagccgtgccatgtatgatttcaagatctgcgaacacaaagagaaagaggaatcttccaataacgaaaacttgagaaactggatagactacgcgatgctgagctgttacgtgggcagcacaatcacacgtgaatgttctcgcctgggattcaaggctaagggacgtgcgatgcagaccacagatctaaatgaccgtgtgggcgaggtgtttgccaaactttttgattaa

SEQ ID NO: 3073 - DNA, 4584 bp, Saccharomyces pastorianus
atgactggccatgtatccaagtccaaccaaaagcccaaaagccgcccgtcgtcattggcaaggaaggctgctaaaagggctatggccaaagtaaactcaaatccgaaaaggtcatctgctcatttagaacgtgtggtgcaatctgtaaacgatgctaccaaaagattgtctcagccagaatcaaccgtcagtgtcactacaaaatcatcaaaaaggaaatcaagagatacagtgggtccctggaagctgggcaaaactctaggtaagggatcctctggtagagtacgcttagctaaaaatatggaaacaggacaattggctgctattaagattgttccaaagaaaaaatccgttgttcatcgctcgaataatggaaccgttcctaactcctattcgtcgtcgatggtcacctccaatgtatcttctccgtcaatagtgtccaaggaacatagcaaccactctcaaaccaatccatatggtatagaacgtgaaattgtcatcatgaagctgatctctcatgccaacgtgatggcgttgttcgaggtctgggagaacaaatcagaactatacttggtactagaatacgttgatggtggtgaattattcgattatttagtctcaaggggaaaactacctgaaagggaagcaatccattactttaagcaaatagtcgaaggtgtttcctattgtcactccttcaatatatgccaccgtgacctaaagcctgaaaatctgttgttagataaaaaaaatagaaagatcaaaattgcagattttggtatggcagctttagaacttccaaacaaacttttaaagacttcatgtggttctccacattacgcctctcctgaaattgtcatgggtaggccgtaccatggtggtccaagcgacgtctggtcctgcggtatcgttctatttgcattgttgactggacatctacccttcaacgatgacaacatcaaaaagctattactaaaagtccaatcaggtaaatatcaaatgcccatgaatttatctgctgaagctcgtaatttaatatccaaaattttggtgattgacccagaaaaaaggataaccactcaagagatactagaacatcctcttattaagaaatatgataatttgcccgctaataaaatgcttagaaaaatgaaaggggacagcatgacgagaggaaaatccaattcagacttacacttattggacaacgtttcgccctccattgtaactttacacacaaaaaacgaaatcgatgaatccattttaaggagtttgcaaattctttggcatggagtttcacgtgaattaattactgccaaattacttcaaaagccaatgtcagaggaaaagctattctattcactgctgttgcagtataagcagcgtcactcgatttcattgtctctggaaagcgaaaacaagaaggccgggaaagaaactagtataaatgaatcgaaaatagagagctctttggagcttccaaattctgcaaactcaagaagcgatattgacgtgaaaactttacattcttcggaagctcgctcggaaaatacaccagaattcaatcatcatgaggaaaccagtactaacgctggcacagaaatgaacgctccagtgcttgcgcaaaaatctcagtttagtatcaataccctcagccaaccaggaagtgacaaatatgaagcagaagtcccaactctaccacctgctatacctatatttagcgcctcctcatcaagagttttccgcaactctttctctactatctcttcacgttcgaggaaatcgctacgcctatcgagttccaaactgtcattatcagcttcaacttctagagaaactatgcacgaaaacacaatgcctctaccccaattgccaaaatcgccttcaagatattcactctcaaagaaggcaattcacgcgtccccatcaaataagtccttacttaagtcactttcaaggaaccatataaccctaaacaccactgtaagaagaaccttgcaaaattcggcgtcaaagagatcattgtactcattacagtcgatttcgaaacgttccttgaacttgaacgatatactggtgttcgacgaaccccttcctagcaagataccggaaactggacatacgaataaatctgaaccgcattctttggaatcggactcggacttcgaaatcttatgtgatcaaatattgtttgggaatgctttagataagattcttgaagaggaagaggataacgaaaaacagaaagatcttccaaaaccgtggagtgaaaatacaaaaatttcaacaggtattactatggacgttgaggtttctatgaataaagagaatgaagggccagaaaaaagttcaaccaagattgaaaaagacttatccaatattctacataaccagttggaagagaactcaaagatttcatcattttctgtgtttaaggaagaaagtgctccgtctaattcagttttcatggaaagtaaaaaatcagaaagagcagtcctttcagatatcacgagctcgttcaataaagctaacaatgactttttcaaaagtgaaaagttaacaatggaaaaacagaaccataaggcccagcctcggaaaaagaatgaactattttcaccaccgaaatctactcaaacccaaggacagcgtgtaaagtctttacctggtgtcaaaggtaaaccttctttatctctagaccctcgtcgtaacatttctcagccggtgaattcgaaagtcgaatcgttattgcagggactgaaatctaaaagaggtccgccttcccattggtcccaccagagcgggtccttgtttggggatggacccaacgcggatgaatactcgaataaaacgttagataacacattcgaaagttcaagtgttccttcaaccacggtagcaacagattcgacagatcctagtgttctagcagaatctagtacgatccacaagccaatgttgtcattaccttcaactcttttaaacacctctatgacgtttaaaaatcttagccaaatgcttgctgatgaagacaatgacaagcacctaagcatacctcaaaatcaatctaggagtgtagcgatatcgtatcctctgcgaaaacagtccactaagatatctttgacaccaagatctaatttaaacactaatttatcgatcaaacgtaatcaaagctcacctggatcgtatttgagcaatgacctagatgaaatctcagatatgacgtttgcgatggaaataccgacaaatactttcaccgcgcacgcaattcaagtaataaatagtggctcgagcaataatacgactggtgcatcacccaaaatatcttcttttacaaaagataaaaaaggtgaactagctggttacgtgccaaaaggagacagagcggttaatagcaaaactaataatattctagattacaatgcaccaggtacacacaatgaaggggccattaacatttttgaggatgctccctccgatgaggggtcattgaatacatcttcttcagagagcgattcacaaggaagtgtgcatagaaaggccgtatctatcgatacattggcaactacaaacgttcttacaccagcaacaaatgttagagtaagcctttattggaacaataataatgcaggcattcctcgagagaccactgaagaaatactttccaaaattcaactatcgccagaaaagccaccaaatccacatgtgcaaaagagattctcttccgcacgtggtagtcgtgatagtgatgcgttaggtatttcccaaagtttgcagtcaatgttcaaggatttggaggaagatcaagatgaacatacgtctcaggctgatatgcttgcatcaagtttaaactaccaaaattcaaagctttctgaggagaacactaacccaaagcaaagagtgacaatgttatttgatgaagatgaggaagaatccaagagaataagttcagagaaaataaaagaggaacccactaacctcgctagcaaaatagacgaggaacctgcacacgtttctttatcgcgtgatactaataaagaagggcatgttgacgccacagaaaataaccatttaaaggttccaaaacccttgcctactaaatctgctaaagagcctgctttgagatcgggttccgctgcaaatactaaaggtctagaaaatacttctaaaagtgccaataaatcagcagttgaagaagcgcccgctaatgataaaaaaaattggttcgtcaagctattacaaaatttctcatctcataatagtggaacaaagatatccaaaaatcacgtaactaaaatttcatttgacgatgcgcacatactgacattgaatgaattcaacaagaatagtatcgattatcagctgaaaaacttggatcacaaatttggcaaaaaaggtgtggaatacgattgtaaatttgtaaaagggaactttaaatttaaaatcaaaatcagcactctgcccaatgcttcaacgatcatcactgtaaagaggagaagcaaggattcaaacactacttccgatagagcttttgaaaagtttaataatgatgtggaaagagtaattagaaatgctggacgtgtatga

SEQ ID NO: 3074 - DNA, 3330 bp, Saccharomyces pastorianus
atgagttcaaacaatgaaccagcacaaagtcaaagactacatttcatattggacgaatttttgtacaacatcaagcgttataaaaacacatttgaaggtgagattcagtggtgcaatgacctttcgttgaacgattggaagacccactatctgcagattaccaagtcgggctccttaactcattcaattgatgaattaacagcagactccgccaatatccaacccatcatcaagcatttacaacagtgtgaattacagatcacaaaagacacacaatcaccttttatagatgttaaggcaaactgcaactttataatccgagtgaaagcttcaggcaaggatttcaaagtgtaccttcgagtcaagaactgggatagttttaagagattgctgacgtgtttgatttggtggagctcgatgaagacgaatggtatattcaacaagtttcagatatcggctccttatgagtatgacacaaagaaactggggcagccagaaagtttgttggtctataaattaaatgtttttggacccatggtaaaacatactactcttccaccgtccacgaatcctttagataagcctaacataagtaacaacgataataacgggaaaggctggttctcggctatgggcgtttttaaatcagacggcatactagatcttcttttacaaagtgacggatctccaatctactcaatagacattacccaacttttaaaatcagaaattagaatcttagattcttctgttctacaaaatgacaattgtttgtttttaggtgaattgccgctcttacgaaaacagttaaatgacgaaaattttcacatagaaagtattaattctagtaataataactctagtaatatctctgaagaaattattatacaattccctttaaggatagacttggaagattgtttcgtggcattacaatcatacgctaggtcggaatatttatctattaccggctcagataaatcaaacggtatgaggatatcgaatagcttcaagctttctatattggaggctaattttcaatcaataaatttaaatgataagaataatacaccgtggtcaatattcactgacataacgacttggggtcatacatgggctaggacatcaatggttccaggttcaccgaatccattttggagagaagagtttcagtttgacgaactgttgagacttgatacttcctacctggaaatcaagcagctatttcatgaccctatccactctaataacaaaaagcggttacggttggttggtaaaatcggaattacacaggagatgataaatgatgcgagatataacaaggaaacaagattgccgatcatggatgttgataatcaaaatttccagatcggtacaatctgtatcaagctctcctcaaatttgaactttattttgccatccaccaattttatgaaattagaaaagcttttggctaatttgaacttatccatgatttcaaatttaatatacaaatcttcttcatcaatggaaaatgacaataaattgatgcaaatatctgtaatttttctggatattttccaatctacatctcggatagaagattggtttaatgttcttatagacaaggaattgtccaagatagacgggacagtttcgagaataaatcaaaaaaatttagattcaaagcatatctttaacagtttattccgtggtaattctattttgactaaatcgactgagcaatattttttcagggtaggcaatgaatacctgaacgaagcgcttggcggtattttgaaggacatcatcgaatcaaatgaatcatttgaattggatcctgctagaataaaagaagaaggaaacaagaaggagaaaatattaggggataattataaaagattgtacttctgggtcacgaagatttggaaaaaactctacgcaacaagcaatgacttacccattgagattaggaacgttttaaagatttttagaaagaaattagagataatttgtaccgaagacattttacaaataattctaaacggtatatctggattgctgtttttgaggtttttctgtccggttatattgaatcctaagttatttaaatatgtttccgaaaacctaaatgaaacatcaagaagaaacctcactttaataagcaaagtcctgctaaatttatctacattaacacggtttgctaacaaagagccgtggttaatgagtatgaatcattttattgataaaaggcgtgatgagttgttggaatacatcgataagatgacacaaaagaaactagatttcaattccaaaaaactaaatctaagttccaatataacaagacctaagttgcccattgaccaagcaatcttggatgatttgcctcagctcccttgtttaattgataaaaactccagagaaactgaactcgtcaacttgatcattaatttcagtcaagaaaatgggaacaagatgctaaaagatagccagatggaagaaaacggaaagcaagacttaacagggggagatcgtctttctacgagcagtagtataaatttgtcgataaataggaaggatttagattcaccagtaggtgcgaaaccagaaattggagagttagaatttgagaggataactgaaaataatacagaagtttttggagacgatttaatgaacttactcaagagtgatgacggaggccccaagcatgatagtttggttagcagtattaataataacgtgaaccctaattcgacattcacgacacaggaggaggagagatatatgatgaaagaactagaacaagagtgctatttactctacaacaagattgaccgtatcacaaaaagattatcagattacgaatgtgcttcgagtagtctgttcgaagacagaaaatattccatatcactttcacataagatttactatgagcaattacgagagggtgatgctatcgtacttaaattgctaagcaatccttccatggatcggtcttctataaaattacgaaaatttttcagaagaggtgctagcagtaaactttacaacattggagatcattataataagtttctgattgttgaaggggttggtactgaattttttaatggtacgaacagattatcatcacgcgggacatcattgaatggcgatgataaggataaccaaacgataccttcgtcttcaagctcttcaaataaaagtggtttgggtaataggttttctcccacaaagttatcgaggatgatgagaagagctcccaatagagatgtacctaaagaacaaagtgctcataaattgacgagatggttcaagaaaaaaaaggacccgagggggcttgactga

SEQ ID NO: 3075 - DNA, 933 bp, Saccharomyces pastorianus
atgacaactagcatacttgatacttatcctcaaatctgttcgcctaacgctcttccaggtactcccggaaatttaaccaaggagcaagaggaggcccttttgcacttcaggtcgattttgctagaacaaaactacaaagaaagattggatgattccacactgttgcgatttttaagagcaaggaaattcaacgtcaatgctgccgttgaaatgtttaaggaagctgaacgatggagagaagaatatggtgccaacactattatcgaggattacgaaaacaataaagaatctgaagacagagaaagaatcaaattggctaagatgtaccctcagtactatcatcatgttgacaaggatggaaggccgttgtattttgaagagctcggaggaattaacttgaagaagatgtataagatcactactgaagagcaaatgttaagaaacttggtcaaggagtacgaactttttgccaggcacagggtcccggcatgttcgaggagggccggttacctgattgaaacctcgtgtaccgtgctggacttgaagggaatttcgttatcgaatgcgtaccatgtgctctcttacatcaaggacgttgcaagtatcagtcaaaactattatcctgagagaatgggcaaattctatatcatacatagtcccttcggtttctctacaatgtttaaaatggtcaaaccctttttagatcccgtcactgtgtcgaaaatattcatcctgggttcctcttacaaaaaggaattgttgaagcaaatccctatagagaacctacccgttaaatatggtggcaaatccactttgcgtaattctaacgataggttgtattattctgatattggtccttggagagacccaaaatatatcggaccggaaggtgaaatccccaacatttttggtaaattcactgttaccgactaa

SEQ ID NO: 3076 - DNA, 3039 bp, Saccharomyces pastorianus
atgtttggtaataatagaccaatgttcggaggtagcaatctttcctttggatcaaatacttcatccttcggagcacagcaaccgcaacaaccgagctccgttttcggggctagtaatagtaacaataataatagtaataacaatatccctaacaacaatgctcaatcagggtttggtggattcagttctaccgctgggagtaataatagcagtttgtttggaaataacaacagtacacaaagcaatggagcctttggccaatcaatgggtactgcccaaaattcaccatttggctctttaaactcttcaaatactggaaacacgaacacttttggaggatccaattcaatgagctctttcggtgggagtaataacgcatttaataataacaacaatgttaattccaatagtaacaatagcaccaattcgccgtttggcttgaacaaaccaaatacaggtggatctttgtttggttcgcagaacaataccaacacaaggaactccagtctatttggtgggcaaaacacgagtaccactggtacatttggaaacaccggggctagctttggatctggattgaacaacaactcgagtatgttcggtgcagggaacaaccagcagagcaatactactggtggtatgtttggcagccaacaaccctcggcatttggaacgaacaatcaacaaggtggtatgtttggacaacaaccccaaaacaccaacaatgcgtttggaagccaaaaccaaataggagcaagctcgttcggatcaaaacctgttggctcaggatcattgtttggtcaaagtaataacgcccttggaaacacaaacactactagcaatggattgtttggccaaaccaatgtcaataatcaaaccaacactaatggcggactttttggacaaaacactatgactaataacacacaaggaatgtttgggcaaaacaacaatcaaatgcaaatgaacagcaacaataccaacaataacaccaatagtttatttggaaaaggaaacactactactagttttggtcagcaaccaagcaacaacataggctctttattcgggaacaaaccatccggtggactattcggtcaacaaaagactaccaatgccttcccgaattctacaccaggaggtcaatttgggcaaaataaccaacagcaaggatctggtctattcggtcaaggtccccagacaaacagtaatggtgggctgtttggacagaataaccaacagcagcaacagccccccaatgcatttggtcaaaacaatacagggccaggccttcttggacagaacagtcagcagcaacagcaaccagcgggcctgtttggggccaagccagcagctccagctgggtctctctttggaggtaattcttcaaaccaaccaggctcactatttggcgctaccaacgcatctgcctcaaatacgcaagcacaacaaggaaacagtttatttggtggagccaagccagccgcaaacatgtcatttggaacaaattctagtgtcaatcaaccgggaggcgggggcagcctatttggagctaagcctgcttccaccaccggctcattattcgggaataatacagcctctacgacagcacctcccacaggtggtctcttcggaaatagcactaataatccaagcaatactgcaaatacaagccttttcggtgcgaagactgaatctcagacgaaaccaggattgggaggaggattattcggtagtttgaattctaatcctttgtcagttggccaaaataaaccagcttttggaaacacaaatcaaaacactgggcttttttcagctactaacacaaattcttccactactgctccaactggtgggctttttggggcaaataatagcacttttggtaaagatgcacaaaacggaccacctgctaacggtttctctcagaactcaactatgggcagcacaggacttccttccttacaagaatcggccacaactaatgatgaacagcttttctcgaaggtcataattcccaactcaattacgaatccggtcaaggcaactgcctcaaaactgaatgctgatatgaaaagaaataatagcctcacgagtgcttatagattagctccaaagccgctatttgctgcgtcttctggtaatagcactatgtttcaaaagtggggaaagataacagaaaaaggtagcggagacaacggaactggcaagacctttacggagcctgagtctaactattcctcttcgagtgatttgttgttttaccccgataagaggtatttgaagcatttggtaattaaaaacaacaaaagcacaagtgtcgtagattccaatgatggtgaaacaaacaaagtaaaactggtgacttttacaacagaaaaagtttctgaaaacaagcaagatgtttcaagccctacgcatctaaatacagcagacaaaactgattcttcccataccatccaaatggagaccgttaacaaaagtattcctgatgttcaatcgaaaatatcaaatggtcctgtctccgttccaactactgagagtgaaaagatcgatatcaaagtgccaggtctactaagcaatgacgtcacttttttccaaaataattactatatttcaccatcaatggaaacgcttggcaatagatcattgatcgaacttcgtaagataaacaatttaataattggccacagggagtatggtaaagtcgaattcctagaaccggttgatttgtctaatacacccttagatactttgtgtgatgatatagttgttttcggattaaaatcatgctcaatatatgagaactgttccatgaaaccgaaaaaaggcgaaggtatcaatgtacgttgcagagttactttgtactcctgcttccctattgataaggaaacaaggaaccctataaaaaacctacaacatcctcttttgaaaagaagcattgctaaactaaaagaaaatccagtttacaagttcgaaagctatgatcccgtaacaggcacttatagttatactgtggactcgccaattttgccttag

SEQ ID NO: 3077 - DNA, 2910 bp, Saccharomyces pastorianus
atgagcaccgacaattcgcaaaagaatgaaactgttccactgctttctccttactccagtagccctcaactcaggaaaaagaagcgtaatccaaaaggaaaaaagaacaagtttgttggccacttgaaatcagactcgcgtagacctacccaacttctccatgatagtgtgcaacatgaccacggtcaggttacagattttgaccagattgattcctggggcatgctgcatgaatcggactctactaataatgacttagtaagaagtggagatccctcactaaagggtgcgtatattgaccacagaccctcaatgagccaaccgagggatggatcacaaagtgcctcaagtgctgcgcggccgcaaccgattatgaagttctcaacccccaactataagaagcctacagggatttggccctctgatcctaacagatcgttagtatctgatctatctccttcggaattggaatcatggctgaaaagaagaaaatccgttcaaaaaggtgccgaagaggctttgcctgcggatagaagacagtcgaacgcaaataatgatgttgtgatcgatgtagatgcgttgatgaaccacgttcacaacagtacaagcaacagcgctgccgataacaccaagaagaagaagaagaagagttctgacgacaacagcaacaaaaactcaaaatcctcgtccagtgactcaaacgtcgaagaagacgagtacaattcgagaccatcctccagtctttcttcaaataattcctcattggatgatgtttgtttagttctcgatgatgagagcagcgaaatgtcgaaactctggccagattgtaccatcttagaagagttctccaaagaagaaactgaaagactcagaagtcaggctattcaagacgcagaagcatttcattttcaatatgacgaagacgatgacgatggtacgtcgaatgaagatgggattcttttttcaaagcccatcgtgaccaacattgatgtccctgaattaggtaacaggagagttaatgaaacagaaaacttgaaaaatggccgcttaagaccaaaaagaattacgccatggcatttgatccaacgtccaacggccctagggtcgggcccgaccaaagactcaaaatcaagaattcaaaacggactacaggacaatttactggtggggagaaatattcaatatcctccacacattatttccaataatccagaacactttagatttacttattttagagttgacttggattccaccgttcattctccaacaatatctgggcttttgcaacccggtcaaaaatttcaagatttatttgtctcttctgtgtattcccaagagagcaacgccggtcatgtcaagactcatccaaattctccgacgcctggtatgaaaggggaaagttcatctcaacttcaaggattgattaataaaaatccctctacattatcaggtatgtctgtagcaaatatggaagatattcctccattttggttagacgtcagtaatcccactgaagaggaaatgaaaatattaagtaaagcttttggaattcatcccttgaccacagaagatatcttcttgggagaagttcgtgaaaaggtggaactatttagagattattatttgatttgtttcagaagttttgatattgtagcggaaaagcatgttcgtcgcagaaaaaaagaaaagcaagaatctgctacgctggaccacgaaagtatctcacgctgtaaatcacaagcttatggtgccactatgtcgaatgattcaaatgctaacaatagcaataacaataataccagcagtgctaatagaagcaaatggcttccatcgattttacgttcccgccgtaggtcatctgcgaatagaacgacaaacacatcatcatcaagttataagcgtcgtgtcaagagtgaaaaaaagaaaatggaagaaaacgaaaaattcaaaagaaaatcaggagataggcataaaccacgtgaaggagaattggagccattaaatgtctacataattgttttcagaacaggtgtgttaacatttcattttgcacctacaccgcatcctatcaatgttcgtagaagagcaaggttattgaaagactacctgaatgttacctcagactggattgcatatgcgttaatcgatgatatcacagatgcgtttgcacctatgatagaacttatcgaggatgaagtttacgaaatcgaagacgccattttgaagatgcatcaatccgatgattctagtgacagtgactctagtgatagtgattccgattccggtggcagtgatgaagatgcattcccattcgatgtttactctaagaaaacgtcatattctagtgctaaatcaagcgcgagttcaagaagtacaagctcatctgagacatcgttcaatgcaaacttgattggttggaaaagaaaaggtgacatgttgaggcggattggtgaatgtcgtaaaagagtgatgagtatactaagactactgggttccaaagcagatgtgatcaagggatttgccaagagatataatgaacaatgggaagcttcgccacaatcggaaatcgctatgtatttgggcgatatccaagatcatatcgtaaccatggtgtcatcgctaaatcattatgaaaaacttttgagtagatcgcattcgaattatcttgcacaaatcaacatcgatatgacaaaagttaacaacgacatgaatgatgtattggggaaaattaccattttgggtactattgtcttaccaatgaatgtgataacaggtttatggggtatgaatgttatcgtgcctgggcaatatagggattcattgacatggtttatgggcattgtacttttcatgtgtatgttagcatgctctgcatttgtgtacactaggagaagatttgggttatag

SEQ ID NO: 3078 - DNA, 837 bp, Saccharomyces pastorianus
atgcaccattttccagtcgcaatggtaactggggccaccaggggcataggaaaagcaatatctcaaaaattatctcaagagggtctaagttgcattgtactggggtctacgatcgaaagtataaaacacatcaaaattggaaaagatcatttacagttgcagtcaccccaccagcggcactgtgcaatcgcaattgatttcaaggaatggcctcaatgggttgccagtgaaccttataatggaatcgaatatgttaaagataaaccgcccttggaacagaaatattccaccatgtttgaaccatgcgacaactggtcaggttatgggtatcattattacgtgaacctactgatcaattgcgctggcctaactcaagaatcattaagtataaggacgacttcttcccaaattcaagatataatgaatgttaattttatgagttctgtaacaatgacgaacctgtgtgttaagaacatgatgaggtctcaaaggaagtggccagaattttttaccaaatccgctccacccaccatcataaacatttcatcgatcttacagtccgggaaaatgaatattccaggtacatctgtttattccgcctctaaagccgcattgtcccgatacacagaggtcttagccaaggaaatggaaccaaggaatatccgctgccacacgatatctccaggtttggcaaagggtacagatatgatccgaaatctaacggtggcatccaaagaggccctaacgagtgctattggcccaaaaagtatgactacgcctgttgaggtagcacaccaagtgtggtccctatacaattttggtacctttaacaagtaa

SEQ ID NO: 3079 - DNA, 1938 bp, Saccharomyces pastorianus
atggaaatgccctctcgacagcttataccgacgctaatgccggaatggactccgtcatcccatcagtcttacaaaactgcagatgattctgctagccctccgataactcccacaagccaggtgtcttcatttgattcctcgttgtcccaaatgaaacccacatatagtacaatcatagaagaaaatatagacacgatcctagataggattcgaccatttgtgaaaaaaataactgctagtgaacaaaataaaaaaactataaaccaatatacgttaggagcctcagcaggaagtggacagtttggacatgttcgaaaagcatacagctctacgttgaataaggttgtcgctattaagattatactgaaaaaaccatggaatgcccagcaatattcaatgaatcaggtgatgaggcagatacagctttggaaaagcaaaggaaagataactaaaaatatgagcggcaatgaggcaatgaggctcatgaacatcggaaaatgtcgatgggaaatatatgcggtttcaaggcttcgagatagtgtacatgttgtgcgactgatagaatgcttagattctccttttagtgaatcaatttggatagtcagtgattggtgcaaccttggtgaactccagtggaagcgtgacaattatggagatattttaccgcagtggcagagacttgtacctttcaagtgtagtgtttctacattttcaaaaaagatcttacgagatatgacgaaagggttgcaatacctgcattctcaaggctgcattcatcgagatattaaaccatctaatatattattagatggaattgaaaacgttgcaaagatttctgactttgggtgctgtatcttcactcctcaattattaccattcaagagtgccaattttgaagaatgttttcaaagggaactaaataaaatagttggtactcccgcatttattgcaccagagttatgccatttaggcaattccaagagagactttgtgaccgatggatttaagttggatatttggtcattgggggtaactttgtactgtttattatacaacgagctgcctttttctggggacaatgaatttgacacttatcacaaaatcatggaagcaccgttaagtttaaaagtaaacggcagcactctaaatgatttaatcatcaaaaggcttttagaaaaagatgctactttacgtataggcattcaggacttgacaaaaataatactgcctgacccaatggatcaacctgaacatcctaaagatattgatcaggatattttatccaaaattaaaccaacaaggagcgagggccctgtcagaagatttttcggtaaactaataacaaagaagagcaagaaaaagacattagaaaatgtgaaagacaattctttcggatctgcaaatagcaaagcaacggctccagtatatattgatgcagattcacaggaagaagcattctccagtacagttctcaggtcttcgcctaactcgagtgactattgctcttcgttggaggaggaagcggttcaagttacagactttttaaataccttttgcgattcaaaaggaagcgcaaatattttgcatgtgaagaatgacaagcgaaatacggagatgaaggtagaaaaaagtgattcgtcttctcactcttcatttaaggttccgaccccgatcaaggccttaataagactgaagaactctcccgttgagaatcggaacaagagttatgataaccgtttctcagatggactaacttccccctcaaaaaaaagtgctaaggaaaagcatagggtttataacccagagcccaaaaagctggcacattcaggaaatatcattaatttcaaagcatatataaattccgctgataaagatcgtcaagagatggtggaagacgtgagaacatacctgaatttcgctgataatggacaagcgtag

SEQ ID NO: 3080 - DNA, 1347 bp, Saccharomyces pastorianus
atggaaaaagatgcatggaaaataatagctgctacagcgctattcactgtggcaatgactacagtcgcagactgcgcttggacacgttggcaaacacaagggaaggcagtggcgcaagtgcaacggaatgatgaaaaagacgaagaacaaacaaagtccaaaatagacagatatcaccaatatgatgaacagttcattcgccaatttttaaagaacaatattggttttcttggtgaggatacgatcgaaaagctatctaaccaatacgttgttgttgtgggtgcaggcggtgttgggtcttgggtagtcaactcattggtacgttcgggatgtcgaaagatcagagtcgtggattttgaccaagtttcattaagctcattaaatagacacagttgtgctatactaaatgacgtgggtactcccaaagtggaatgtttacgaagacatatgcacgaaattgcaccatggtgtgaaattgacccaattaatgaactgtggaccatcgaaaatggcgaaagattgacccttggaaacggcgctcctgatttcgtcgtggactgtattgataacattgaaacaaaagttgacttactagagtttgcctacaactgcggcattaaagtgatctcctccatgggtgcttctgccaagagtgatcctacaaaacttaacgtgggcgatatagcgactactgaagaagaccctcttgcgagggtagtaagaaggaaactgaagaaaagaggtatcctttctggtatccctgtggtgtttagtgccgaaaagccggatcccaaaaaggctaaattattgcctttgcctgatgaagaatacgaaagaggaaaagttgacgagctcagcgctttgaaggatttccgtgtaagaattttaccagttctaggtactatgccaagtttgtttggattgaccataaccacatggatcttgtctaatatatccgataaacctttggaacctatcgagggtaaaaacagaatcaaggtatacgacggtatatatcagtcattgactggccagatgagcagagtcggtagaccaacccaacggataccgttagctttgaaggatgttagctacctggttgaagaagtttttaggggtaaatctccaatcagcggaatttccactagactaactttatctaaatgggattcctccaaacctatttcgttgcaaaatgtaaccgttctaaccaaagacgaacaaagagaacacgaaaaccgtattttaaaaggcaacgaaagtttaagtgatgtttatgatgcggatgttctggaactggtttcacaaaggtttaaagaagaagcttactattctcagtttagatga

SEQ ID NO: 3081 - DNA, 237 bp, Saccharomyces pastorianus
atgaaccctaatcttcccctttgcaaagaattctttgaaaaaataaccacagatttgaatcatgatgactttagattgaccattatcgcaaatcagccttcaatttcttcacaatactacgtagataaaaactctcgttttatagaactaatcgtcttcaaaacgacacttttatctctttttcaagaagcgcatacctatttcaatagagttctttccaatcaaagtatgttctaa

SEQ ID NO: 3082 - DNA, 2316 bp, Saccharomyces pastorianus
atgtggagactacaaatcgttctggtaccgccaagtgcccgggatgccattctgcttctcgaggcaaatacaactattaacgatacttctcaacaggcatttcccatgcttcagcatatagaggaccatattacgaacagcaacaacaaaagcatcagcaacaacgataacgatagctcttccgtgactagctcatcttcccgtaggatggttcaatcaaatgatggtagggatattttaaactttctcccgaactgcaagaaatttctacatttcacgaacgatagtaataccctcttacaactttccagtgaaatcttaactaaagttgataaactctatcccgattttaatcaagccattgaaatcgtatctctacaagataggcatggttgcgatctggactcccaattcatgataaaagatgtattcgaaactgatggaatcgttttggtgatcttaaaggatgagttggactgcaatgaaagccaacaagtttcagttttccagataggaagacagcgaaaaagaatcaacaataattcaccggcaagaagactctcagtaactgagagaaaaaagaaaattcccaacgaagacttatcctctacaccaaataaagactctatgcacccagtagctaagaactcactcaggaaaaacttcatcaataaatcaagggtctcaactcctttgatgaacgaaattttaccggttgcaaacagtcacgaaatactgaataaagaaaaggcttttgtacgagcatctccggtaatacttgtctcaaacgcacatacagatctaccaaggaattacagcactgacggagaaactaaagtacatgaaggtgataacaataaagaaaatataccctcatataatgaaaagcaggaaaataggaacacgaaatcgctcgaggcagaaaccccagacgagcagtacaattcatcagacgatcatgattttgagccgacacttgatagttcacaacaggtttcatatgactcgatcgataccgatttccaattgagcaatacctcttctacaaattctgatatgcatatgcaacatttcaaatcacctagcatggtccgtagccccagaaagagctctttggagattaaagttcaaaataaaagaagtgagaatttgtctccgaacgataaagatgtgagtgagaattatagaagaatagagaatttttcagacgaagaagatttgaatgacatggacaacagtcatgcagattcgtttgtgaataattccaagaaggcttcaatgaattttcgcgatgttggttctgacttggagaacgtttcttttaccagtgatattaatgacgcagttcaaagtactcaaaccactaagaatgcagtttctccttcttcgtcatctaaaaataacaaccggcaaaacccaaaggaagcgaaagaagagctgtttaatttgattgaaaatgagttccctgataaatcctcagttaccatctcagccaaaccgcgtgagaaaagtataaaaatacaagaaacgattcggatactaaatagattcaaaccaattgaggacgctaagactcaaaaaaaaaagagtataacggagtcatccttcaggaaatttccctcgacgataggagataaagcgcaatccaatattccagaagatgtacacaaatctaccaaagacaacaataaaagtataaaagttggtacagtaaaagtgaaacgaatgattgttgatgccgaagcaaaagtcagagaattcaaaaaaaaaagaaatatggggaacaagtctttaaaggatatctttgctaatgcgggaagaacatcaaaggcaaactcaagcataaaggttgttaaactgacgagggatcctgttgataattcaaaggggaaaacagagacggttctcaatagtggactacaggtacaaaattcggatatggcgtcaggtcttggaccatctaaggaatcgactcctgaagaggtgataaatcgtcaaacaacaccattcagtattccaaaaacatcttcctccaatattgcaccacacttcaaaacaattaaggttacaaggtcgaatagttcttcttcttcatcctcttccatttcttctgcatcttcttcagatggctcttcagcagatgaatcccataatcgttctaatgcaagaaatatccaagttagaaaacttagcttaaaaacgtttcacgagccaattcgagattcttctgaccaacgtatgtcagatgtagaaggggactatgcaaaaaagtatcagacacctaaatatattgagagcgataaatatgatgagtaa

SEQ ID NO: 3083 - DNA, 1620 bp, Saccharomyces pastorianus
atgctgagaacgactgcttcacgacaaataggactaaggaggggcctagctagtataaatgcaggtactactgtcgcatcgaacaaagcttcacataaatttcgcaataccttatggactattgctttgtcagctacagccttctatgctggaggcgttatatattcccaaaagaatgaaaaatttgaggatttcttttctaataatattccttttgctgacgatttggtgcaaacgtatgagcattatcacgataggccatcgttgtttttagaagattcttgggacaatttgaaggcaaaatcaagcggactagtttatggattagggtctagaccaccaacaggtaaatctaaaaaggaagacattgaagtaagaaaaattttatcgctaaagacgctagatattgaagtcgataattctgatccgcagctgaaagaaatcataaactcgctaaatgatctcattaaaaatttaaacgattccggaataactgtgcctgaaacaaaattaaactcaatgaagaagtccagcgaaaatatgcttgcgaatttgtctcaacttaatgaaacactaaaggaagccctatccaaatatatgctgcagaggacatctgaagtaatcacagaactgaatacgcaatatgaaaattcgaagagggaattcgaaaaaaatcttcaaaaaaacctgttgcaagaagtggacgaatttaaagagaacttgacaagacaaaaagacaaggagttggaagaaaagctaaaggccaacgaagaattgttacaagccaaacatgcaaatgaagtgggtttattgtctatcactcaagttaaagaatttaataagattatcaaggacaaaattgagaaagaaagaaatggcagattggcccatttagaggaaattaactctgaagttagcgatttgagtaagtccattgacaggtcgagcaaaattttgagcaaaaacgaggccctagtacaattaactctccaagtagatgaaatcaaatccagaatttacaacagtaacttgcctaatgtaaatattgacaaggaattatccaacttgaagctcctttctggccttttttctacttttaacaagaaaccttgttgtgatgacggaaaatgttgttgtgacaaaaaaggtggtaaaaacgaaaacaaagagaagaaagtaccatgcaagtgtcagccaaagaaaacctctccatcactgctaagcgcagctttagatgaactggaatccacctgtaggggcaataaccttttatctaatgagcaaatctacaacagatggaacttgctagcggacgacttcaaaactgcctctttattgccaccaaattctggtattttaggacaattaagcgcaaaagtcttctctcttttcttgtttacaaagacaggtaactcatcagatgctactgattttgattctgtttatgcaagagttggtgataagttgagggtatctaacctcaatgatgctgtagaagaagttgtttccttgaagggctggcctcataaagtttgcgaaggttggatcgaagatgcaagaagaaaactggaagttcaacgcctggtagaaattctcgactgtgaaataaggacattatga

SEQ ID NO: 3084 - DNA, 2814 bp, Saccharomyces pastorianus
atgctacaacctaagacagaaaatgagactgtagctccagtgttcgccatggagcaagatataaacgctgcacctgatgccgtcccattggtgcagacaacaacattgcaggtctttgtgaaacttgccgagcccatagtgttcttgaaagggttcgagtctaatggattgtctgaaatagcccccagtatcttaagaggatctcttatcgtcagagtgttaaagccaaacaaattgaaaagtatatcgataacgttcaaagggatttccagaacagaatggccggaaggtataccccccaagagggaagagttctcagatgtagagactgttgttaatcacacttggccattttatcaggcagatgatcatatgaactctttcactttagaggatcataacttcaacaactcatccaatcgcccatctataagtgaagaagaccatatactagagatgagtggtgcttcaatatattttccaccaaccatggaaccaatcaaaggtaacagtaatctgagtctggatgcgtatgagcgcaactcactctcatcggatcatttgagcaacaagcctgtatcaagtgatatatctaacgatgacaaaagtcttttggcaacccaaaaggcctcggttccctcatatagccgtagaggatcggtgccggcgaattttcatggcaatgcgctgtcaccatccaactttatatccgatttattcacaagaacatttagtaatagtggtgccactccaagcccggaccaagaagacaatagcattaccttattcaaagacacgaaagacgtttttgtttttaaacctggtgattatatttatacttttgagcaaccaatatcacaatcctatcctgagagtattaaggcgaatttcggttccgtggagtataaactgtcaattaacatcgaacggtttggtaccttcaaatccagtgtacatgcccagttgcctattaaaatcgtaaggcttccctctgacggatccgtggaagaaaccgaagctattgcaatttccaaggattggaaggatcttctacattatgacgtggtcattttctcaaaggaaattgttttgaatgcattcttgcccattgatttccatttttctccactggataaagttactctacatcggataagaatatatctaaccgaatctgtcgaatacacgtgtagtagcaacggtaatcgtgcgaaggctcgtcgactggaaccaaccaaaaagtttttgttagctgaacacaatggcccaaaactatcacatatttctgctggttcgaatccattaaaagccaaaaataggggaaacatcctgttagatgaaaaatcaggcgatttagttaacaaggattttcaatttgaagtatttataccaagcaaattcacaaatagcatacggttacatcccgacacaaattacgataaaattaaagcacaccattggataaagatttgtttacgtctttccaagaaatacggagacaatagaaaacatttcgaaatcactattgattcgccaattcacatactgaatcaattatgctctcacgcaaataccttattaccaagctatgaaagccattttcaatatcccgaaacgaagaacgattccgccgcaccaacaatagaccaacaaagtcagttcaatagtgcgccaactcatcatgactcaaattttttcttcccaaaggaaattttatcatcacccgttctttcaccaattgtgcagaaaaccaacatcagaataccgtctgatctcccggtcgtacgtaacagagctgaaagtgcagagaaaaaggatccagataagctttccaaggagatggcccagaacggtaatgtcttcgcctccaaacaactaatggcaaacatttacaaacctaatcaaattcaaagagaattgacttcccctcaggccttaccgctgtctcccattgcttcgccaatactgaactatcaaccattttcgaattcacccccaccagattttgattttgattcagccgggcatgatattagcagtgaaaataatattcctatagaccctccaacatattccgatgtcttaaaggctgatggcattgatttaccatgttatgataccagttcatctaggattccagaacttaagctgaataaatctagagaaacattggctagcatcgaggaggactcctttaacgggtggtcacaaatcgatgacttatctgatgaagatgataatgacggcgatatagcatccgggtttaatttcaaattatcaaataatgtttcgagtgaaaatgtaagttcacacactcctattttacaatctttaaacatgagtctcgatgggagaaagaaaaatcgcaccaatctacatgcaccgtcagtgttaccaagtaccataagacaaaataatcaacattttaatgatataaatcaaatgctaggtagtgatgatgatggcgcttccctgaaatggcaatcaccaaactcaaaaagatcatcgttacaacaaaactcaaatacagtcaaagtacagagttccatcaacaagaaactacctattctcaaaataaatgataacatcattgaacggaagagtagtgacaaacttgaggatcccgaagacatcgttgattcttcagtggacatcacagcattttacgatccagggatgtcatcggattctaaattcgattgggaattagcgaagaatcacgtagacccgacgagctattccgtaaatgttgctagtgacaatcaagtaatggacgactttaaggaagcatttcgcgaaaagaaaggtaaatag

SEQ ID NO: 3085 - DNA, 957 bp, Saccharomyces pastorianus
atggcgatcaagaagagaaataaaatcagattaccaagcgatcctcctgaagagattgaaggcgatacttccgtgcataggcccatccagcaaataaagcctggattactgaatactttggaagatgatgacggtgagatttgtgaattacagccgataaggtttaaaaaagtgcctaaacgagtcattacatttggtgatgaacaggaagatgattcgcactacaatgagctttataactcgaagaaagataacaacgcatggaagaaggacaacgatgacgtggtgattttaaatatggaagatatgatggaaggacaacatcaactgttaagtgatcctctcgagaatggggatagtttaggagacaagcactcaataataccaactcgcgaagaaattatgaaattaaaggaacagaaatctatatcgagaaagaatcttagtaaaagcaatgttgtaaaagaaaaggattatgtcaaattattggacagtgaggataaacgcgaactcatggagacaataaaatctaacgggggcttaaaacgctcaaatgaaaaagagcttgagaattttagtgacgatgaattgcaaggctttcaggatgaaagactggccctcacagaaaaccagattgcaattcaaaaagatgccaaaaagaaggttattgaagaggctttaggtgtcacggcatatagagtaaatgaagaatgggaagcgcagcttctaagcaaggggaatgtactcaaacctaatgaagcggttattacaccgttaccaatactttttcctgaagatggtgaaaacggaaacaacatggaggaaataaccgatatggtcttaaatatccgcttacaaaggaagaaggttgaattaagattacaagctttacaaaaggcaaaaatggacttggaaaattcaaaagccaacctaataagtaagctcatagacaaatga

SEQ ID NO: 3086 - DNA, 423 bp, Saccharomyces pastorianus
atggacccgctaaccatgaatttttccaagatggatacctttgggttattactgggcagcgagcctccaccagttgtgagcagccgtttttttcttttaaatattttatttgggtcgttagtgtgggtgttagagttagagctggcattgttgtttagttttttcctgttcctggacttgatagtgtcagttttcaaactaatgggccttggctcgccatgcaatttcaggaaaaggccgcaagcgttacacagaacagtaccgtgttcatctcttctccagaggggggttttaacggtgaagcagttctggcacgtggggtggtcctcactatcacagtcgtccacgacagcagcagcagcagaaagagaaggcgagggcagtttcaacgaatcactaagcaccattctctcgtatatataa

SEQ ID NO: 3087 - DNA, 1776 bp, Saccharomyces pastorianus
atggtacgagacctactgacattgccctcctcactacctttgatcactgcaggtttcgctactgatcaagtgcatttgcttgttggtacgggatctaccgattcagtgagcgtgtgcaagaacagaatacattccattttgaatgccggtggtaaccccatagtggtgaatccttcgtcgccaggtcatattaaacaattgcattcagagttcggtagctttaaggaatttcaaataattgagagggagtttactttgtcagacttaaccactttggggagactccttgtgtgtaaagtcgtggatagagtattcgtggatttacccacagcccaaagcagcctttgtgatgaaattttctggcaatgccaaaaactaagaatccccataaacacatttcacaagccggagttttccacattcaacatgattcctacgtgggttgatccaaagggaagtggtttgcaaattgccgtcactacaaatggtaatggatacatcttggccaatcggatcaagagagacataatatcccatcttcctcccaatatatctgaagtggtgataaatatggggtacctaaaagaccgtattataaacgaagaccataagactttattaaaggagaagtactatcaaactgatatgtcactgcctggcttcggctacgggcttgatgaagatggttgggaaagtcataaatttaacaagttgatccgcgaatttgaaatgaatagtagggaacagagactgaaaagaacaagatggttatctcaggtaatggaatattaccccatgaacaagttgagcgatatcaagctcgaggatttcgaaacctcttcgtcttcaaacaagaaaccaaagcaagaatctgtttcagatgacatagcttctcccactggtgagaagatcgaagaggataccaaccaagtacaattatcggatagtagaaagaaagaagattctaaaacgtccgggaagatctcattagtcggaagtggtccaggttcggtgtccatgctaacaataggtgcaatgcaagagataaagactgcggatataattctagcagacaaactagtgcctcaggccatcctagatttgattccttcaaagacagaaacgttcatagccaaaaaattccccggtaacgcagaacgggcacaacaagaactactgtccaagggccttgagtcgctgaccaacggattgaaagtggtccgtctgaagcaaggtgatccatacatctttggtcgtggtggcgaagaatacaatttcttcaaaagccacgggtatatcccatccgttctaccaggtatcagctcttctctagcctgtaccgtattggctcaaatacctgccacacagcgtgacgtcgcagatcaagtgctcatatgcactgggaccggtagaaagggtgctctgccaaaaatccctgagtttgttgaaagtagaaccacagtgttcttgatggcgttgcatcgggccaacgttctaatcacagaactattgaaaaatggttgggacagtgatgttcccgctgcaatcgttgagagaggttcgtgtccggaccaacgtgtcactaggaccctcctcaaatgggttcccgaggtggtggaggagattggttcaagacctcctggcgtcttggttgtaggtaaagctgtgaatgcattagctgatcacgatctagtaaattttgatgaatcaagaaaatttgtgattgatgaaggtttcagagaatttgaaattgatatagatagtttatttaaatag

SEQ ID NO: 3088 - DNA, 2175 bp, Saccharomyces pastorianus
atgtacgactcaatttatgattctccatttccgaaaataaatccaaaagtccgctacaagacggccttagaaagagcaggatttgatactaagccgcgtaatctgttcagtagccagagaaatgcttccaccgggagcctccaggcctctgtaagttctcccccgatgtctgtccaaagaaacgtatcagctgcaccgtttgtgccggtcataacgaagagtacgtatactgtatcttccaagggtaatcagctattttctaagggtgagtctgacatttattcgccgcccgtactggacaatagcaggaaagtgagtatagcctcttcgaaaaatagcaacaagatatcttcgtcgaggcccagcaataagtctcatccgtcgcaggacgatccctttcgtttcgagcgtgggccagagcaccaccaggagcgatatactgctcccagatacgcaaatgaatcatccatcaaaatgcattcgcaagtcacagacaattctcttttcaattttgagcaaatagatgtcagtaatagtagaaaggaacaggacttgagccctattgaaaaaagtttcatgatgttgactcaaaacgacaccgcaagttttacaaactccatgagtcaaatgaataacgaaaggaccactggacaagaactcgaagaagaacaacaacaaatttcggccaaccatcaagaggtagagccagaagaagaagaagaagaagaagaaatttcggtcaactatcaaaaaatgggaccagaggaagaggaagagaaagaatacgatgtagagagtctaaattttgagcctcaacctgaactgcatgtaaatttagacgaaaatttgccgttaccagaaaacacctcgcagccacaagaagaagaggacgtggttccgagaatcccagaaataaacgttaccagagggaaaactacgccgcagttatttatcagtacgtcatacaatagcggatcaatagattccaaattattctcccaagatattgctactggctttgcgacttccaaggaaggtaaatctcccgatgttttgccatcatccccaagtgtagaaaacttggattttgatgcctcaaatgaaaagcgttactctacagcatcttcagagaaggtagaaaccccatatacagctacaaatttgcaagtcgagcaattgatcgctcaactggatgacgtttctttatctagaaatgctagactggatcagaacgagaattcgcttaacttagtggatagaaagacctctagattcaaaaaatcaagtgcatatttatccgggtacggtggtcttgacataccagcaacacagcaaacatccatcatgcgcaatatcgatgggaacgtgtccaatcaaagcttcttagtggataacgacgatgtcaatgatgatgtaccatctacctctacaactaacggtggcacaccgattttttacaagttcaaacagtccactgcacagtactccggcgatgaaggaaacctttctcaagaaactttcaaagcgaaaccccctattattgaggccctacaattgcagcataaacctagtataacaaatttgagagaggacgccgataattctagaccgactgacccacgggtctcgcccaccaacgggactgtagaatatagtcctgacgtgaattatcatgaaaacgagccgatggaattcaaatatccaccgggggaagggccttgtagagcatgtggcttggaagtcacaggaaaaaggatgttctccaaaaaagaaaacgaattatctggccaatggcaccgtgaatgtttcaaatgcattgaatgcgctattaaattcaataagcgtgtcccctgttatattttgcgtgatacgccatactgtcaaaagcattaccacgaggaaaatcatagcatttgtaaagtttgttcgaactacatagagggagaatgtttggaaaatgataaagtggaacggtttcacgtagattgtttgaattgtttcctatgcaagaccgcgattaccaacgattattatatatttaacggcgaaatcccgttgtgcggtaaacatgatatcgatgctcttctaaaagaaggaattgataacgatgcatcaggaagcgataggaataataccgtttccaaaaggagaacaagattgattaacttcaaatag

SEQ ID NO: 3089 - DNA, 1647 bp, Saccharomyces pastorianus
atgtctccatctaaaatgaatgctgtagcaggaactacttcagaagtcgaacaaaaaatcaggaaagaattggcgcttagtgatgaagttaccactatcagacgtaacgctccagctgctgtcttgtatgaggacggtttgaaagaaaacaagaccgtaatctcatcaagtggtgcactgattgcttactccggtgtgaagaccggtaggtctccaaaggacaagcgtatcgtcgaagaacccacgtcaaaagacgaaatctggtggggtcccgtcaataagccttgttctgaaagaacctggtctatcaaccgtgaaagagcagctgactatttgagaacaagagatcatatctacatagttgatgcctttgctggctgggatccaaaatacagaattaaagttcgtgttgtttgtgcaagagcttaccacgctttatttatgacaaatatgctgatcagacctactgaagaagaattggctcatttcggtgaacctgatttcaccgtttggaatgctggccaattcccagctaacttacacactcaagatatgtcttccaaaagtaccatagaaattaacttcaaggcaatggaaatgatcattttaggtactgaatatgcgggtgaaatgaaaaaaggtattttcactgtgatgttttatttgatgcctgtacaccataatattttgactttacactcttccgcaaaccaaggtatccaaaacggcgacgtcactttattctttggtttgagtggtactggtaaaaccactctatctgcagacccacatagattattgattggtgacgatgagcactgctggtctgataatggtgtcttcaatattgagggtggttgctatgccaaatgtattaacctatctgctgaaaaggagcctgaaattttcgatgctattagattcggtgccgtattggaaaatgttaagtacgatgagaaatctcatgttgttgactacgatgattcatcaattactgaaaatactagatgtgcgtacccaattgattatattccaagtgctaagattccatgtttggccgattcccatccaaaaaacatcatcctattaacttgtgacgcttctggtgttttacctcccgtttctaaactgactcctgaacaagtcatgtatcatttcatttctggttacacctctaaaatggcaggaactgagcaaggtgtcactgaacctgaaccaacattttcttcctgtttcggtcaacccttcttagctttgcaccctatcagatacgctaccatgctagccaccaagatgtctcaacacaaagctaatgcctacttaattaacaccggctggactggttcctcttatgtttctggaggtagtcgttgtgcattaaaatacacaagagcaatcctagattccattcataatggttcgctagctaaggagtcatacgaatctttaccaatttttaatctccaagttcctaccaaggtcaaaggtgttccggctgaacttttgaatccagctaaaaattggtctcaaggtgaagctaaatataaaggcgccgttaccaacttggccaatttgtttgttgaaaactttaaaatttatcaagacagagctactccagatgtattagccgctggtcctcaattttga

SEQ ID NO: 3090 - DNA, 897 bp, Saccharomyces pastorianus
atgaaagtatttgtaactggggcttcgggattcattggtaccgctgtagtatcggaactggccagtctgggtcatgaggttgttggtctagcaagatctgaagaatctgctgcaaagattaaatcattgaatcctgccgtgaagatcctccacggcgaactcaaggatttagacactttgaaaaggggtgctgcggagtctgaaggagtaattcatttaggttttgttcatgacttcaaaaaattcgatgagtgctgtgaaattgatcgccaagctactgtggctatgctagagtcactcaaaggcaccaacagaccattcatatatactagtggcacgttcgggctacgctcaggtaaggtagctcatgaaggagatgctagcgatgaaaacttcaagagcccacgtgcacttaccgaggaaactgcgttgagttacaaagataaaggtgtttcagtgaggtgtgtcaagttggcgccctcggttcatggaaagggagacaaagcgttcattccaatgttgatgaatattgcaaaaactgctggagagtctggctacgtaggacaaggccgaaatgtctggcccgctgttcatcgcttagatgcagcccatttgttcagactcgttttggagaagggaagaagcggtcgagtttaccacggtgttgccgaacaaggaataccactcaaggacattgcacaagcaattggagaggttttggatgtccctgcagtttctattccagtgaacaacgccgaagaacattttggcattatggttctttttatcgcaagagatggtccgacttcgagcgaaactactcggaaagagctaggatgggagccaaaacaacttggccttctcgaagatattcgcacaaactaccgatcagcctga

SEQ ID NO: 3091 - DNA, 897 bp, Saccharomyces pastorianus
atgagagtatttgtgactggggcttctggatttattggtaccgctgtagtatcagaactggtcggtctaggccacgaggttgttggcttggcaaggtcccaagaatcagctgcaaagattaaatcagtaaatcctgctgtgaagatccttcgtggcgaactcaaggatctagatactttgaaaaaaggtgctgcggagtctgaaggggtgattcatctaggttttgttcatgattacgaaaaatacgatgaatgctgtgaaattgatcgacaggctactgtggctatgctagagtcacttaaagggaccaacagaccatttctatataccaatgatacgtttgggctacgctcaggtaaggtagcttatgaggaagatgccaatgacgaaaatttaaaaaatcctcgtgcacttaatgaggaaactgcgttgagttacgaagataaaggtgtttcagtgagatgtgtcaggttggcgccttcggttcatggaaagggagacaaagcgttcgttcgagtgttgatgaatatagcaaaaattgctggagagtctggctatataggagaaggccaaaacgtctggtccgctgttcatcgcttagatgtggctcgtttgttcagactcgttctagaaaagggaataagcggccgagtttaccacggtatcgctgaacaaggaataccactcaagaatattgcacaagaaattggagaagttttgaacgtccctgcagtctctatttctgtgaacaacgccgaaaaacattttggccttatggtcctttttatcgcaacggatggtccgacttcgagcgaaactactcggaaagagctaggatgggagccacaacaacttggccttcttgaagatattagcacaaactatcgaccaaaatag

SEQ ID NO: 3092 - DNA, 756 bp, Saccharomyces pastorianus
atgtcgatcgaagagatagatttttataacatcaacggggcaaaaacatccactgttatcccaagcaggaagaaatttcacaaaagagctttagacgaaaaaaggtccctgtatgttggggatcttcccaaagactgccgtaaacaggatctcagggaattgtttgaaccaagttttggtaagataacagttaatatgctgaagaaaaaacaacccaagaaaccgttgagaatctttgcatttatagagttcgaagaaagtgtagatttggaaaaagcgaaagaaaaaatgaacggcaaaacattcagggataagaaaattgtaattgaaagcatcttaacgaaggaggagaagaacttcgaaaatgctaataacaagacagtcacaacgaacgcaaaaactgttccaggctccaaacctttgtccgtacatactctgtacattaaaaatattccactgaagtcaacaaatgaagaactggctgaaatttttggtgttgcccctaaaaatgttagtttcgtaagaaggcaattggtcgacttgaagaccaacaaagtcttcttttccgacgaatttcacacaggcgaagcctttatcagatttgacagcttggcctcggaatgtgacattggaaagaaatgtcaagagtttgaaggtcaaaaaacaagcaatggtagggtattattggtaaaggtagcttccgccaagaaaaacggaaaggaccaatatgcagatgataacgcggaaaaaaaataa

SEQ ID NO: 3093 - DNA, 1512 bp, Saccharomyces pastorianus
atgttctgtgccattagtgggaaagtgcctagaaagccagtgctgtcacccagctcaaaaaccgtttttgaaaaattgcttcttgaacagtatgttagagataccgggaaagacccgattacaaacgggcccttaagcctcgaagagataatagagattgtgcccagtgcccagcaggcttcgttaatcgagtctacgaactctgctaccttgaaagccaattactcgattccgaatcttttgaccagtttgcaaaacgaatgggacgctataatgttggaaaacttcaaattacgatcaactttggacagcctaaccaaaaagttgtctactgtgacttatgaaagagacgcagccaagctggttgctgcgcaagtaatgatggaaaacgacgaaatttctcgtggcttatcgaagtctccaaaacaaccggtggttgtcacgagggaagcatttttacaaggattgttgcaatcatctagagaatttgtagcgagaggtaaagcgaaggcattcaaatggccgatcttccaaaattttgagttattacctacacaacgctattcatctgcgattaaaacgtatccatataaagagcttgattcttccatgaactataacaaatggacttccatgtgtctctgtgatgcaaacagtttacacttcactgaactaaaggactccgattcaattaccacggaaaccataccaaatcctcatacggagcaaaaacagcctgttattgtttccaagggttcacataatcggttgttggtgttatattccgataatcacataaccatattagacttaacaacgaaaacagtagcaaaagaaatcgatgtaaactcagcgaaccagattgtgtatgtgtacggccacaatgagatcaacacggaatatttcatctgggcggatagcaaagggacaataggatttcaatcttacacggacgactcccattatataatcaatactggcaggtcgaatgttgagtacagcaatggggcactacacaaggactcgctgttactagcgctttactcgctggatggaatagtggacgtgtacagtttatcatcgcctgatcaagcaagctccagattccctacgggagaagacattaagatcaaagagatcaagttttcagacaatggatactggatggtggtaaagggcagtcaaacagtggcctgctttgacctgaggaaagacgtgggaactctggcgtatccaacttacactcttccagagaccgaagcaggggccgttgtgtatgacgtcgatgagtttggcaagaatacgattgtatactcaaacgaggacaggtccttgtccgtatacaaattcaacaagaagacgaaaggttggatgagagacgaggccactacgctacatttgcagagtgacgtcggagacatcacggatatagaggttgtgtgcggcgacggcagcgttgcggttgttttaaagagaaaagacactttcagtatcgtcgcattgtcatcgtga

SEQ ID NO: 3094 - DNA, 2514 bp, Saccharomyces pastorianus
atggccaaattaaagtcaaaaaagagctcattaactggatcgctagacaacaagatcgttgatcttatctaccgtctcttggaagaaaaaactttggatagaaaaagattatcgagacaggagagccaaggggaagaaggcgataataacgaggacaaggaagatgaagacgtatttgaatcaatgttttttgccaaagatttaacagcaggcgagatctttaccttttgtttaactaaggatttgtcgcttcaaagagtgaaaaaagttatcttacaaaagaccatcgatcgtatgctcaaagatgtcattgaatcagagcttgaagagttcggttcttatcccgggtacaacaaggaagaagaagacaaacctagcttcgaagaagaacttgctaagaagaacatgatgatcgatcaagatacaaacgagatgaataaacgtattactagtttatggtccaaaccagaatccatcacagagcctgtaacaggcgcagatgatgcgaaacctgaagaagttaaaaaatcaaagaaaaggtccaaagaaggtacatgcaaggtaaaacgtcaaaaggtcaaagaagatagaacccctcctaattcgtctttgaaatccctaggtggtatggatgatgttgttgcgcaacttatggaactcataggtttaccgattcttcatccagaaatatttttatcaacaggtgtggagccacctaggggtgttctgttacacggcccacctggttgcggtaaaacatccattgctaatgcattggccggagaattaaaagttccctttatttctatatctgcaccttcggttgttagtggtatgtcaggtgaaagcgagaaaaaaattagagatttgtttgatgaagcgaagagtttagcaccatgcctaattttctttgatgaaatagatgccattacacccaaacgtgatggtggcgcccaaagagaaatggaaaggagaatcgtcgctcagttgctgacctcaatggatgaacttacgatggaaaaaacaaatggaaaaccggttattattataggtgccacaaatagacccgactcattggattctgccttaagaagggctggccgatttgatagagaaatatgtttgaatgttcccaatgaggtttcaagacttcacattttgaagaagatgtcggacaaactgaaaatagatggcaccattgattttgctaagttggcaaaattaactccagggtttgtcggggctgatttgaaggctttagttactgccgctggtacatgtgccattaagagaattttccaaacttatgctaaaatacaatctccaccgagtacaacagcggtttatttagaagaagataagatggaaatcgatgacgccacgaatgaggacgaatccagcttgagaaatactgcaaacatgattgatccgttgcctctctctgtagttcaacagtttattcataactatccagaacctctaacagatgatcagttatcattattgtcgatcaagtacgaagattttttgaaagccttaccaacaattcaaccaacagcaaaaagagaagggtttgccacagtcccagatgttacttgggcaaacgttggtgcattacaaagggtaagaattgaactaaacatggctattgtccaacctatcaagaggccagaactttatgaaaaggtggggattagcgctcctggcggtgttttattgtggggaccaccaggttgtggtaaaacattattggcaaaagctgttgctaatgaatctcgtgcaaatttcatatccatcaaaggtccggaattactcaacaaatacgtcggtgaatctgaaagatctatcaggcaagttttcaccagagcaagggcctctgtaccgtgcgttattttctttgatgaattggacgcgctggtaccaagaagagacacctcattatctgaatcttcttcaagagttgtcaataccttattaaccgaattagacgggttaaacgatagaaggggtatttttgtgatcggtgcaacaaatagacctgatatgattgatcctgctatgttaagacctggtagattagacaagactttatttattgaactacctaatacggaagaaaaacttgatattatcaagacattgaccaaatcacatggaacaccgttaagtgacgatgtcgattttgacaagattatcaaggatgagaagtgtaacaactactcaggtgctgatttggctgctttagtcagggaaagttcggtcttagccctgaaaagaaatttttttaaaaatgaagaaattcaatccgtccttgataacgatttggacaaagaattcgaagatttatccgtaggaatatctaatgaagaaatcattgtgaccatgtctgatttccaaagtgcattaagaaagatcaaaccctccgtgagtgataaagatagactgaaatacgatagactaaacaagaagatgggtctaacggaggaaatgaaggatgcggaggaaaataaatga

SEQ ID NO: 3095 - DNA, 99 bp, Saccharomyces pastorianus
atgcatttgagcaccttgccgaaagtgccttggcccaacaggtccttaacgatgaagcgacccccgctaccgaagacgtcgttttcctggtacacgtag

SEQ ID NO: 3096 - DNA, 4686 bp, Saccharomyces pastorianus
atggctccatcaacagtattagatgggtgcccatatgggtatcggccatatccagatagcaccactaatgccttgaatccgtgcttcctgtccatggtgtcttcgtggcaagccgttttctttttattggtaggtacctatcaactacggaaactttataggaacaaaagagttccgcccaagtttaagaactttccaatatatccaggtgaaatcagcagcagacatacaatgcatttgactaacgtttgctttcagtccaccctcataatttgccaactggctttagtagcccagcaaagcgacgagaattacccatctatattgaaaacgtctctttacttgaatctcctcttcaatatggggatttctcttcctactcaatacttagaatactttaagagcacgtactctatgggtaaccagcttttctattacatgtttcaaatatttatgcaatttttcctaatagcgcaaagatattaccataactcaagtgaaccaagactcgccttaattagtggtcaagcagctatgatcttggaatttctcattctcggtaactctgtgacaattttcgtttatgatttatgcctatttgaaccaatcgaggaattggctgaatactataaggaaaacgattggtatcctcccgtgaatgtattgtcgtatattacgtttatttggatgaacaaattgataatgaaaacctaccgtgataagaaaattgaaaatcctgacaaactgcccctaccaccagttgatttggatattaggacaataagcaagggatttgaaggaaattgggaactggagaaatggctggatagaaactctctccagcgagctatttggaagtcttttgggaagactatttcaatagcggtgctatatgaaaccacatctgacttactgtctgttatacaaccacaatttctacgtttattcatagagggcttcaatccagagacacccgctaaataccctcctttaaacggtgtatttatcgctcttgctcttttcttgataagcgtgatctctgttttcctttcaaaccaattttatattggaatttatgaggctggtttagggatgagagggtctttggcttctttagtataccaaaaatctctaaaattgtcattggctgagcgtaataacaaatctacgggtgatatattaaatctgatgtccgtggatgtcctgagaattcagagatttttcgagaatgctcaaaccattattggtgctcccatccaaatcatcgttgttttaacttcactttattggctattagggaatgctgtcattggtggtttagtcaccatggccattatgatgcctattaatgctctattgtcgaaaaaggctaaagcattatcaaagacacagatgaaatataaggatatgaggatcaaaactataacagagcttctgaacgctataaagtctatcaaattgtacgcctgggaagaacctatgatggaaaaattaaatcatgtccgcaatgacatggaattgaaaaattttaggaaaattggtatagtgagtaacctgatatattttgcctggaactgtgttcctttaatggtaacttgctctacattcggcctgttttctttattcagtgatacgccattatctccttccattgttttcccttcactgtctttatttaatattttgaatagtgccatatattcagtcccatccatgataaattccattatagagacaagtgtttcaatgggaagactaaagtctttcctccttagtgatgaagttgacgactcatttattgaacgtactgattctccatctgatgagagtgtattacctgtcttggagatgaataacattacctttttatggaaatcaaaggaggcattagcatccagtcaacttgaaaacaattcaaggacggacgaagaatctacaataggatcgtctcaaattgcattaaggaatatcgatcatttcgaagcgaaaaggggtgatttggtttgcgttgtcggccgtgtgggtgctggtaaatcgacttttttaaaagcgatccttggccaactcccttgcatgagtggttccaaagaatcgctaccacccaagttgattattagagcatcgtccttggcatattgctcacaagaatcttggataatgaatgcctctgtgagagagaatattttattcggtcataaatttgataaggtttattatgatcttaccatcaaagcatgccaattgttacctgacttaaaaattttgccagacggcgatgaaactttggtgggtgaaaagggtatatctctatctggtggtcaaaaggcccgtctctcattagctagggctgtatactcaagggcagatatttacttactggatgatatcctatccgctgttgatgcagaagtcagtaagaatatcattgaacatgttttgattgggaaaacagctttgttgaaaaataagacaattattttgactactaatacagtatcaatcttaaaacactcgcaaatgatttatgcactcgaaagtggtgaaatcgtcgaacatggaaactacgaaagtgtaatgaagcgtgagaacaataattctaaattaaagaagctgctagaagaattcgatactcccattgataatatgaatgggagtgatacgcgaactgatcagtcacctgaatatgatgtagaggaaactttgcagcttaaagtagttgaatcagaggatgaatacgaggtcgccacaaacggcgaattggagctgatcaaagtcaactccagaagagcgtccttggctacactaagacctaggccctttataggagcgcaattaaatgccacaaagaagacagcacaacaggctgaaaagactgaggttggtagagtcaagactaaagtatatcttgcatatgttaaagcatgtggtgttctaggagttgttctatttttcttattcatgattctaacgagagttttcgatttagcagagaatttctggctaaaatattggtcagaatctaatgaaagaaacggttcgaacgaaagggtttggatgtttgttggtgtgtattccttacttggagtgggatcagccgcttttaataatctaaggagtatcataatgctgttatactgttctatcaggggctctaaaaaactgcatgaaaacatggccaaatccgtgattagaagtcctatggttttttttgagacaacgccagttggaagaattataaacagattttcatctgatatggatgcggtagacagtagtctgcagtatgttttctcatttttcttcaagtcaatacttacttatttggttaccattatactggttggttacaacatgccatggtttttggtatttaatatgtttttgttggtaatctacatttattaccaaagattttacattgtattgtccagggagcttaaaagattgattagcatatcctattcgcccattatgtcgttaatgagtgaaagtcttaacggatattctattattgacgcatataatcattatgaaaggtttatttatctaaactacgacaaaatccaatctaatattgatcttgttttcaatttcagatcaataaataggtggttatccgtgcgtttacaaaccattggtgctacaattgttttggctacggcgctgctggcgttaacaacaattaataccaaaaatcaattaagttctggtatggttggtttgttgatggcttactccttagaagtcacaagttcattaacatggattgtaagaacaactgtgatgatagaaactaacatcgtttctgtggaaagaattgttgaatactgtgagttaccaccggaagctcaatccattaatcctgaaaagaggccagatgaaaactggccatcagagggtagaattgaattcaaaaactattcaacaaaatatagagaaaatttggacccagtgctaaaggatataaacgtaagaattgagccgtgtgagaaaattggtattgttggtagaacaggcgcggggaagtctacgttgtctttggctttattcagaatattagaacctgctgaaggcaaaattattattgacgatgttaatatatccgagttaggcttatttgacttgaggagcaatttggccattattcctcaggatgcacaggcttttgaaggtacggtacggaccaatttagatcctttcaatcgttactcagaggatgagctaaaaaaggccattgaactagcacacttaaagtctcatttggagaaaatgcttgggaacgaaactggatgtagtgataataatgttgaagaacgtgaaaatgctaaggatattctggatgtgaatattaatgagaacggcagtaatttgtcggtgggacaaagacaattattatgtttggcaagagcgttattgagtcactctaagattttggttcttgacgaggctacggcttcagtggacatggaaacggataagatcatccaagatacgatcagaagagaattcaaggatcgtacaatcttaactattgcacatcgtatcgacaccgtgttggacagtgataaaatcattgttcttgataagggcaatgtaaaagaattcgactcaccttcgaaattactatctgacaagggatctattttctatagtctttgtgaaaaaggtggctatttgaaaaaatga

SEQ ID NO: 3097 - DNA, 2604 bp, Saccharomyces pastorianus
atggaaatggacatggacatggatatggaacttgcttccattgtgtcgtctttaagcgccctatccaacgggaataacaacggcggccaagccgccgctgttgtgggtggcgctgctgccggctctcagcagatcggcggcttcagaagatcgagctttaccacatcgaatgatatcgactcggacatcctgttgctacacggctccagcgaatcttcgccgatcttcaagaaaacggccctgtctgtcggaaccgctccaccattctccacgaactctaaaaagttctttggcaatagcagcaactattaccagtacagatcgaacgatactgcctccctatcgtctgcgtcctacaacaactaccaggcgaacaacggcacgggtaacctaggcaagaataacaaggttaaccatctcttggggcagtattccgcctccattgcggggccagtctactacaacggcaatggccacgataacagcaatgtaggtggaggaggattttttgagaagtttgggaagtccctgattgacggtacaagagaactggaatctcaagataagcctgaacatgccgccaaccagccccagttcataacgaaaactgtgtccaacgcgagcttggacacccagaccaccttcgagcaatctgtccagtcggagtcgaataccaacaccaacaaagtgaacactaacactacgaacagcggatcattataccattccagctcgaattctgactcttccgcctctttggagtctgaccagaatgcccactatcctcaaagaaacatctggaatgttgccaatactccagtattcagaccgagtaacaacgctgctgtggtggctcccaaccaacaagacggtcttgcaaataacaatttcccatcttacttcccaccaaaccagtttcatcagggccctcactaccagaacttccccaattatttgatcggttcgccctcaaacttcatctctcaaatgatttctgcacaaccgcccgccagtgaggacaccggggactttgatggtaaaaagaagaaaaaatcgaacaaaccttcttcttcctccacaccttcgtctccgccaaacactacccccttcccatacgcctacccaaaccaaatgatgtttatgccaccaccaccaccatcggcccctcgacagcaacagcaacaacaagagcaacaggatcaacaggaaaatccctatatatattatcactctcccgtacctgtgccttccaatgcgcccaccaaggacgaaaagaatttcaagaaaagaaacaacaagaaccataccgcaaatactgctaacaacaatggtaacacaaacaaacaagccaacccttatttagaaaattttgccaccaacaagaactcgtccaaaaagaacgcatctttcaaatccagcgagccaatggccaataaccataagtctcagtcgcattcgcactcccaaaccccgccacaacagccacaacagccaacttatcaccgctctcccttattagagcaactaagaaatagtagttccgataaaaactcgaactcaaatttgtcattaaaggacatctacggccactctttagaattctgcaaagaccaacatggttcacgttttattcagcgtgaactggccacttcaccagcctctgaaaaggaagtaatattcaacgatatccgcggtgacgccattgaactatcaaacgatgtatttggtaactacgttatacaaaaattctttgaattcggtaccaagattcaaaaagacgctttggtggaacagtttaagggccatatgaaacagctatctttacagatgtacgcatgccgtgtaatccaaaaagccttagaattcattgattctcaacaaagaattcaattagttctggaactctctgattccgttttacaaatgattaaagaccaaaacggtaatcacgttattcaaaaggccattgagacgatccccttaaagaaactaccctttgtcttagattctttgacgggccacatttaccatctatccacccattcctatgggtgtagagtgatccaaagattgttggaatttggttcaagtgaagatcagtgtaacatcttgaatgaactgaaggatttcataccttacctgattcaagaccaatacggtaactacgttattcaatacattttacaacaaaatcagttcactaataaagaaatggttgatgtgaaacaggaaatcgttgaaacagtggcagacaatgttgttgaatactctaagcataaattcgcctccaacgtagtggagaagtccattctttatggctccaaagatcagaagaaattgataatgtccaagatcttaccaaaggataaaaaccatgccttgaacctggaagacgattcccccatgattttgatgatcaaggatcaatttgccaattacgttattcaaaaactggttaacgtttctgaaggtgaaggtaaaaaattaatcgtcgttgccattagagcctatttggataagctaaacaaatcgaattctttgggaaatagacatttagccagtgttgaaaaactcgcagcattggtagaaaacgcagaagtctaa

SEQ ID NO: 3098 - DNA, 1473 bp, Saccharomyces pastorianus
atgaagatcaaaactattaaaagaagttctgatgattacgttcccgtcaaaagcacacaggaatctcaaatgcccaggaatttgaaccctgaattgcatcctttcgaaagggctcgtgaatatactaaggctttgaatgctaccaagttggaaagaatgttcgctaaaccctttgtaggtcagttgggggacggtcacagagacggtgtctatgctattgccaagaactatggtagtttgaacaaactggccactggttcggcagatggtgtcattaaatactggaacatgtccactagagaagagtttgtttctttcaaggctcattatgggctcattaccggtctttgtgtcacgcagcctcattttcatgacaagaaaccagatctcaaaaaccaaaatttcatgttatcctgtagtgatgacaagaccgtcaaactatggtcgataaatgttgacgattattccaacaagagatcaagcgataacgattccgtgatcaatgaagagggtttggtgcgtacttttgatggtgaatccgcatttcaaggtattgattcgcatagggtaaactctacatttgccacaggtggtgccaagatccaactttgggacgtcaatagagtaaaaccagtttccaatttgtcatggggggcagataacattacgagtgttaagtttaaccaaaatgaaaccgatattttggccagtactggtagcgacaattcaatcgttctttatgacttaagaaccaattcccctacacaaaagatcgttcaaaccatgagaacaaacgctatttgttggaaccccatggaagcattcaatttcgtgattgcgaatgaagatcataacgcttactactacgacatgagaaacttatcgcgttcgttgactgtgtttaaagatcatgttagtgcggtgatggatgtcgatttctccccaactggtgacgaaattgtcactggttcatacgataagagtatcagaatttataacaccaaccatggacattccagagaaatctatcacacaaggagaatgcagcatgtcttccaagtcaaatactcgatggatgctaaatatattatcagtggatctgatgacgggaatgttagattatggagaagcaaggcttgggagagatcgaatgtcaagactacacgtgaaaagaataaattagaatatgacgaaaaattgaaggagaggttcagacatatgccagaaatcaaaagaatcagtagacacagacacgtgccagaagtcattaagaaggctcaagagattaagaacattgaattgagttctataaagagaagggaagtgaacgaaagacgtaccagaaaggacatgccgtttatctctgaaagaaagaaacaaatcgtgggcacagtgcacaaatacgaagacacgggaagagaaaggaaaagaagaagggatgacaataaacgtgacgctcaagaagagcagtga

SEQ ID NO: 3099 - DNA, 1281 bp, Saccharomyces pastorianus
atggctagtaatgagaatgagttctctgaaacggactcgttaatgacttttgatgattatataatcaaagagctacctgaacatctacaaaggttaatcatggagaatttgaaaggctcgactggtgtgaatgatgtcaggccgatttcaaaccactcagaattgaatttcagtgcaaacggtagccttaaaggccttgaagatgcactccaggctttacagttgcagagtgtgttacagacaccttcactaggatccttaacgacatctcccaagttctctggatggtcgtttgctcagggattttttgtaggtcaactgagtatagttttgttgtttatcttttttttaaagtttttcatattcagtgatgaaccctctaaaagtaagaatcctacacctgcatcctccggtcataagtcgcaattcaaacagtatccctttatatctcctgaatttttttcttctcttatcaggaaaggtggtaaagagcaccacgagttcaatgaagaggtggaaagtgagcgtctccaagaattggctttgattttggaaaaaacttactataatgttgatgtacatcctgctgaatctttagactggtttaatgttttaatcgctcaaatcattcagcagttccggagtgaagcttggcataaagacaacatccttcattcctttaatgatttcattggtaggagatctcctgatttaccagattatttagatactataaagataactgaactagatacaggcgatgatttcccaattttttcaaattgtagaatacaatactcgccaaattctggcaataaaaagttggaggctaaaatcgatatagatataaatgaccatttgacgttgggggtggagacaaaactgttactcaattatccaaagcctggtattgccgcccttcctataaatttggtagtatcgattgtgaggtttcaagcatgcttgacggtctctttaactaatgcagaggaatttgcatctacttcagatggtagcagtagtggtgatgatgcggatggtgattctggttactttttgatgttttcattttctcctgaatatagaatggaatttgaaatcaaatcattgattggctcgagatcaaaactcgagaatattcccaaaattggcagcgttattgaataccaaataaaaaaatggtttgtggaaaggtgcgttgaaccgagattccaatttgttaaactaccaagcatatggcctcgtagcaaaaacacaagggaagggaaggctacagagtaa

SEQ ID NO: 3100 - DNA, 2607 bp, Saccharomyces pastorianus
atgaacgcaactaaagaactgacctttagtttattaaacagatttcaagacaaagataggtttggatctgcccaaaggcatgccggtatctcactgaaagggttcatttctggtatacttttttcttttctatactttttgttccagctctcccttttcattgtcctacggtcaagattcaagactatatatcaagcaaatgtagccctcaaaatttatccagagtctaaagctggctatgccaagggaaaaaaaagctataagttgttagtattttcttttcttaagcaaattccagataggatacttaatcctataggaagtttcaacccagatgaaagatatgggttagacaattatttgtttttgcggtttcttaaactattaatatccttttttgcaattttatccattatcaatattcctatattagttccaattcattatttttcaatgggcaacttggaagatagtcaagatgagcactaccagcagacttttactacaacaagtgaacttgacaagtggactatgtcgaatctttcacaagactcttcaaacagactcatttgccatttgtttttgagcatcttcgttgtactctggttccacctgatcctttcttcagaattgagatttgttaaccaactaggttattccgtattgacgaaaagtaaatatcagaatattttgtatttggaagggttgtcaaatgaactcattaccgaagacgtgtctttggaagctaagttcgagcggctatatcccgattgcgtggatgcaatctacttcattccaaaagatttgagaaaagttcacaatttagaaataaaattaaataaactacaaaaatcaaaagaacaagttatttttgaaatctttctggagaaatattttaaaaggatttcaatacaaagacatttaataacaaatcataaatcatttttcctctcaaagttgaaaaatcatttactatttcagtataaaagattcatctttctatctcaacatcgtattgcgtattattgggcaaagtttggtctccattgggagaaattaaaagtatttccgttatatcacccaaaatttacattgaacaaagaaaccgtattagaaaggaaatataaaatcttggataaaaaaatacggaaggaaaaactcattaagtttcgggttaactccttaaaaacagttccagacatcaagtcatcaccatctgctcatagttcaccaactacggatatatatatgaacaaagtgttcatttgcttcaaatcaacactaatatcaaatatcataggtgaaattttgtcatataaattaccaacccagaatttaaaagtgataatagggccaaacatcaaagatattatctggagaaatattcttgattcatcacctttttggaaaagcgctaaatatttctcggcaaacatacttcgtatttttgtgattattggttggattttacctgtcgcgtttcttgggttgatatcacagattccgaatatttcttcactgattccatttgcaaaaatcatttactttcaatctccatttataagagaagtagcgaagaatttaatcccaatagtgactttgataataataatagaaattgttccatacttttttcgttggctaagttgccttcgaggattgaaaactggagctcaggtagaagctgacgtccaaaattggtattttatctttgtgtacattcacctatttctagttgtcacgatatcatcagggttctctatcattattgaaagacttctcaacaaccctgtcagtattcctgctctattagctaacgacttgcccaaatgtgccaactttttctgttcttttgttttgattagaggcatggcttatgcaggtggtaacttacttagaataaaagaactactctttgaattattctattacaaatggaagacgtgtagcccacatgctcagtttaaaagattaaagacatctttatttttccagctaggatctatttatcctattttttcagttttgggttgtattggcatcatatacagtgtcgttgctcctattatattattgttatgttgcatttcattttccatggtttacttctccttcaactatctgtttaaataccaatataatatagaaaactactctgaaacgtttggtaagctgtatatacaggctttaatgcagctatatgcaggcatttacttcatggaattttgcctactgggactcttcactctttttgatcaatatacattatcaacgataatgattgttgtctttatccttactgttatggcacattccaaaatctccaaacaaatcagatcgaaacctcaacatttacctaccctagaatacttatcgagcttatcatcggaaacaaaggaccaatactaccacgaaagttacagttttgatgatattttttcagttcgaaaaggtttcgataaaatttggctaccaagggacaaactgggaatctcagaagaagagcaatcctttttggagaagtcataccgtttgaagttcgatcttaatatgtattccatggacttattcggggattgccatttagataacggccatttgccttga

SEQ ID NO: 3101 - DNA, 2829 bp, Saccharomyces pastorianus
atgggtaaatttggtttagcaaacaggtcaacggaggaccttttgcatgataaattcatacccgaaacatctcccactaatattccaactgatattctcattaaacagggacttataacagattccactgaatcgctgattcatggaagcgcagaaaggtatatcggaaatgctctaaaacctgtcgaagaaaccaattcagagcacccttgggaagacataccgttccatcttccttctccaccaccagatctggagcacgaagaagttgtaaacatatccaaaaattgcgtgcgagagaacttggatgatacatccattgaggttatagaagacttatactatcagatcgagacttttttagttcatttcaaattgtcaagaagttttttaataatttttaagaactatattaacattcttatacaagaaggcatcaatccgttacatgacgagtactttaaactactagaagatgaattgaaaggggttttcactttcaatactgttatagaagagatcctagaaatatttttgattcatccgcgtaacaagtttattgctttgtcgcttgcagaatatacttatgccagaaataaaataagaagacattttaatcgttggaaaaatacttggacactgaattacagggcgtataaatttgctgatcaaacaaaagtcaagctaaaggaagctgctttctatgtttggagtgacagaaaattaaagtactcacaaatggccaatgatgaagccgacaatttcaggaatacctggctactatttcattcgtttcaacaatggataaatttaacacaaactcttagtgaacagtctagattagcggaccaggctttcttgaataggatgttcaagaaaatcattaaggcacgtgaaaaatggaagcatttggaaaccgtcagcactgaaggtatagaacagatttcattgcggaccaatttccacaaatggaaactaaggtatagagaaagaaactttcttggttcgaaaagaaagatctttgaaggaataaggcgaaaactcatacactacgaattcgatgagaccgtttcacagaaagtaaggtctttatctctacaaaagacgtgctttggcaaatggaaagagaaaaatgccaaaaatgaagacaaacttgcagacctttacgagctggaaaataaatttatcaaacaaaaattcttggataaactgagtacaatgcttcagtacagtcaacaagaaacaatggtaaggaataaactagatcaaacacttctaaaatgcgtcttcgagaagatgtggctaaaaaggtttgaagatcatctgcatttatattccgttataagcctgcgggaagctaaactcattaagaatgtttttcattcttggaaaaaactcctatacactgatattaaggccagcgattattcaagaacaaatctgctcaaatctgcattacgggattggaaacttagtgtaaagctaaaaacattcaaacagaaacacaaagcaaagattttatcaaactcttactgtacttggaaaagaaggatacagtacggaaaaatatcgaataaccatattaggattaccttttatgcaagatattttaatgcgtggaaaaggaagatgttgcagataagatcagcaaatgaaggggcatccatcttttacaaacaaggccttacaaatgaatgcttagctatttggaaggagcgcgtgataaaaagtaaagaattggaggacaggtataatttcttaagtaaaacgcatgcaattttaactataaaacggacagtaatgcacattaataatgttcatttgctatctaataaactagaaccctacatgaatagaataaagctttctgggactttttcaaaatggagaaaagctactaattttaggatcaagcataaattgaatgatattttacacacgtatgaattggacaaaaagtatgaacttcagtatggaatactttttgcatggcagaacagatatcgcttctactcagaagaatgtgattctcaagcagtttttaagaaaaatcgacagctcgagaaaatggtcttaaagaaaagtaaggaaaaactattggaaatggaaaggtcagaagcactggcagacgaagtccgtaaggaatttatactaatcaagacattttacatctggaagactcatctagatgagatatactacatgaacacattattggaacagtctgaagctaataaacaattcgtagttacatctaaattcttgaagatgtggagtcttcgattcctaaagactaaacgtaatgacgaaacagtccaagtctttcgtcatcgctgggatagggctactgtgagaggattgctattactgtggaaaaaccgttcagacagttcaccaaagagaaagaaagaagtcgacctcaaacatgaactgaaaactcccataagatcggacgcaccaaaaacttccacgataccgggctcagaaagaataaagcagcataggatggaggccatgaaatcgcattacagcagagcaagaagagctataccaagtcccgtaaaatcctcaagtgttcttaattctacagctaagaagcagatcaaacttgagggctcaacagatttagatgggtctccaacacgagcgaaacccataagatactcccctagacgtgctaatagaaacctgccatacaaagtggaccacattgacttcggcaaaatacctgctgtaccttttagtttaagcgcggattcttctaaagccgatcagaatatggactatttaagagaacaagatagatctccacttagtcggaaacgttaa

SEQ ID NO: 3102 - DNA, 1320 bp, Saccharomyces pastorianus
atgacactgaatgatctactaagttccgtattacctgcaaaccagacattcaactttctgtcattacagactataccagaagaaacccatactgtcgtaactccggatagatatgacaaaagggtcgcagagcgcaccatcaagactcagcacttcttttctctatttcatcaggagaaagtttttttttcattagaagtgtatgtttacattacactttggggtgagatgaatgccgatcggttagtattcgtatcgaaagcagacacgaacgggtattgcgatacaaagataagtatcagggacgtaaccaaagcgctcctgaaatatgttttatcaattgacccgaattactatcttcaaagagtaaaacccatagaaagaccatacaaaaaaatgaacattaagctgatcactccagcaggtacgccggcggaatctctgaggacactggccgagagactcaagcaattcggttccacgaaactcaatgggccagcaatctcattgtatcagcaagatttctaccattccttcacatgttctcgtaagattttgaccaaaatttgtttatttactcgacctgcatctcaatacctcttcccagattcttcgaaaaatagcaaaaagcatatactaaatggagaggagctacttaaatggtggggctcaattttggatagtctactggttgattatttccagaatgatacacaggcgaaattaaggatcccaggtgaggaccctgctcgagtaaaattatacttaaggggaatgaaatacccgctgtggcaagtgggcgatatttttacgcccaatgaaaaatctcttgcggtgtatagcataccattattcccagacgatcctaaagctagatttatacaccaattggctgaggaagaccgtcttctcaaggtaagttcatcaaccttctggattgagctgcaggagcgtcaagagttcaagttgagtgtaacagtatcagtgatgggcgtatcaggatacacccttgcaaccccaaccctattaccgtctagtgcagatgtcatcgtgccaaggtcaaaaaaacaattcaaagccatcaagaaatacgtcactggagaagaatacgatactgaagaaggtgccatagaggcgtttctcaatattcgtgacttcctcatgcttagactggcaacaaatcttcaggttttgacagggaaaaaagaatatcgggcaagaagccaattgacccccacaagtaaagtcaataacatgacggtaaccatgctgaaaccccgtaaaaaatccaagacccaagccacaacccgcaataaatag

SEQ ID NO: 3103 - DNA, 2586 bp, Saccharomyces pastorianus
atgaatatccaaatatttaaatgtattctttggctactgccgatactagggcttacacaggcacttttgcaaaaccccaacgatgattctccatttagcacagtaattgatatcctctctgaaaatgttgaattctcaacttttctaagaattattcaaaaaaaaggtcacattcaatacctgaatgagctccagaattttacactttttgctccagttaattctgcctttgtaaaagaagaccagattacacgtcaatttgaagagagttttaatattgaggatttccttatgcatgataatgtgttgaaagtgaaagaactgacaaatggcacctatttagaaaagagaggtaaagtagcaccactgctgctgacaagatataaacatcgttgctgggttaacgatatcactgttgtcgaacctgacttacaaccgaatttccaaaatgcttcggtacagggtatcgctaatatcttgctccctccacctcctataaacgacttactggttcagctagacgaagaaacgcaagatttgaagatatttaacgattttatgaccagtttttcacactatgatgcatatacaaataagtccactcttttggtacctttagatgttaattttcgaaaattattcaatgcaatcgaaatcaactatttgaccgacaagtattcaaaactgaggaaatctaatgcaatttctcagggcaagtggactgcagacagaactttccttcttcaggaagtcagtatcgatgatatatatggtggtttcttgcccgacaagctgactctgagaaacaaaaacaatcgaccacttctgctcaaaagcaatatcgatggttcgtcaataggtgtgaatcattcagaatattcccgtatatccaacaagatttttgaattaggggttgtacatggattttctaaccttgaatttttacgggaacatatagagtttgacgctgaaaagtatcttcatggtttgaactgctcagagtttgtaaaggagttatatttcagagaccttgaaaagttcattcaaaatgaaaagaaaacgaccatatttgtaccacaagcttctttcaacgaggatcgtggatatacaaaaccatcgcttttgtaccatttcactgaagacaaaatcgatctagaagaggagttttcattattacctaaaaccgaagatgtttccacccaaatttatgactctgcgttctgctcttcggctaaaagacttggcgggcattgccaaaagttcaaaatttcaagatccaatgaaggctattatattaatggtcgttttaaaatcttgaataagaaaccatatgaaattggtgatacgtacatatattccatcgaggatgaccttcaattgccaggtgagctagtattgtccttaccacctcaagatcactgttctacttcgcttatgtttttgagggaccttggtctattggatttaccatcaaaccataagggatacacaatactacttccctgtatgaattcatgggacgataacgatttgactgtggattattttaagtcaaacaaaactgccttaaatttacttatgagaaacctaattttcgaggaacttatttactcgaacgactacaatgtttcaactaaagctcaaaatttatacgggaactctgtatctattgatgtagaggaggttgtggagtgctcaaatttaacaaaaataacagtgagtaatataaaggagagcattcttattgaagaaaattccgatgtatttttcaatcagggagtcatccatcctataaaccaattgaactttccagatgatctggaaatatctttgagagaactaatagacaccaccggaacgaaggagattttcgagttctttgatttattccaggacctttcttcaatcatccggaacgaagaatactctcttctagtcccaacagagtcttctattccgttaagcggcatttcagtgaactcgacaaacttgaagacatttctcgaacttcacttgattcctgctaacgaaacgcaaaatttgctagactgtaacgccgccattactactaaattgggcaaacagttgaattgtaggaaggatcacctaaataaccattttattagcgtatacgaggactggagcaaagaagttagaatactcaaaaagggttgcacttctggttctaaaagctcctgtgtattcctaatagacaaacccatatctttatcttggctagacaatgagaaataccacttgcatttgccaggaatagcagttggggttggaatgataatcggagttaccttagctgtttcattgttattctgcatagtaatcactagaggcggaaaagtcaaacgagccgatgagattgaaacgggcagacctaatgaagtcaccacgcctctaatgtcatcttcctctagaaccaaccattcttcatattcagcaactgcgcatttgtctccactttctcagccaacttttgaaggctcatattcgggaaacgctatacaaaggcccagggacatacgaagagtcacatcagagcaaaggggcgggcgaagtgtcagcacttcttaa

SEQ ID NO: 3104 - DNA, 2082 bp, Saccharomyces pastorianus
atgctcaattcagctttattatggaaggtttggctacgaatagataactcgactgacgaagtaaaccagccaatatctattcaattcgatgaaatagatactattgatgatttaaagagtaggtttttccagaaactaagttcaactcgatggcgagaagtcaacgacaacgcttccattgctataggcctatatacccccaaatttggcagtcaaactgataagacaggtaacggtggcccggataatggtagtggcagcgctagtaacctcaatgcttctatttatagtaacactaaaaattccatggttccattagcaggaacatcaagtctcccaagagacttcacaaaagacaagaacgtactccagcatccaaagcctactcagaagagaggtgcattgtacgatgtctttggcgctgtgccaacagcgccaatgaccattaatccaaatttttcccccaacgaggcaccatcaccaagcccgcaaaggccttattctaccagtccgaaacaacttccaacaacagccaagagtccattgctgcgatttgcctctgtttcaccctaccccaaatttcatccggacaatcaaatcatgacgccaacaagtctgacgtacgtctcaccacacaataaaaacaaatatgccaggcctttagtaaggaaaggtttaaactacacgacagaacctattggcgattctagctataaaatcatctttgaacctgatgaattagctattaacgtatacaaggaattattcggcaccatgggctctcagtctgcgtcacaatctttgctggtgttttcaaatgttaatttacgccaggatataccccctttagacatcttgaacgtggtagattatgttcccacaaatgaagaaatttcacagcaaacaatgcaatctgttgaaggctttggtaaccaaatttttcctggagagcaaccctccaaatcagcagataatgatgaaacagattcaaaaggtaaagacaatagtagtaatcctcaggaattcaaactaatagctgatgaagaacaattaagaagggcctcacaagaattgaaggatgaggaaaaggatactgagtcaccttggcaagctattttgctgttaccgaagggttacaagggagaggtggattttcaaaacaaaccagtgctatacacggattctgacaccatccttcattctgaacgtgcagttaatacagagtctcttttacaagaaagcggtcctctcgatgaatccagcgtaggtcttaatcaaccccttacagaatgccaaagaagaaaggacaacgttacgcccacatcacccttattgacgaatagtcaaacaccacattactcaatttataatgctccctttgcagtttcatcaccaccagatcccttaccaaatctcttcactaccacaagcgaaaaggttttcccaaaaattaatgttttaattgttgaagataacgtcataaaccaagcaattttaggttcctttttgaggaaacataagatttcatataaattggccaaaaatggccaagaagctgttaatatttggaaggaaggcggtttgcatttaattttcatggatttacaattacctgtcctatctggtatagaagctgcaaaacagattagagattttgaaaagcaaaatggcattggcattcaaaaaagcctcaataattcacatccaaatcatgaaaaattgccttgcggcaagttttctcaggctccagtgatcatcgtagcactgaccgcatccaattcccaaatggataagaggaaagctctcgtttctggttgcaacgactacctgacgaaaccggtgaacttacattggctgagcaaaaaaatcacggaatggggttgtatgcaagcactgattgattttgatggctggaaacagggagagagtaggatgacagatagcgtagtggtcaaatctccacagaaaccaaccacacattccaataatgactccaatacattcaaacaaaccacacctattacacctactaaacatagtccggcaagaaaaaactcaaatctttcgccgactcagaaataa

SEQ ID NO: 3105 - DNA, 513 bp, Saccharomyces pastorianus
atgagctcccaaggaaataccgctaactctatcgaagcaccacaactacctattcctggtcaagtcaatggttccgcaaatgtcgatcttggtgggtctggcttgaacaccagcgtccctggtagccttcaaggccagaaagctggcatggatctttattttgaccaggctatggactacatgggagaacaccctgttttaacaggtttcggggcctttttaaccctatacttcacagccggtgcatacaaatcgatatcgaaacggttaaacggtgggaagtctgctacttctttcttaaaaggcgggttcgatccaaaaatgaattctaaagaggctttacagattctaaatctaacagaaaacacattgtctaagaaaaaattgaaagaagtccataggaaaatcatgttagccaaccatccagataagggtggttcgccatttgtggctaccaagataaacgaagccaaagattttttagagaaaaggggtataagtaaagaaaaatga

SEQ ID NO: 3106 - DNA, 579 bp, Saccharomyces pastorianus
atgaaagtcgggattataatggggtccgtcaggactaagagggtgtgccccgaaatcgcagcctacgtgaaacgtacaattgaaaacgatcaaagcttatgcaatcaaaatatagaattacaaataatagatttgaaccaggttgcgctacctttatatgaagacgatgacgacttgattccggctcaagtaaaagacgtggatgggtacgtggacagcaggacccgcttgtggagccgtacagttagctcattggacgtctttatcttcgttacaccccagtacaactggggttatccagccgctttaaaaaatgccatagaccgtgtttaccatgagtggcgtggcaaaagcgccatagtggtaagctacggcggccatggtggtgataagtgcaaccgtcaattacaagaggtactacagggattgaaaatgaacgtcgtaggtggagtctctatgagtatcccagtaggtgttataccgttgccagaggggacggtccccgggtttagtgtatacaatgaagagattttgcagttagtggcttcttgcattaagaatacaaatagtagacagtag

SEQ ID NO: 3107 - DNA, 423 bp, Saccharomyces pastorianus
atgaatatcaaaactttgtgccatcaagagtacaaaagaatttcgatccaatcattgctaaacccgcttgaggaggcagtaaccggtgagagtctccactctcatgttatatccggtaataaagccactcctgggtcctcacatacacatacaaaaaatgggcctgcagctcaacaggatgtacaaaagagaagagggatcaccagaaaatgtccccagtgcgatatagtaaaaacttccccgcaatggagagaaggtcccaatggagaggtcacgttatgcaatgcctgcggtctcttctatagaaaagtatttttggtctttggcaaaagtttagcaaagcgctacttcgatgagataaaaggtgccagcgtaaaacgaaaggttcctaggagcctctatggagttatgagaacacactga

SEQ ID NO: 3108 - DNA, 1617 bp, Saccharomyces pastorianus
atgaagaacaaggcgcttgatgaggtccagcggttgtcaagcggaataatccttttttcgtttatgacggggttatttatgttgtcattgtggcataattatgtgactgttcatttccaacacaagcatgacccaagagataccagaagttcgaggacgaacattgaatcaagcgataagaagaagacacgtccagctcgtcactctcgacccctctcgatatcatctgctacccccatagatttagaacgggatcaagaaaataacattgaatatgaccgtaccgtaaccagcaagctctccatggacagcgatgcctgtgtgtcaggagaaggcaacggggatgataacatcaagatggaaactaatgtaagtcaagccccatatgctgcagagaatccatttcaaaatattgcgcttgccgaggatactaggctggtagctgacctgaagtactactacaagcaatacggtattgatattgaagaatttgaagttgagacagacgacggatttattattgatttgtggcatttcaagcccaaattaggggatgttgtagatgaggcgaaacgtgaacctattttgttattgcatggacttttacaaagttgtggggcttttgcctcttcagggagaaaatccttagcatattttctttatgaatcgggatttgacatttggttaggcaataatagatgtggcttacatgctaagtggaacatgaaaaaattaggcaatgatcattcaaaaaaatgggattgggatatggacgagatggtccagtacgatttaaaggcacttgtatgccacgtgctggatagtacaggatttgctaaactatcgcttgtggcgcattcacaaggtaccacacaaggatttatgggacttgttaatggtgagaaactgtacgcaagtgattttaaattagtggataaattagaaaattttgttgctttggctcctgcagtttatcctggacctttactggacgaaaaatcctttgtacgactaatggcaaatggtattgattccccatggttctttggtagaagatcatttgtacctttgatgatggcaatgagagatttgatggttggcaccaagattttttcgtttctttcatatgtcatgtttaattatttatttgattggaatgatgcattgtgggacagagtcttaagagatcggaattttttattctcgccagttcatatttcagtcaaattgatgcaatggtggctgtcgcctgaccaaaacaaactaagttttaaaaagggttcagagaaaatttttcctgacaagaaaacatggttccccgttgccaagaatgatgacgatagtggtaatagtttaagtagcgacaacctacatctaaatccgaaaagacaaaatagtgatgatttcccacatattataatgttcattccaaagcaagatcgactagtggacggtgaacgattaattaaccattttatcaatcatgaagctaattcggtgtacaaaatctggtatattgatgagtattctcatctggacgttttatgggcgcatgatgttattgacaggattggtaagccaatgatagaaaatatgagattccgcaatgcagagtag

SEQ ID NO: 3109 - DNA, 1629 bp, Saccharomyces pastorianus
atggactcttcaagcagaaacctaacgcagtatttaccgtcacccatggagtccttatcgaggttaaagcgtaagggtgtagacaatttccacaaagtgaagaaatccggtaaatccatctacaactataactattcgaagtttgttcctcatccattttctaccattgatgaaaccatcaagcattcagaaagtgaccacgatgaccatttggagactatagagactctaaaggggaagaaagttgaaagttctatttataaaagaactgttggtaagtcactacgtgcagagtctcaactctctctcggtgatccagatgctcttactctcgtgaattctacatctactttcaaattaaacagtgcgtccacttcgacctccttagtatcttcatcttcgacaatatgttctaaaacaaggacatcatcgcgttccttgacaagcttttccaaccaactgaaaatcagagaagaatgtggccatttttctaatgtgaaggagtactgtggcccaatgaaaaagagtatgagacaaacaaaaattctcatcgaagaacctttgaatccaaccactgatatcaaatcgtatatcagctcttacaaccattccaaagcacacaacctaggtgagaaccaacacttacattattaccaactaccatttccatggagagaaaacagatacatcatccacggctataggttttacaatacccactctaagtccctgttatccatcatcaattggtacggctggcataacgaaacttccaacatctggacccatttgttgggagccatgtacatagtctatttggcagtgtacgatttccctcagtctgaagtgtggcagaatcccaaagttccgcaacaagcaagatggatcgttttcgcgttcttggcagctgcgttgaaatgcatgttgagctctgtgttctggcacacttttaacggtacgtcttttctaggactgcgttccaaatttgcatgtgtcgattatagtggtattacaatcttgatcacagcctcgattttaaccactgaatttgtcactatgtattcatgctactgggcaatgtgtatttacatgagcatttctttagcgctgggtgtattcggtgtgtttatgaactggtcccctcgctttgatagacctgaggcaagaccactaagaattagattttttatcctattggcaaccatgggtgtcttatcttttctacatttgatttttttgacagacttacattatgctatatggttgtttagccccgtcacaaacaaatcggttgtttggtatttggttggtgtggtcttctatggttcattcatccctgaaagatttaggtctgatgtccaagttgatatgactattccaactgactacgaactatctactgatttagaaattataacaaagcagaaagagattcatttcagaaaggcaccaaccacccattccaagtgcaagtcctgtccatctcacgccaaatcattcaagtccctatggtgggtcgactatgtgggttgttcgcacactttctggcatttctttgtggttttgggtgtgatcggtcactacagagctattttagatatgtttaccaagaggtgggcactgtcatga

SEQ ID NO: 3110 - DNA, 375 bp, Saccharomyces pastorianus
atggtcaaattaacttcaatcgctgctggtgtcgccgccatcgctgctggtgtcgccgctgccccagccaccaccactttatctccatccgatgaaagagtcaacttggttgaattgggtgtctacgtttctgatatcagagctcatttggctcaatactacttgttccaagccgctcacccaactgagacatacccagttgaagttgctgaagctgttttcaactatggtgatttcactaccatgttgactggtgtcgccgcagaccaagtcaccagaatgatcactggtgtcccatggtactccaccagattgagaccagccatctctagtgctttgtccaaggacggtatctacaccgctgtcccaaaatag

SEQ ID NO: 3111 - DNA, 4251 bp, Saccharomyces pastorianus
atgtgcgatagtccgttgagcaaaagacagaagagaaagactgccgaggaaccagaattatctcttaatcatggtaatagcgaacaagaatccaaggcagaaaatcagaatgatcgcaccgaaaagacaccagatccagattcactttcgctagaatcatcatatgctaaatcccatactcccagaaaacttgttttgagttctggtgaaaaccgatacgccttttcccaacccacgaactcagcaacttcttcactacatgtaccgaacttgcaaccaccggaaacatcttctaggggccgtgactataaggcttactcccaatcgccacccaggtctccagggaggtccccgactaggaggttagaattgcttcaactatcaccagtgaagaatagtaggattgaattgcaaaaactatatgatagtcaccaaccatcgagtgaacaacaaggcaggctgtttattgacaagctcgttctcgataatttcaaatcttatgctggtaagcaagtagtggggccctttcatacaagcttctcagccgtagtgggccccaacggttctggtaaatcaaatgtcatcgactcgatgctatttgtatttgggtttagagcaaacaagatgagacaggataggctatccgacttgattcataaatctgaagcttttccgaatttacaatcatgttctgtagcagtgcattttgagtacgtcattgatgaaccttcaggaacctctagaacagataaagaaaagcccggattagttattacaagaaaggcatttaaaaacaactcctcgaagtattacataaatggaaaagaaagcagttatacggaagtgacaaagcttttaaaaaatgaaggtatcgacttagatcataaaaggttcttaatcctacaaggtgaggttgaaaacattgctcaaatgaagtcaaaagcggaaaaggagagcgatgatggattactagaatatttagaggacatcattggaacggccaactataaaccgttaatcgaggagcgactgagccaaatcgaaacattaaacgaaatatgcctcgaaaaggaaaacagatttgaaatcgtcaatcgagaaaaaaattcattggaatcaggaaaggaaactgcattggaatttttggaaaaggagaagcaattaacgcttttgaaatcaaaattgtttcaatttaaattattgcaaagtaactctaaattagttaatacgttagagaaagcttcctctttgaataaagattttgaatccgaaaagataaaatttcaggaatccttgaaaaaggttaatgaagttgaaagtcaacgtaaagaaatcaaagatcgaatatcatcttgcgcttctcaagaaaagacgctggctctggaaaagagagaactagaaagcaccagagtttctttagaagaaagaacaaagaatctggttaacaaaatggggaaagcagaaaagattttgaagtcgaccaaccaatcaatatctgaagctgaacatcttctcgaagaacttcatggggagcagaatgaacacgaaacagaggttaaagatttgaaccaatcgctggaagaggaacgtcgaatactcgataatatcaaattatctttaaaggataaaactaaggacatttctgcagaaattattcaacatgaaaaggatttagaaccttgggatctccaacttcaagagaagaaatcgcaaatacaattagcagaatcagaactatctctattagaagaaactcaagtcaagctgaaaaaaaatgttgaatctttggaagagaatatttccgcaaagaaagcacgcaagcaagggctacaagggtttattctcgatctaaaaaagaacctaaagtcactcatagatggaagatcgcaaggtgaaaaagattttaatactgccaacttaaagttaaaagagatgcaaacgattttgaacgcccatcgtcaacgtgccatggaagctcgctcttccctatcaaaagctcagaataaaagtaaagttttaacagctctatcaaggttacaaaagtccggacgtatcagtgggttccatggacgcctgggggatctcggtgttatagacgacagctttgatgtagctatttctacagcctgtccaaggttggatgatgttgttgttgatactgtggaatgtgctcagcactgcatagactatttgagaaagaataaactaggttatgcaaggtttattttattggacagactacgccaatttaatttgcaaccagttgatacaccagaaaatgtaccaaggctgtttgacctagttaaacccaaggattcaaaattttcaaacgcattttatagtgttcttagagatactttagttgctcgggacttgaaacaggctaacaatgttgcatacgggaagaggaggttcagagtggtcaccaaagatggtaagttaattgacatttcaggtacaatgagcggtggtggaaaccatgttgcgaaaggtctgatgagaataggcaagaaccaatcagacggaatggatgattacacggctgaagaagtgaacaagattgagcaagaattgtctgaaagggagaagaatttccgtgtggctaacgatacagttcacgagatggagcaagaactaaaaagagtgagagatcaagaaccggatatagaatcgcaaatatcaagggcggaaatggaagctgattctttggctagcgaattgacactagcggaacaacaggtacaggaagcgaacatggcgtacgataagtcagtcaatgacacagcgcaatcgaataaaatcatgaaaaatttggaacacttgagaggtgaatatgatgaccttcaagcagaaactaaaactaaaaaagaaaggattaaaacgttgcaagaccaaatcatgaaaattggtggtaccaacctgcaaatgcagaattcaaaagtagaatcactttgtcaaaggatagatattctagttgctaaacttaaaaaagttaagtctggaataaggaaatctataggagatatcaccaagtttcagaaacagctcaaaaatgttgaaagagatatagaactatcatccaacgagttaaaggtcatcgaagaaaaatcagaacaaattaaagtggatttagtaaaaaatggtacaaacgtgactgaggtactgaacctaaaaagcgacttagaagagcaaagtgaacaattgaaggaaaaggtgattgtaatggaggaaaacattgatgaattcaaatcattggaaatggaaatgaagaacaagttggaaaagttgaattctttactaacttatatcaaaagcgaaataaaacagcaagagaaagaattgaatgaactctcaattagagacgtgactcatacgctcctaatactagacaataaccaaatggacatcctcgatgaagcagttgaagatggacagaaagccgatcaagaagacgactccagtgaagttcaaggtgaaaatccaagagaagagggcgataatgatcatcactgttctatgaatattgacgaaacctccgatgtggtatcaagaggaataccaaggctttctgaagatgaactaaaagagttgaatatagagcttctcgaaggtgatattggagaactaacctgttatcttgatgccactaatgtagatattggaattttagaagagtacgctaggcgtttggccgagttcaaaagaagaaagcttgacttaaatcaagctgttcaaaaaagagacgaagttagagaacaattagagatactcaaaaaaaaaagatttgatgaatttatgactggcttcaatatcatttcaatgaccttaaaagaaatgtaccaaatgatcactatgggtgggaatgctgaattggaacttgtagatagtttggaccctttttcggagggtgtcacattcagtgtcatgccgcctaaaaagagttggaggaatattacaaatctttcaggtggggaaaaaactttgagttccttggctctggtgtttgctttacataagtacaaacctactcccctttacgtaatggatgaaattgatgctgctttagattttagaaacgtctcgattgtggctaactatatcaaagaaagaacaaaaaatgcacagttcattgtcatatcgttaagaaataacatgttcgaattagcacagcagttggttggtatttataaaagagataataggacaaaaagtgccacggtcaaaaacatagatatcttaaatagaaattag

SEQ ID NO: 3112 - DNA, 1782 bp, Saccharomyces pastorianus
atgatgttatcactgtccgccaaggatcacttcacagtgaataactcgataacccatatcgtcaagtcatatcatataaagactctcactacaaacgcaaagacaatgccgcatatcactacatcctttaccactactgctagcagtacaaaattaaaggctttcaggcaagttaggcctgttctgcagaggcatagctcatcatggatggcctcccaatgccaaaaaaggtcaatatctggccaatcttcactaaaagacctgcgccatttaaaccgcttcccacatcacacgttgaaaaccgccaacgatgaattttatcctgccgaacaattgactttggatgacgtaaatgaaaacgtcttgaaggctaggtacgcggttagaggtgccatccccatgagagctgaagagttaaaaactcagctcgagaaagatcctcaatctttgccattcaataaaattatcaatgccaatatcggtaaccctcaacaactacaacaaaaacctttgacttactacagacaagtcttatctcttttacaatacccagaactactaaatcataacgaacaacagctagttgactctaaactattcaaaatcgatgccattaaacgtgccaaaagcttgataaaagatatcggtggttccgttggtgcttattcttcttctcaaggtgtagaaggtataagaagaagcgttgctgacttcattactaaaagagatgacggcgaaacagcctacccagaagatatatttttaaccgctggtgcatctgcagccgtgacttacttgctatccatcttctgtagaggtccagaaacaggtgtcttgatacctattccacaatacccactatatactgccactttggccttaaacaattctcaggccctgccatactacttggatgaaaattcaggttggtctactaatccagaagaaattgaaactgtcgtcaaagaagctatacaaaacgaaatcaaacctaccgtgctagtggtcatcaatcctggcaatcctacaggtgctgttctatcacctgaatcgatagtccaaatttttgaagttgcggccaagtatggtacggtagtaatcgctgacgaagtttatcaagaaaacatcttccccggcaccgaattcaattcaatgaaaaaaattctaagacatttacaaagagaccacccaggtaaatttgataatgtccagctggcttctttgcactccacttcaaaaggtgtttccggtgaatgtggtcaaagaggtggttacatggaactcactggctttagtcatgaaatgagacaagtcattttgaaattagcctcaatctcattatgccccgtcgtcactggtcaagctttggtagatttgatggttcgtccaccagtggagggggaagaatcgtttgaatcggatcaatcagaacggaattccattcatgaaaagttaaatacaagagcaatgactttatatgagacattcaattctttagaaggtatcgaatgccaaaagccccaaggtgctatgtacttatttcccaagatagacttacctttcaaggcaattcaggaagcccatcatttggaattgacgcctgatgaattttattgtaagaaattgctagaaactactggtatttgtacagttcctggttccggatttggacaagaacccggtacttatcatctaagaacaacattcttggcacctggtgttgaatggatgaagaaatgggaaatttttcataaggaattttttgaccaatatcgtgactaa

SEQ ID NO: 3113 - DNA, 900 bp, Saccharomyces pastorianus
atgatatcacaggccaacagcctgttgctgccgttcatagactcactaccactgcatcagataactaagaccgcgctgacaacaaagcttgcggaaatacacagtgatttcaagttcaaagaaatagccgtgccgctaaccgaatcgctgcaagtgtacgaaagggcccagagagcgcaagacctgagaaccagtttgaaggcattggagagcatcgtctatcaaacgcatttccaatggaacaatccccgtccaagacatgctcgcctttttcagaagcactaccatttcctgctgagccattggccctttgaaaaccacaggtctctggttgattccattcccgcacagagcgggaaactggtatccatggcctcaaagggcaactggctgaagacagactggaccacgctgtttcaagtgagaaatccctgggtccgcacaccaccacgaccagcgtcgccatcaccttcattagcacaacacagcatggcagacctcgacgctttcaccgcagagaggacctttctggtcaattcccttggaaaccactacaagttcttgagagcgaacagtcaactaagctacaaccataagaaatacccctcccctggcgtccaaatccccattagaaatgccctgggcgagatctccccacccaagcaaatctctaaactctttgcaagacaattggctcacatttacaccagtctgtttgtggagaacccgccgttatctgctacgaacgaacttgcgttgatgaccgtctttcatgacgccaccttcgagcgacgccatacaagattctacatgcgtgcttgtgcaagggcatacacgatttcgaacgccgactctactagtgagccgttgacgtttcgttgcacccactggggcgactag

SEQ ID NO: 3114 - DNA, 2394 bp, Saccharomyces pastorianus
atgataagatcgaagaggactagaggcacaagaaacaccgaggtgagtgagcccatgggtgctgcggactcgaatggtgaagaatggcatgattacgtctctgacgatgtactggctcaattgagcaagcaccaactgccgcattcaggattgctgcacgagaaggctgcgagcttggcgcaacaatggcatttccagtacgtggtggcttggctctccaatgtctgtgaatcttacactaccacgtcatacactgtagagcaagacggtggtggttctaccaagtgcttatggaagagtataaagttcgacgaaggcgttttcgtgacggatgtcttttcgaagattgatggaaaggactcaaactattacaacgatgaagtagacgtcgatggtgcttcgcagaatttgtatgatcagattagattgcaattattacaccaattggcaggcaataagagcggacaattgagagattggaatgttattgttaatcatcatttcgaaaattccagcgcattttcagatctggttactacctccccatttctggagctggacattgcgcgtcagtttgaaattctttacggcattataaagttagttgaagtgaagaatatgttcttcaagaactatttagtgaataacttgcatttgttcacattcaacgaaattatactagatgacgacaatgaagagggggggacgcgaagtatgtttgccttgcccaatgttggtgttcttgttgagaaaactatgcacagagtcaaagaagacccctcttctcaagtctctcagactctgaatatcccgataaagctacagaactgtacaataaaagaaatggaccccaagatgccggattccgtggaactgatccatctggagtactctcacgacattgacgcatacctgcaatctatcaccgtcgattataaagtggtcagcactggttgggagtccatgttggaatactggtcacagaacagggactcgaagttaattgacgagtttataacgagtttgataccgacattcgcagagcatagattgtattcagccaagatcttgaccaaccgagaaaaagaaagagccattgctgagttgatgacaagaagaaaaagatcttcgaggctggtggccaaagaagaggagagcaagaaaaaggatttggaaagtgaatggtttgaaaaattggatgaaagagaacagtttatcagacacaggaacaagctggtgtcgaaggaaatcaagaagctcaaggacctactatggggtcagctgtggcaattatacgaccaggattacagagatgcaaaactgaccaagcgtaacgagctcacggacagaagtggctccggcactccatctctcgaaccatttttggggaaggacgaaaacaacccactgaatgaaatcgataacaaagttcttgatcacgggcccaactttcagtcgggtatcatccccctggagcaaccgactcctgaaagccttggcttgctgtccaccgccgatgttcctgagttacccaccgattattgcataaccaaggaggagttgaacgaactggccaactatgggatattcacgtcacagcaagagccggacagccaagattccgttttccaatgccccggcgaaccagagttggcgcccatggtaatcacggaggattcggagacggacttgttcaataatcacccattggtatgttgcgatcagtgttacagatggcagcactgggaatgccaaccaccaaagatcaccgagctgatatccttgaccacgaagcccccacagcacatgctgtcgcaacgcgattttggcgtcatcataatgggcaactcacatggcaacagaaggtcctcgcgccgaccccaatccacgcccgaacccagttccaagtccacgagacccaccgataagcgcaaacctctgggagaatgctccactttcatctgcggttggtgcatgaaagacctggaacttgagctgcgtaacattttcgtgcctgagttgaaaataatcagggctaagcaaagaaaacagcaagaagaccgggaaagaaggaaaaaaatgaaggaggaaaagaaaagactcgaacaactcgccaaacaaagggaactgacccagtccatgtcacctcctacattcagcaccgcgttcccccacatgacaagcggcccactgccaggcatctccgcatacggaacaccgaacctcggcaccattccaggactgaacaccaatgctgctcgccctgtaatcgcataccaacagcaaatgggggacaagactatcccacaaccacaaccactacagcaaccacaacctccgcaacaacagtcccaacaacaaaactttcacttccaatacccacccaccaactaa

SEQ ID NO: 3115 - DNA, 396 bp, Saccharomyces pastorianus
atgaagtacaacggttggagaattggagtacttctcacagtgcttttcctgggcgcatctgaagtggacgccttcttcaatttcggtaaccatcagcaacagcaacagcagcagccgcaatcatatgaagaccaagttttgaatagtccatgcgacgggtacttgtgtcccgatactttggcttgcgtggcacaacagaaggactgtccttgtcccttccctaaatctcagctgaagtgtgctctccccagtaataaatacgtttgcatatcgaaaccagccacacatgatgaaaagctaattgctatatacgatgatcctgtaaaaggtcctaaggcaaagaacaaaggccttagagactgtgggtgggtatccgaggcttacaaaagtggttaa

SEQ ID NO: 3116 - DNA, 1200 bp, Saccharomyces pastorianus
atgggtagcttgttgaggccggttgatttggtaaaccagccacttgggtttcaagaaagatataagattttgcaaaaattatttacacagttacaaaaggcgtatgcacattcaaaaagaaccaatatggatcttgaaaggctggcaactcgtttagaagttcatgtagccaaaaatagtttgtccggtcagagttataaatttaatatgagtattctcttacgggatatactcaagtacaagggagatctctcgaaggtcaaaattaatggacgtcccctcaaaggatccaaaccaagtagcaatacggggccgatctttacaaggtcacaagctatggaggctcttaaagctttgattttagatgtaaaagctttggaaaagaatggttacatcgttgaggaactgcaaaaggaaagtaatgatgaatgtgatactcaattgtatgtaccatgtctgagatgcaatacaaattttaaaaaaatagatataatggaaaacgccttatgtagattccatccgctaaagaaaatatacaacagggagactagatgtcacctttatccgtgctgtggtgagaccaccaactctgtgtcttttttgagactaggatgtaagacgtcccaccaccatgtgtacagaggagaatcatatagcgatttgtgtaaaatttccgagttttctagtagcgcacacatcgatggagttgaaaatgttctctctctcgattgtgagatggctttcacatccctaggttacgaaatgatacgtttgacgattgtggattttttcacaggagaaacactatttgatcatgttattcaaccagtgggtgaaattgttgacctaaattccgacttcagtggtgtccatgagattgatcaaactaaatgtcccacgtatagggaggcgattggtatgtttttatctgaaaatttgataaataaaaacagtatactcatcggccacggattagagaacgatctaaatgttatgagaatatttcacaacaaggtgatagacacggcagttctatattcaaaaacaaaattcaaggtatctttgaaaaatttagcatttgaatttttaagtaggaaaatccaaaatggagagcatgatagttctcaagatgcaatagctacgatggatgtcgtaaaagttaaaataggtgtttctccaagtcaaaagatttgggagtag

SEQ ID NO: 3117 - DNA, 684 bp, Saccharomyces pastorianus
atgaacggacttagaattgccgcaagggtccagccacctcgtcaaacaatcatatttttacatggactaggtgatactggttcagggtggggatttttcgctcaatacttacaacagcgggaccctacctccttccagcacacaaactttgtattccccaatgctccagaggtccatgtgacagcaaacggtggtgcattgatgcctgcttggtttgacattctagagtgggattctagtttttccaaagttgatagcgatggattcatgaattccttaaatgccattgaaaagacggttaaacaggaaattgacaagggcattaaaccggaacagatcatcattggggggttctctcaaggtgctgcattggccctggcatcatctgtcactttaccatggaaagtcgccggtatagtcgcactatcgggttttggttacattccgggaatcttgaaacaacacaagaacgatctcaacgtcaagacacccatttttcacggacatggcgatatggatccagttgtacctatagcacttggcttgagcgcaaaaaaattctaccaagacacctgcggggtacaggattatgagtttaagatttatagtggtatggcacattctacagttcctgaggaactggacgacttaactgccttccttaagaaatgcctatctttatag

SEQ ID NO: 3118 - DNA, 900 bp, Saccharomyces pastorianus
atggaattcatatctgcagattactcaagcagcagcagcagcaacagcagcaacagcagcattgataccgacagcgaaagtgaaagtggtaaccaagctgaaatacaaactggaccaaccgagaaacccagaagacaatcagaaggttgcattgatctacctgcaattccagaatctgttatatcgaagtaccatatcacgccgaacttgcaaaaatacgaacagcaagatatgaacatgactcctttttggcgctcgtttgtatattgtgagtggcgtccgaccccagaggttcgtcgagaactccagcaaatcatattcaagtataccaagacatttacggaaaaaaattccagtgatccataccaactagcggaacttagtcctctgtttctctcgaacttgggggcacccaaaccgttacacatttccctaacgcggtcactgctgttcgaatcagaagaacaacgacacatattcatccgggaaatacgacacggtttgcagaataataaatttgcgccatttaaactcgaggtcagcccacatccaaagctgtatatatcagagagggccaacgccttgtatctgggactccccatctccgagcgctcgagtaggacacgtctttcctcacttaagcccataatagaaaacgcacttcagaaatcaggcatccccaactaccagcaactcatcgtagccccgtgcagcttccacatctcaattgccatagccaggtacccctccagggccacactacaacgctatcaacaactcaacgagatcatgggggcaatcatgcttatcaacaatgacctcacataccaaccaactgtcctgatcaactcgatctactgtgatgaaaaccgtcagtcaacaaaaattccttttcaatag

SEQ ID NO: 3119 - DNA, 2283 bp, Saccharomyces pastorianus
atggagtttcaaagagcgcaacgaaacctaaaatttctacaaaatgaagactccatgaatattaacaatcacaatacaatgaacggtgagagccagagagcctcatcgatagcgatagaaacacagataccagatgttcagttttctttatcatctgatgatgattccgtgaatactcagagaagaaagagtagtgtgcaaaaatcttctgtggcaaaagagatttctataagcaatactgagagtgatacaaatgttaacactatgaatacaagcccgggtgctgtttcccaacctattttagagggtcagaaactcgatatggctgaggagaatatattcataaatactcaaattcaaagtcggcttgatgacgcagaggaggcaacaagtctaaaatcaaaactcaaacagttcaaatatgcattgaaaagcaatagtccgagtgaagtcctcactgattcaactataacagcaaaacgaaggccagccataagaaaaaccaaaccgaaactcaaatcaaaagccaaaagtaagcgagatcctaacattattaaaaatataaccgagtttaacattaataactacgaacgctcaaggactactagtttattgaggcagttatcaggcaagcacaagaaggttctggatataataaaggcacaggagtcaggaagtaagagtgcattgtcaaaagcaaagaatggaaagggtgaatgtggtacgtttgatacttatagcgaacaagagtggaagcatattttgaagttgcttttggagaagtttcctcatagtgagtcaacagacttgaatgaagttcaaaaatttttatatggaagtgaacaatcctcaagttctctaggagatccagaaactccacataaaaggctctggacagcatcacagttaccgcccgaactacccaacgagtctgctcaaccggagcaagaaacaaaaattcacaacagccaaagtgcagtaaactttttgtcgctgtctcaagtgatggacgataagagtgaaatcatgaaagatgaagaggacaaaatcatttcagggggattttccgcaagctctccagaatatggaagtaacctagagggacaagaatcttcagcgcataatactgctgaaaacactaaattaattgtagtggcacaagtaaatgaaattgcactggcggatgacacggcttgtaaacctatgctagttgaggaggattcaagaagcaaagataacggatacgaggaccacgataatatttcaattgtctcggatagtaccgacgaggcgtctacgttatttccattagatccatatcggtatgtttttattgaaaacgaggatagaccaggattggttaccgataccatgggtagcacacaatttttcactccaaacacatcacccttggatggtataattgacctcacacaagaatccttcaaagctgttcgatcattgatatcgcctttaaagatagaaaacaataagactgccgtatcacaggtatcaaatcaagttcaagttccagcaacaagaacccccacgatcattccccaaaaaaatctcactaagatattaaaaacggaagaagaagtgaatagtctagaaaatgtcatcaggattaaattaatgcatgaagaagtgagtcaatttaaccctgtaataaaatctgattgttacgaaatcgcagtgaacgattccgaagaagaggaaacagaatacgatgataaattttgcattgctgatattgagttgataaacttacctaaaggtcttgttcaggcacctccaccaaaccttacgaataatgataatattaataataaaaacggcgttactacgacaagcgttgctgattcacctgaaaaaattcacgaaatcatcacttcacaatcaatgaaggaactacgacaaagcttgaaaacagtcggactaaaacccatgaggacgaaactagaaataatcgagtctttacagactgcatcacaaatactgtcagcaaatacggtacccactccaggacatagcgacgagcagcataattgtgcgataaacttcagcaagcttgagatttttgatcacttaacggaactgatccagtcctttcccgactttctggagaggatatacacatttgaacccattccactaaatgagctgattgaaaaattactaagcgtcgagccgttcatttcacaaatagacgaaatgaccatcagagaatgggcagacattcaagggatctgtctgagaaatgataaaaaaatagtgaaataa

SEQ ID NO: 3120 - DNA, 1449 bp, Saccharomyces pastorianus
atgcaactaatgttagcttctaaaagctccctgctacttaccaagtcccgcctgccctcggcatgctaccctttgttgaagaggtcctatgtgtcaaagaccccatcgcactccaacacggccgctaacctgatggtcgacaccccggctgccggcaccaccaacggcaacagcgtgttggctccccccaactcggtcaactttctgcaaacactccccaagaaggagttgtttcagcttggatgcatcggtgttgccacattgaacagcttcttcctcaacacgatcatcaagtttttcccctacattcctatgcccataataaagctctttgtctcctctctgtactgtggtggtgaaaacttcaaagaggtcatcgagtgtggtgagcgcctacaaaagaggggcatttccaacatgatgctttcgctcaccatcgaaaactcggagggtaccaagagtttgaacagtaccccagtcgaccacatcgttgacgaaactatcaggtccgtccacaacattctactgcccaacatcgtccgccaactggactccggaaccaagtccgttaatgacatcgcccccggttacatcgctttgaaaccttctgctttggtagacaaccctcacgaagtgttgttcaatttcagcaaccctgcattcaagactcaaagagaccaactgatcgataactgttccaagattacaaaggagatcttcgacttgaaccaggctttgctaaagaagtaccctgaaagaaaggcccccttcttggtctctaccatcgatgctgagaaatatgacttacaagaaaacggggtttacgaattacaaagaatccttttccagaaattcaaccctgtttcatccagactagtctcatgcatcggtacgtggcaactgtacctaagggactccggtgatcatctattgcacgaattgaagttggcccaagaatacaactataaacttgggttgaaattggttcgtggtgcttatattcattcagaaaataaccgtaaccaaatcatttttggtgaaaaggacggtaccgacgaaaactacgaccgtattatcactcaagtcgtcaatgacttgattatcaacggcgaggattcttactatggtcacttggtcgtagcctctcacaactatcaatcccaaatgctcgtaaccaatttgctaaaatctacccaagataactcgtatgccaaatcaaacatcgtcttgggtcaactgttaggtatggccgacaacgtcacccatgacctgatcactaaccatggcgccaagaacatcatcaagtatgttccatggggtccacctttggaaaccaaggactaccttctaagaagattacaagaaaatggagatgctgtgagatctgataatggctggccattaatcaaggcaatagcaaagtcgattcccaaaagattaggcctatga

SEQ ID NO: 3121 - DNA, 2334 bp, Saccharomyces pastorianus
atgtggtacgataggaaagccattccgccacctctccctagtagaccttgtggtgctgccaacatagagccccctcctataccacctcgaagaaacgttcagcctccaaccttttcctctgaagacccctttaagtctcgagttgttaaacctgtggcagaattgctgcatttgtacaaatcccccgccaatgttcaatcgctacatggcgatttatttcagtcacctatcctccctagtttaggacctcctctctcaatcttcaagagtgttcaacatgcggttcccaggcccaatacggggaatcaggatagtggcccattagagacaaacaaattctatacaaacattttactcgaggataatacacaaccaatatggacacatccttattccctttggttttcgcgtgacccagaattatttggtttggccattaatcatactttggctccccaaagggtatttgacacaactactaatcctccaagattctttttcaatcctacaaatataaaatcctttgtgttcaaggcaagagagtttagttcggtagaagacatcaagcttgaatttcaagatatgaaacacatgtccatgcggttactattgtccctcaacgattctcagttcatagaatacccgctagttcaagggatgggcttcgttacggctatttatcatgatctagtttttgaattgagaagtgctgttggttttaggcgcctagagcttgttactacaaatgagaggagttataaataccatattcaactcgaagacaaccgagtttggccgctttacttgacctcgccaaagtgctcttttccacaagattttcagttatcactaactaaaaacaatacgataacgtcttcccataaaattgatggtcttgtttgtcaattgtcaggggattccgtccctgatatagatttggcagcaggttgttacccagtgacttgcaatttatcaggtcaaactatcaatgagcagctaacaaattataggtttgattattctgtggaaggcccatcacagtcgggcactacactaatgtatgctttgccacatcacaaagctacattctcttcagaaatgcaaaaaagtgaaatcaactctaaattggattccacggttaaaggtgcgatgactggttacctcacagacagctttgaaatggaggtacaaataccgaatgaattgggatttgagcctgtagccctctatttggatagaaaatccaattatagccatgcaacgctatctaaaatccaagaggctgcaattcaagaggtccggtccggcgatcctcaacaagaatcgaacattgattccatgtatttttctggcaaaatactagcaaaatacgcatggatcctctatgtgacacattatattcttcacgatgaaactttaactagagagttactaagtaaactgattatcgcagtagagagatttattacgaatgagcaagttttacccttaacttatgattctacatggaagggtataatttcctcaggtacttctagccaagatttcggtaattccaactataatgatcatcatttccattactcctatcacgttataactgcggccattatttctttagtcgataatgacttaaatggagatactaacaaccattcttggttaagtaccaatagagattgggtcgagtgtttagttagagattattctggtgccgacagcaatgatccatactttcctcaattcagatcatttgattggttcaatggtcattcatgggctaaaggtttatttccaagtggtgatggtaaggatgaagaatccacttctgaagatgtgaactcttgttatgcaataaaattatgggggttagcgactaaaaactccaaattgattgatatagctaacctacaacttggtatcatgaaacatgtttttcagagttacttcctgtacgaaaatagtaataccattgagcctaaaggatttatcagaaataaggttagcggtattctatttgaaaataaagttgaccatgccacatattttggtatggagccacaatatattcatatgattcatgctattcctataacatctgcatcttcatgggtcagatcgccaacttttgtcaaagaagaatgggaacaaaacatgcaaccgataattaatcaagtcaatgatggttggaaaggtataattatgttgaatatggctcttcttgatcctaagttctcgtatgactttttcagtcagccaaattttaatagaaatttcttagacaatggacagagtttaacttggtcgttggcttatgcaggtgccttcatttag

SEQ ID NO: 3122 - DNA, 300 bp, Saccharomyces pastorianus
atgagtggagtaccggtaaaactactaaatgaagcacagggacatgtcgtctccctcgagctgacaacgggggccacttaccgtggtaagctagttgaaagtgaagatagtatgaacgtccagctgagagacgtaacagctactgaaccacagggagctgtaacgcacatggatcaggtattcgtacgcgggtctcagatcaaattcatagttgttccagaccttttaaagaatgcgccgttattcaaaaagaattcatcaaggcctatgcccccaattagaggacctaaaaggaggtga

SEQ ID NO: 3123 - DNA, 762 bp, Saccharomyces pastorianus
atgtctttgaaaaagcagataccaatagccttcgagaatgcacactatttcatagttaataaaccacctggtatcctatctcaaccaccggactcgagaacttggaggagaacacaccctgaccttgactccacccccctgttagtaagattcaaaacactctattcttcagacaaggacgtcgaagcatgtcgaacagtgcataggttggaccattgtgttactggcggcacgctgatcgccaagactaaaaatgccagcatgatgttttctcgatttttacagaaaggcggtaataaaggttataaactgcgaagaaaatacgttgctattgttgagcactcgagtcactcgaaagaaccggtcagcaatgaagtcgggtatgggttaaaatataattctttaatttcgcatgaaggtaaacaaattacgaagtttaagaaagtcgatgatcggtgtattgttctgcaattggtaacaggtaaaaagcaccagatccggtaccatgtttcgcaaatcctaaatcaacccatcgtaaatgaccagaaatacggtagccctatcaagttaccaagagcattccacaaccagattgcgttgcattcagcatgtataacgacaaaaatcggcctgcaaacagaggtgcacttgattccgatggagttcaacaataatggtgagctttggccgaggaaatacgtcgatgaagagggagaattcaactcatcgatcaaaaaggtactcctagaaaactgggattga

SEQ ID NO: 3124 - DNA, 1167 bp, Saccharomyces pastorianus
atgtctacaatgtcttctacagcagcaccacgacctaaaccttgggaaacaagcgcacccttagatgaaccacgacctaaccctccatcattagaagcgatgatgacttcgccccagcaggactttagtcaaaacgataataacaacaacaacagttcaaacgaatcacctcctgaagccttaccgcggcctatggcgctaaattcttccagcacgtttggagaaccgaacacgatgccaggcatgtacggcaatagcaattacagcatgccctacgataacaacccgtatggcatgaattccgtttatggaaacagcataggtagatacggatacgggggctcttactatggtaacaactatggatccctttatggcggaggatacggtgcgggaaccggatatggaatgaataatggcaatggactaggggagtcaacaaaggccacatttcaattaatagaaagcctgataggagcggttacaggatttgcccaaatgctagaatccacatatatggctacacacaactctttcttcaccatgatatcagtagcagagcagtttggtaacttgaaggaaatgttaggttcattttttgggattttcgctataatgaagtttcttaagaaggctctctatcatgctagtaaaggtagaataggaacaccacctaaagaagccacaagccttggggaagacaaaaataaactaatcgaagatttccaaaggtttaatgaatcaggctcagcaagtcctcatggcaaagctgcaagaagaaaaatatcatggaaaccgttaatattttttttaatggccgtatttggtttcccatacttgctaaacaaatttattgctaaagtacaaaactctggagccatacaggcgtcacaaggaaatggtggtgagcctattgatccttctaagttagaatttgccagagcattatatgattttattccagagaatccgcaaatagaagttgctttgaaaaagggtgacttgatggctattctaagtaagaaggatcccttcggtaaggattccgactggtggaaagtaaggataaaaaacggtagtattggttacattccctataactacatcgaaatcataaaaaggcggaaaaaaattgagcatgttgatgacgaattgtctacatattag

SEQ ID NO: 3125 - DNA, 672 bp, Saccharomyces pastorianus
atgtcggcaggtgatatatcagctataaaaaccaaatctaccaaaaagaacagaaggagaaagaagagaagaacagctgatgtttcatcatcatcagattcatcatcagactcatcgtcattttctgaaaatgaagtagaagaagttactaaagaaactgctaaggaggccatcactgaagatagtaatacccaccagggtctttctaacagtataaatgaggacgaagataaagacgttgaaatggaagtttctgatgtcgagctatcagatgaagaaaaaggcgaagatttaaacctaaactccgaagaaataatagatgattccactaaaatctctttaagcaaactttcagaaccctcaagatctcaaaataaagacagtttcttgaatgcatcgaaaattgctgaaaacatcaaatttgcaagaagcgaatataacggattggcggaaaatttcacaccaagagggaaagaaaagagtaaactaagagaagaatatctaaacctactttttacaaactacggtgatgatatcaatcgtcttagatcggcacctgattttacgaataaatcgctatccatcttggcggatgttctggaggaaggcataggaatgtttgacattggagaactagaatcgatcctgaaaaataaagaaatggagaagtag

SEQ ID NO: 3126 - DNA, 2451 bp, Saccharomyces pastorianus
atgacatctacagacgatgagcatgctgggcaggaaagggacgctgagttgattgagattggaggtaagagagtaagcaagacttcgacgggcaaacgcaagttccacaacaagtccaagactggttgcgacaattgtaaaaggagaagagtgaaatgtgatgaaggcaagccgttttgtaagaaatgtacaaacatgaaattggaatgtgtgtatagtcccatacaaccaagaagaagaaaagattcttcgacatcaaaatttggtaccatcatcgaagatggaatggacaggaagcatttaaatggtaatacaatcctattacaccaacagcaacagaagctttaccatcaacaagagcaagagcaacttcgtcagcaacagcacgtccaactacagcagcagttattaccgcatgtaggcactgacgagcaggctaatgcgccaactaacatcgctccgtcggtatccaacaatatggaaactcttttattaccgcatctgttggcaaatctagtaaacaacagcaatagtaatactaacagtaatacaaacggtggtagcgaactacacaacaatttaacccaagccgtgtcgaatacaatgaacaacaataaccatgcaaacatgaccataccgggaaattcgcctttgaatgttccaataacgccaagttttcaatcaacagctatgaatttgtcgagcagccttaacggcttattatcaccagggaggctaaattctataacaagtggaatgcagcagtcgcagcttccacaacaacaatcgcaactaccacaacagccaggaacacaatccccattcaataatcttccctttgaccagttggcacaattaaataaaatgggattgaatttcaatatgaagagtttcaatactttatttccatccggcgctgctaacggaattgcttccgagtttcaagagttatttgggttaagcaagtttgccacatctaacaatagagccatcaaagtcagcacggcagaagaagcgttggcaaatatgcaacaagaacaagagagtaaaaacaaacaattcacaaagaatccgctggacaataccaacacaaatatcgtccactcagacaacaacccacttcgagaaaacgataataaagtaaacggttctgatacgctctccaatagcaaaaacttgatgattgacaatacaagtctttcaatgagtcccacacacacgttgacaaaagctacaatagatcaaacaattgcatccccttcgacaagaatatctaatggaacttctacgaaatcacttttgtctataacggacaatagagcttctctgaggaattctcccaccctaaaaacatcaccaatgggtgatctattgtcacactcggaaactgtatctccacgctcttcacactctcacgtacaccagcattcctcccctcattcaaacacatcatcgacttcacatctaattcctgaattagttggcttatccagaaaatcaaacctaaacttgatagatttgaaactttttcatcactactgtaccgaagtatggcacaccataactgaagctggcatttccggcccggaagtgtggagtacatatattcctgatttggctttccatttccccttcttaatgcatacgattctggcctttagtgccactcatttatcaagaactgaagctggcttggacaattatgtatctaatcaccgtttagaagcattaagattattaagggaggctgtcttggaaatttctgaagataataccgacgctttagtggcaagtgcattaatattgattttggattcattggcaaatgcctcgagtagttcacccactgcatggattttccacgtcaaaggtgctgtgactatcctaacggcagtatggcccctatcagaaacttcaaagttttataatttaatttctgtggacttgagtgatttgggagaagccgtagtcaatcaaagtaacaataccaacgataatgacagtagtaatagtggtgttaacaacagcaataacaatgcaatatcggaactggtgtgcttcgacgaaggtatagcagatctatatcctgtagaaattgattctccgtatttgataacattagcatatctagacaaattgcatcgtgaaaaaaatcaattggatttcatgttaagagtcttttcattccctgctcttttagataggacgtttctagcattattaatgacaggagatctaggcgccatgagaataatgaaatcatattataagctgctaagaggttataccacagaaataaaagataaggtatggttcttggacagcgtatcacaagtattaccacaagatgttgatgagtacagtggaggtggtggtatgcatatgatgttggatttcttagggggcggattaccttccatgaccaccacaaacttttcagcttttatgtaa

SEQ ID NO: 3127 - DNA, 987 bp, Saccharomyces pastorianus
atgtcgagatacattcagcgatcggcgtacagaacttttaatgcctataagtggcgatgctttagcacgcaatcctttgcctttaaggaaatgacacatcctataaaaccatctgcacaaatcctcagacatctacaattcacacaaagaataccctttcaagaaggtctggaaatacaggagaagctcgtcagagcaaacttagatatcaaggacatccaatccaagatcgagaggaaacttattcaattggatgaagagcacaaaggcacagcaacgataaacgacagcgaaaaaaagatactggacaatattatggcaatgaaacccaacccaataatattaacatttgagtttgaaccaacgtatactggtgggaaaagaatcaagaaaactatgacaccagatcaaatagcttgctatgaaagttttattccagaaacgcaaaagaataatccgaaaccaagattcgttcaggttgaaagaggtggacaggtaacattccatgggccaggccaaattgttatttacattattttggatttaaagacattccacaatttccctgcgaaatgcttggtttcatgtatcgaacaggcgactatcaaaacattaatggatacaaaaatgagcaatgattctggtaaatccttgaacttagatgctgtaacgactaaggaaactggggtttgggttgaaaatggcaaaaagaagattgccagcattggagtacacgtcagacgttctataacatcgcatggagtagcaataaacgtcaatactgatctatcgtacatgaacaatttcgaaatgtgtggtttgaagagcacctcaacgacttcagtcaaggagcaacaacccgatgcccatgtcgatgtacaaagtatagcaattagtttcgttaaagaaatgacaaaactgctggggataaagaccttggaaagaatgcagattgatgacatcaacacactaaaaaacaaccagtga

SEQ ID NO: 3128 - DNA, 429 bp, Saccharomyces pastorianus
atgaaaatcggcgacgtagaggacagactacttgaagagctaaaagaagcagcactcaaggcgcgtgaactctcttacagcccctactcccacttccgtgtcggttgctccatattgacgaacaacgatgtcattttcactggtgccaatgtcgagaatgcaagctacagcaattgcatatgcgcagaacgggttgccatggtacaagttctgatgtcaggataccgcacaggctggaaatgcatggtgatatgcggtgactctgaagacaagtgtgtgtcgccctgcggtgtgtgtagacagtttattaacgagtttgtaaccaaagatttccccattatcatgctcaactccaccggcgcctgttgtgtaaccaagactattggagaattgctgcccatggcctttggtccctcccatttggcctag

SEQ ID NO: 3129 - DNA, 1071 bp, Saccharomyces pastorianus
atgccgttagtctctagaaggtctactcagtcggaaagcacttcaatcacgaaggaggaccatgcaggcggagcttcccggacagtattgttctttcgatggctagttaccttagagggcgatcaagatataaatgaagggaaaggctacatatcaattccgaacatttcgaactatatcttcttctttggtggtaggttaagaacagtaaagggttgtaagcctttgtggctgtgggttctctcccttattgtatgtcctatggttctattctccatctttgagacacataaattgtggtacaccaaaaacgggtataaagtgctggtcattttcttttattatttttggatagtcacttttatatcctttataagaactgctactagtgaccctggcgtgctcccgagaaacattcatttgggacagttgcaaaacaactaccagattccgcaagagtattacaacctgataacactacctacacactcgtcggttcatggtgatataacaatcaagtattgcccatcgtgccggatatggagacctccgaggtcttctcattgctcgacatgtaacatttgcgttatggttcacgatcaccattgtatttgggtcaataattgtataggcaaaaggaactaccgtttctttttgatatttctgtcaagtgccgtgttttcgttaatcttcttgttggttaattgcgccattcatattgcacgagaatctggtgggcctcggaattatcctgtggcgatactattaatttgttatgtagggctaaccgtgtggtatccagcaatactgttcacctatcatgtatttatggcaggtactcagcaaaccacaagggaatttttgaaaagtattggatcaaagaaaaatcctgtatttcatcgtgtgattaaagaaaagaatatttttgataacggctcctttttaaagaatctaggccacttaatgttagagccgagaggcccaagttttgttagtgcgagagaacggcatgaagctggggattggagatttatgaatttatcaccagtgcacagttttgaaaaaatttag

SEQ ID NO: 3130 - DNA, 4656 bp, Saccharomyces pastorianus
atgagtgatggaggccttctttcagcagcaaagtacaacgtagttgtcgaaagctgcgatgttttcttagataaagaccagtttagttcagcggtaccactattgccggcgctaagtcagaaacaagagaatgctattcaaaagttgattaaaaccgggaaagagctgattgacgtggcctcggtaaatattgaaatttcagagagtctgagctttgctgaagataagaaatacgcatctggaattaaggtcgatgtagaaatgttaccacgtgaagacgataaaaaagtttcacttatcgtatcatcagattctgtatcattgcttcaagtcggctttgcaacgcagaacagttcaagggaagtggttgacgaccggcttcccctgatcctggatatttgtgctcataagaatcaagaaaaaaacttgaaagaacagttagcaaatcggaaatccttagagacaaggccgccaagaaagaaaaggaagaagcattctgatgccagcgacgatgaaaaattattgaaaacccgaatacatgaattgtctttgtcttataaagactttgagtgttctccaattattttgaagtacgaagaagcatcttccaaatgggtgctgtcctttactttaaaattgaaattcatgaaaaataaatttaatcggttttctcaagagactaaccaaatattggatttaacgtactccgatagagacgagaaagaatttgaaaaatatcacgcacatactcacattcatacgaaattcattcaaaagcaatttacttctcagattttggaatatagtaaaggtaagttgtcaacgatcaagccatttttagcccaatctatacctaacctaaaagtcaatcttttacctttccagcgagaaagcattgagtggatgttactaaaggaaggttacggcacctccatgagtggcatgcctgtagccgccagtgaaatcgggctcaaaaattttatgaatgaatattatgcatacggctatgaattagttgtacgcggcaatggtgaggtgggaccatctctattatggaataaattaacaggctatatactcactgttgatgacgctgcacatttgtatgaccaatatagacagatgcaaatgaacgacgacaacccaattcacgccaagggtgtgttagcagaggagatgggcctgggtaaaaccattgagattttttcactaatacttctcaacaggagaacgctaaaagatccggaggcaacgttcgttgacgacgagaacagaacaatcataaaaaccaaaacaactttgatcatatgtcccaatgctatcttaaaacaatggctcgaagaaatggaattacatacaaacggtttaaaatggtataattataaaggatacaatgaagtaatgcgccattgtaaaagtgtggatgacgcagttcaaaaattatcccaatacgatgtcatagttacctcatataatgtcatcgcggctgaggtccatcatgccgaatttaaccgcagtatcagatcaagaagattgaaaagtcctaaatacgactattcctcgccactagctttgatgcaattttatcgaattattttggatgaggttcagatgttacgtagttcatcaacatactctgcaaaatgcacaggtttacttcatagaatacacacgtggggagtttctgggactccgatacaaaacatagaaaactatagaatgatcatgtcttacttaaagcttcatccattttgcgatgatctggatctcactcatactcttcaagacgaaataaaactgcgaaatgaggccaatgattatacagataataagttggtatgtcgatttaagggtgtgagattttcaataaaggaatgtatgaatatgttttacaaatatgacctctgcataaggcattccaagtcagacgttgcgtcccaaatcaatattcctcaacagcataattatattattcccctagaatttgcacctatcgagtgggacaactacttgaatctttggaacagttttttagagttgagcggttataactcagatggtagtgggtcaccacgagtaagcaatgcctttttgaacgaatggttgtctagattacgatacatttgctgtcatgcactattcccagagattttaaatacccgacagaagcgcctccatggacactcggcaaaaatctctaatatcaatgacatattaatttccatgcgaatggacgcatttgacagtttaattggctattatagagaaaggttccatttatcaatcaagcaagcacaatacgaactagaaatatctaacgagccctcaaaagcacttcaatcattgaccaggatccgagacgatctaaagaatcacctgaatcagaaatttgaaataaaagatccattcgacatttctttagatttcagtgatgacgaatacgggcaggaaaatttagatcaaaatgaaggacggaccacaggtgacgaaagcggtaaacaatttagctctgcgaagggtcatgaaagtagcagtgacgaggaagtaatatcagaccagctaaagaagagaggactacgtgctatgatgaatctactgcatgactgctatttctttctcggctcaatctattataatttgggctcacgtaaactagaagaggttgatgataagaatcaaaaagaaaaggtgaaatattcggatgttttcccaaagttagaactagaagaaattgaacaaaataggcttttggaacaagaaaattacgccaatgcagaaattttgagaaaatcgattctttcttcggaggctcgaaaagttgatttaaccattgaatcggccagaaccaagttcgacctcgcaaacaatgtacctttacggctcataaatattgactttgatcatagaaatgattactcgtctaacttagcggtctctagatgtttcaagttgctaagcaagttaatacaagcattgaatgagcagtcgaagaattttaatgagctgctagaggaattgctcactgccatctacgaaccagtttaccaaactgaagatgaccatataagtgataaggttattggtggagaagaatactcaacatcaatcgatagtcaagataaaatattcagtctccttggttgtttggagataattttacagaatagggataacaccttgacttcagattctgaaatcaaaattcctaagaatttggtgccagaaggtacaataatttcagaataccaaaggcagctgttaaaaaacttgaaattggtttcaggaacacctttacaaactatttttgacgaattaaaaaacaacagaatagtaaggcgcatatccacgagtaatgaaaacgaaccctccattcaaaatttcgaagattacttgctacaatacgaaacagaaagtaagaagctgctcaaatataataaacagattagggaatccttgaaaactttaggctcaatatacaatgctaagacagagtattacggtcagctacaaagaatttctgactctttggtatctttacattcattgagtttgccacaactaagtcatttattaaaaactattaaaaaatcattgggtggtgtcctagatgcaaaaatcaataacaccgaatcaaggttaatatatttaaagaatttgtctaggttaaaggatacgataaacgagaatcaagttttgagttgttcgatttgtttgggtgaagttgagataggcgctattatcaaatgtggacattatttttgtaagagttgtattctcacttggttacgagcccacagcaaatgcccaatctgtaagagtttctgtagaacatcggaggtttacaattttaagttcaaaaacacaaaggaaaaaataggaaaggaaactcaggagtcacaaatggacgggagtgaattaaatcaaggtgcttctagtgttaattccacaatatctaatgtaagcgaagtggagaagctgtttgggaataagtatgaacaattccatcaaatcaacgaagtgcatcaaattcgcataaaggaaagttttggtgctaagattgattttatcgttaaactaatttcttatttgagactaaaaagcgagcaagaaagtgctgaaccgccacaagtcattttgtactcacaaaagacagaatacttgagagttattggtaaggttctaaaactttatcacgttgagtatttggcatgtctatccaatactgccagtgtcggtgaaactattaacgatttcaaacgtcagccttctattacttgcttacttttaaatgtaaagaccttaggtgcaggtttgaatttgacaaacgcaaagcatattttcctactagatcctattctcaataatagtgatgagttacaagcaatgggaaggaataatcgtataggccaagataaggaaacatttgtatggaattttatgataaaaaatacagttgaagaaaacattcttcggtataaatgtatactagaagagcgcaaaagaaaggagaagtcgagtaagaatgacggcgacgatgacagaggagctgatggtgatgaagaagataatgatgacgtaaaatttgagataagcgtaggcgaccaagaggtcagtagtgaacacttatggaattgcttcttccacagtagtcattag

SEQ ID NO: 3131 - DNA, 966 bp, Saccharomyces pastorianus
atggttgacgctaaaggtagtacaccatgtttgatcggagactctataaggaacatcaatgatcaaaacagtttagattttcaatataacaaccagttcaaagaggaagacgaatccttgaggttgctatcgccacaaacgagttccaatcatgccctgagcaaaatgcagaaggaccatgatatccgagatagatcttacacatctgtagcggaattgaaccgtgaaggtgctttattaaccgacgaagttgatctggataatgtcgatgcttcgaagattcgcagtagtagggacgatttagaagctgaggagaagagaaaaaaactgctgttattgaagagaaagcaaagaaataagtccatcgtctcagacagtttctcctccccttcattgcgtgcttccaagtcaacttcactaatcacatcgactgatccagttgaagaccacatcagtaaatattcattatcaggcacaccggttaatattacaagtaacgctggcgaagaggacgaggacataattagaaactcgtacggacaaatgatcaaaaacaactctaatagaccacatttagccaagggtgaatcgtatcaatccgcacaacatgaaacagaccatttagcgccggagaatcctgagaaaagacaagaaagaagcggtagatcttatgatagacaaacatcatcgactgaatttttaagatccttatccaggtcaataagtcgtgatcctatcaagaataaaaccgtttcacccgctaatgaagaagactctaggatgtacagcaccagcaactactctatatcgttagttgacttggaaaacaagcccaaaaccatcacggaaactctggaagaagagcaagaggatgccgaaagggaaggtgttttgttggaagacgagggcaacgaagagtaccccagggatttggaagaggcagctaacaaagttgaacaatcgtaa

SEQ ID NO: 3132 - DNA, 2526 bp, Saccharomyces pastorianus
atggagggtttaaagagaaagatatttggcgtctgcctgaaaaatgactacgcagaggccagaaacgagaccaaaggaatacactatagtctgataaatatggacgcttctgaagaattggaagagctactcagtttgcttttaaggaagggagaaataattcgaaattttgagttgttatttcacatcatcaactttgccgtcaagattacggattcaaatcttccaaatgataatatttggcgttccattttgaaattgagatattcttctgaaatcgaagtagaagaggattctaaagtactaaagtatttgatcaagacaggcatctcaatagagagtcctattagttggaaatgcttagctgtcgttagctgcatcctcgactgtgttcctcgctccaaaagggttataagcaagttgattgaaatggaatatgccaactcaatcggccagctatttgacaacatacaagatctgcaacaaggtaattttctggtagagatactttctaactgttttgtcaagagtgctccaaatggtaaaaacgtcgaaagaatacctcaattatggcctacgaggtctaagaacaaattattttttgagaacaaattttatccttttagaagtagaaatggaaattctcagacctgcctattcctttgtaataattttatgtcaagtttgtcttccacgggaattctcaagcaagtctcctacagtggatccgaagcattgaaaaaccttcgcgtattcaaaaaaagagaagaatgtggtaacagtttttatttcattcaatgcatttacaacaaactttatctttggttagatgaaaaagttcttcttgaattcgaaaggaaaagtattaaaataattaagaacttaaaaaataagattcagattaaattaaaacatcccttccatgaatgtacaaacaccaccgccgatgatatagcaattctatttaacaaggtgagaggctttcaactagagtttgaagacaataaatcaggcgaagcatttttccacaaggttaataatgtacccaaaataagtgaagtgcaaaaatttttggttttggattatattgaagaagagccagaggatgaagatgaagaagaagagaatcttggaagagctggtttacagagagaaggcgaagaggaagaatctctagacgaactatcgacttccatgtcatttccaataaagtcatccgttcctcataaccgaaacgaaaaggttcagctggccactcccgaccggtctatatctataagatcagatgaatgggatttaaagtcaaatacagaagacgaaggaaacgatgttgccattcctaatctcaaaatcaatacaagtaaagaaggaaaaaaggaagatgattttgttcaaattgattcagaggaacagtcaccaatagtatccgctcagataaggaaaatgagaagagaatccacaaagacattagagatcttgaggcaagattttgaggatagggaagtagaaaaccgcgatgattcaccagagcaactccactcgccatttgtgaacccctcctctttaattgtcggtaaatcaagcattgttgaacatagagagaagctcgattttgcacacaaagtaactgaaacaacgaagctaaaatcaaatggctccatcaagaaaagggatattaatgttttagatactatatttggactgcctccacctaagaggccaaagcaatctaacaaaaaggataacaaacaacagaaaacattaacaaatttcaagcccattattgatgttccttcccaagacaaacgaattcttagatcaaatgcgccaagtaagcctaaatctataaagaaaagcaagcttcgtgtttctaaaaaggcagtagacaaaaaatcgactgagcctgacaccgaaactggcaaacttgataagctgcctgcgagcacagaagacggtaagacggtaattgaaatagccaaaaagaaagatagcgccattaacgaggagcatgataaccctcaagaaaagggttcaccaggtataaatgaaagtaaagaaattactcaaaacgacagcaaaataactcctgaaccaagaatcaatgacacatttctcaaatcaagtgtaatagaaaatcgcaccccagaaagtaaagaatgtaacatcacaaacattttggaatctaccactgttgtcgacttattctcgcctcatgaatcatctgcttctggccagaattcgtttacaaataagctgcaagagcaaatttataagtcaattaatcacttttcgaacgaattagtaagaaaaatctccataataaatcaagagttgaatatcagaatcttgaaagagttgtctgaaaaataccaaaaattattctctgaattacaagatagtttccagaacgacaccaatgaaatgctcaaattcgtgggagaaatcaaaggcatgattaatctccccgaagaactgctaatacatgctattaggacaaggaaattcaatgataatggcaataaatag

SEQ ID NO: 3133 - DNA, 1062 bp, Saccharomyces pastorianus
atgatgagttctgagttcataaggcaacaactaaaccattcgaaatggttcgtgggaaatgtcaatgatgaggaaaatagtctagtaacgtttttacctattatatcttctgctacaattttgatggtcgtctttattcccctaaatgattttgtacctactgtattcgaactgacccaaactcaattggagaagcaatgccaaaaccaaggtttcacgggtaatgcatctttaaatcaaattaaacaaaaactaatgaacattgtacggtcacctaaaagtattaatcaattcgaaatagtagactcgcaattgagtttccatttcagtttatctgccatgattacggtttctataaagagtttaccatatcacgttaccagggatatctgctttgcaatcttgcagaatttaagcttggttttattacaactggcaagtgtttccacccaatatcaaaatatccagggagatattcttggtgaaaagcaaaaatgcatagattttcttttaaggtccgttaatgatttagatggaggaactaaaataattagccaatgggcacctgaaacctctaaaaaccacaagtttcttcagccagttacagatgatgatatagtggaaaaactactcactaaagggaacgtgcactctcaaaccccagcaaccaattcattgaaaagactgttaacttttcaagatatttgtgatataaatcaaagtacagaaccaaacgaatctactaaagcaccctttaaattctctccagtaaatgagctcgatgattatgacgatgatttcgaaccgcagtcaagagaggtagaccctttaaatagacatcgaccaaatagccactccactttaaaatctgaaggaaactacaaggagaatgccacaaaaaggagtgccactttgttgccttttacagaagatttttctaggcttgagtctacatctccagaaagaacaaggtcggagtcagctacgccttcagtttcctcttcagctgacacttaccctcgaaaaaaaagaaagtttggaaagatcaaaattaaaaactga

SEQ ID NO: 3134 - DNA, 1068 bp, Saccharomyces pastorianus
atggcgaccgaaagcaatgacatcgccgataacacaaggttattagaactactagattcgatagaagatcagtttctagtgacatataaaaaatcagaagatttgcataaaatttcctccactactaagttacaagattctactccaatcaaagaacttggtaaattagcttctgtattaaaagcacattgcacaaagatcgggattgtgtgtaagccaggtactttcgataacaatcacaaagtcgtcttcaccgaaattcaaagctttagcaggtcgttattttacttattgagtctatttcctttgttttacaacagtgaagattatccgaaatatttttcagaccagcttgatgagagcacattgcaattacttgatggtttgagaaacttcattacggagttacaaaaaagactaaaaaatgaagatgacgcttcgctagataaagaaagattaacgtctgttggtaaaattttcaatgcgtgcgatttcctttccaactgttccaaaatcgggccctgcggggtcttggcagatatccttaaaggcaacgtggatataatggatgatacactggatgaaataaaggaatggctagaggagccggatttttcagcgacctcgaacgatatgtttttagatttcgaagattctgaatctgaaacggaggtgaaagacgaggactttgaccaagaaaaggcgtatgaatgcataaagttatttttcgatgggttcacgaagaagataaagatgattaaattattggtgtcaatattcaggaaaactctagtatcaaaggacttcaagcccaagaaaaatcaagcaataactttagacaatttgcactcatcaataaaaaaagcacagctgcttctggatgaagtagtatctaccgtgcaatttgagccaaagaaatttagcgctcaagaggtgaaggaagaacaagctgagttaggaggtgtgattaaaaaaactcttgtccaaatgaacaggctctatgaaggtgatgccaaaaggaagaagtggattcaggtatgggagacaaaatttaacgaactaccatag

SEQ ID NO: 3135 - DNA, 834 bp, Saccharomyces pastorianus
atggcaccaaagtttgtagtttttgggggaaatgggttcttagggaagagaatttgtcaaaatgcggtgattgcaggctatcaagttgtttctgtgtctaggtccggcaaagctccccacagtactgaattaaatgagaaacaatggattcaggaagttcaatggactgcggctgatatttttaaaccagactcttaccattcgttactgaaagatgccgcaaacgtggttcatagtttggggattcttttggaaaacgagagctataagaaaactctttcgaaaagccccacaaataattcaaaatcgagtcttttctctcttggtgcaggaccaaatcctttacgaaaaagcagtccctactttacttatgaaatgatgaataagcaaagtgccattattttggcagatacttttaagcaggcaattataaaaagaggcaagaaggagcaggcgaaagtagacgaaagatcgtttacatatatttctgcagataaggggttcccgatcatacccagtggttatatcaattcaaagagggaggctgaaattgaaatagaaagactgcacgagtattttagacctatcattatgaggcctggtttcatgtttgatgagcatagaaacgcaattggaccgagatctttcattcacagcgctcttgagctcctttactgtggtaacagatttttgttacagaacaaactaaaatttatgaatgacctaataaggccaacggtatctactcaacaggtaagccattccatcttgacaaaagttgaagatctaaacttcacaggaatagtaacacttgaggaaatactcaaaacatga

SEQ ID NO: 3136 - DNA, 1146 bp, Saccharomyces pastorianus
atgtcctctcaagcattctcttcagcacatccaaatgcggcaacatctgatttgaatatcactattgacacctttgttgctaagttgaaaagaagacaagtacaaggttcatatgccattgccttagaaactttacagctgttgatgagatttatctcagcagctcgttggaaccatgtcaacgagcttattgaacaaatcagagatttgggcaataggttagagaaggctcatcccactgcttttagttgtggtaatgtcatcagaagaatactggctgttttaagagatgaagtggaggaagacaccatgaatacaacggtcacctctacatccgttgccgagcctttaatttcctccatgtttaatctactacagaaacccgagcaaccccatcaaaataggaaaaatagttccagtagttctaccatgaaaaccaaaactgactaccgtcaagtggccatccagggtatcaaagatcttatagatgaaatcaaaaacattgacgaaggtatccaacaaatcgctatcgacctgattcacgaccatgaaattttattaaccccaacgcctgattcaaaaaccgtgctaaagtttttaatcactgctcgcgaacgtagcaatagaacgtttacagtgctagtcacggaaggctttcctaacaatacaaaaaatgcgcatgagtttgccaaaaaattagcacaacataacatagaaaccctggtagttcccgattcagcagtttttgcgctaatgtctcgtgttggtaaggttatcattggtactaaagccgtctttgtcaacggtggtaccatctcatcaaattcaggtgtttcatctgtttgtgaatgtgctcgtgaattcagaactcctgtcttcgctgttgctggtctatataaactatctcccttatacccattcgatgtggagaagtttgtcgaattcggtgggtctcagcgtatattacctagaatggacccaagaaaaagattagatgctgttaatcaaattaccgattatgtcccacctgaaaacattgatatctacataacaaacgtcggtgggtttaatccaagtttcatatatcgtattgcatgggataattataagcaaattgatgtgcacttagataaaaagaaggtataa

SEQ ID NO: 3137 - DNA, 738 bp, Saccharomyces pastorianus
atgccagcattattcaaaagacttttatttcaagtaggccctcaacctggtgaaagaactttcactttatcttctgtttccaatgacggacactacatctccttgaggccttttgtcaagccaaagggtgacagtgaatcagcttttccatttgaatgggcctttgccggtattaatgaaaccgtcaaggtcaaaaacctgggtgacggtgttgttacccaagacttcaacttctggctggacactaatgtgtatttgaatgttccaaacactcatcgtggtgaaatcaacactacttggaaagattgggactccggctgtgttgaagaaaccggctctgtttatccattcggtgcggacaaagaaagcgtgtcattcagagaattgtggcaaccagttgacccatcgagggaagatttagtgattgtctctcctaacaatgagacattttcatcgaatgccaaatcaatcgttctcaaggtcaacgatgaaggctacgacggtttagttattattgttggtagatgggttcagggttttttgtccaaaaaaaaccaaagtaccattgacggtttgaattttatcagattacaagaaaatgattctggtaaatttgagtctttgttgagctatggtgaagaagccaagaaaatcccacaaagctacgaaaatctaaagaagggctccactatcacctctaacgggttaaactgggaggttattgagtatcacgtttga

SEQ ID NO: 3138 - DNA, 2337 bp, Saccharomyces pastorianus
atgttatctgcacgtgctgccatcaagagacccatcactcgtggtcttgcgacagtctcgaatttgacgagagggtcaaaagtcaaccaaaatttactggaagatcattctttcatcaactacaagcaaaatgtggaaacgctagacattgtaagaaaaagattaaatagaccatttacctatgcggaaaagatcttatacggtcatttggacgatcctcatggccaagaaattctgagaggtgtttcatatctaaagttaagaccggaccgtgttgcttgtcaagatgctactgctcaaatggccattttgcaatttatgtcagctggtttaccagaggttgctaagcccgtcactgttcattgtgatcatttaattcaagctcaagttggtggtgaaaaagatttaaagagggccgtagatttgaataaggaagtttacgactttttggcttctgctactgcgaaatacaatatgggtttctggaagccaggttctggtattattcatcaaattgtcttggaaaactacgctttcccaggtgctttgattattggtactgactcacacactcctaatgccggtggtttgggccaattggctattggtgtcggtggtgctgatgctgttgatgtcatggctggtcgtccatgggaattgaaggccccaaagatcttaggtgttaagttaacaggtaagatgaacggttggacttctccaaaggatatcattttgaaattggctggtattactaccgttaaaggtggtaccggtaagattgtcgaatatttcggtgatggtgttgacactttctctgctactggtatgggtactatttgtaatatgggtgccgaaattggtgctactacttctgttttcccattcaacaagtccatgatcgagtacttgaaggccaccaatcgtggtaagatcgctgactttgctacactataccaaaatgatctactatctgctgaccatggtgctgaatatgacgaagtcgttgaaattgacttgaacactttggagccatacattaacggtccatttactccagatttggctactccagtctctaagatgaaagacgttgctgttgctaacgattggccattggatgttagagttggtttgattggttcatgtactaactcttcctatgaagatatgtcccgttcagcatccatcgtcaaagacgccgctgctcatggtttgaaatctaagactattttcactgtgactccaggttcagagcaaattagagctaccatcgaacgtgatggtcaattggaaactttcaaggaatttggtggtattgtcttggcaaacgcctgtggtccatgtatcggccaatgggaccgtagagatatcaagaagggtgacaaaaatactatcgtttcctcttacaacagaaacttcacttctagaaacgatggtaacccacaaacccatgcctttgttgcgtctccagaattggtcactgcatttgccattgctggtgatttgagattcaatccgctaaccgacaaattaaaggacaaggacggtaatgaattcatgctaaagccaccacatggtgatggtttaccacaaaggggttatgatgccggtgtaaacacttaccaagctccaccccccgaccgtagtactgtcgaagtaaaagtttccccaacttcagatcgtttacagctgttgactccattcaagccttgggacggtaaagacgctaaagatatgccaatcttgattaaggccgagggtaagaccaccaccgatcatatctctatggctggtccatggttgaaatacagaggtcatttagaaaatatttctaacaactatatgatcggggctatcaatgctgaaaaccacaaggctaattgcgtcaaaaatgtatacactggtgaatacaaaggtgttccagaaactgctagagactacagggatcagggtattaaatgggttgttatcggtgacgaaaatcttggtgaaggttcttctcgtgaacatgctgcattggaaccaaggttcttgggtggctttgctatcatcacaaaatcctttgcccgtatccatgaaactaacttgaagaaacaaggtctattgccattaaacttcaagaacccagctgactatgacaagatcaaccctgatgacagagtcgatattttaggtttagctcacttggctccaggtaaatctttaatcttgagagtccatccaaagaatggaaaaccatgggactctgaattgacccacactttcaacgacgaacaaatcgaatggtttaagtatggttccgctttgaacaagattaaggctgataagaaaatttaa

SEQ ID NO: 3139 - DNA, 939 bp, Saccharomyces pastorianus
atgaagatagaaataaaacgtgtttctttgccaagtatcgttgtaatctcttgcgcaagtcgacttgttcgtggagaagcgaatctgggggatttgaaacagattgacttccaatttcctaaactagaaatagctgttacaaaaactccttttccagagtggctcactgcgtttaccgggttaaaggagtggccaggattggatcctccttatatacctttagattttattaattttgaagatattcctgattataaactatacgatcaaaacaattgccacgtcaatccaagagattcatgctctttcgattgccatcattgtgttgagcacgacgatatctacacatgctcaaaactctctcaaacatttgatgacggaccttctccttctaccaccaaactgttagaccatttgaagcataacactacatttttcaatctaggtataaatattgtacagaatcctgatatctaccatagaatgcaaagagaaggacatttgattggctcacatacttggtctcatgcatatttgccgagtatatcaaatgaaaaaataatagctcaaatagaatggtctatttgggcaatgaatgctactggcaatcatactcccaaatggttcagaccaccttatggtggtatagacaatagggtaagagcaatcacaaggcaatttggcttacaagctgttttatgggatcacgacacttttgattggagcctcctccttaacagtaccttaacgacagaagaggaaattctaaaaaatgtagcaacctggaaaaattcatctacaggattgatattagaacatgactcaacagaaaaaactgtagaccttgccatcaaaatcaatgaattgataggtaacaatcagtcatcagtttctcaatgcgtcggcggaattgattacatcaaagagtacctgccctag

SEQ ID NO: 3140 - DNA, 465 bp, Saccharomyces pastorianus
atggactccgaacaactgctgcaccactacgtctcggactcgctactgaccaccctagtcccattccacgagtttaagcagctcctgcgcccacatacgagcgatgagcagcagctgcgtcgctggtacgggctgctccaggccagagacgcacaggcggtcgccaccctgcaagcacggatcaagcagttcttcgtgggcttgcgctcaagactgctgcgggtcctggagactgaccagcaggcccactccgtcagcctcgagatgcttatcgatactctttacaagatcaacgacgtgttgctgcagcacctacaaggcctggacggcgccattcacgagaaagctctggcgctggcgcaattcgaaaaaatggtccggtcatcagcagctaaggacagcgccattccgggtttactacaaattatacagtcttatatcaatctactggaggccagacagtga

SEQ ID NO: 3141 - DNA, 2379 bp, Saccharomyces pastorianus
atggctgcggatgaatcggcttatggtgcctcgaaaattaaaagaactgcgtctagtagcagtagtatcgaaacaacagtaacaaagttgctaatgtcaactaagcatcttctccaaattctgactcaatggtccaaaggatcaacttccggtaaattggtatctgacgcatacgttcagctcggtaatgacttcaaagtcgtgtcgaaattcttcacgcacgctaaagttgatatgtcggatgtgggtgatgttccaatggctttgagacgtgttttggaggtaaccttgagggaaccaccatctgacgaaactttgaacaagcacctaccaaaaatcagagaaatcatagtcacgcttttggacaaactgaaagttaaacaagctattttaaagaatatgcaacaggagcatcggataagtataaaatcgcatcatcaacaaaatccttcatttactagcaatctttccttaggaagcgaaggtacccgcgaagggactccactaagtagtagaaaaagtagtattatacacgatcaaagacgaagcacttcaaaagtagatacgaatgaggtaaaggtaaatcactcttcgatagaggtgccatcagtctcaccagccaaggcaaatttggtccatccagtaattaagccgtcttcaaaatccaacgaatcaagcgtatcagacgacgatgatgcgctttctcaattaaagaaaggcactaatctgcaaagaagagcatcaaagagatattcagcatatcatatggctaaattgactaaccagtccactacagaggctgctgctgctgccggtcttacatcagtgccatccccttcaatgttgcatctcgaagaaactgtcagaaaatcgaaactttacggaaataccagtaatgatgataatattaatacctctgtggaaaataataataatggggctgatgatacatccgtggttaatcctgaaacatatttgaagagtccatcaatgaagagcccatcaatgaaggcagcattttctactgagaacgttaacgcctttcctcaaaggctatccagtgttgttacaacttcaccaggaaaaattgttaatggagcctgcccaattttcttaaaagtgggggacaaaataaagaagtgtcatattcaacttcccaccacaaaaaaagcactaaggctgctctttgttgagagatttacttattcccctggcgcaaatgccttccccgacatatacataatggacccccactatggaatattctatgaattggaggagcaaaaccttcatgaggttaaagcagggtttgttattgagctgaagcttgaagaagattctacgaataacatcaagaatctttttgacacaattaaggcagaaatatcaaaaagtcaaaatgatataataaggcgcataaaagaaataaatgttagttcaggaactgctaatgagcacaaaactacaccacaactaggtcttgacggtgaaaactcaaaaagtactagagcagacaaaaaggatgacaaatctgtcaaggatattcagtatgagctggggaaaataaaacaagtgcacaataacaatagatcacatatcgacgaaacgattatcaatatcttaaagaaagtcgacaaattcaaatctttatcattctccaccaagaattcttcaaacagaatatacatggaaaaatcgcaaactgaacttggcgatttatcagatactcttctaagtagagtagatgacttgcaagatgtgatcgaaatcatgaggaaagatgttgctgagcgtaggtcacagcctgctaaaaagaaactagaaactgtgtgtagagatctagataacgctcaaactgatttagcaaggctacaagagtttatcgatactgaaaaaccacattggaagaaaacttgggaagctgagctagacaaggtttgtgaagagcagcaatttcttacattgcaagaggaactgattcttgatttaaacgaggatttaggcaaagcgttggaaacttttgatcttatcaagttgtgttgtgaggagcaagaaaagaacccttcaagatcaaagaacaatcctatcttgccgattatgagacctggtaccttcagccaggttagagaacaagtcatggtggccgttcaatctttaaatcctgatcatgacggtagggttgaggctattgataaggctgaaaagatgtggcagatggaaagaaaactcaaggcaagtaacgaatttgatgaagaactggaaacctttgtaggtagttcaaacctaaaaaagtctggaggctttgaagaagtagaaaggataaggaaacaaaaggatgaggcaaatttaagagcaaattttaagcccgggtttagttga

SEQ ID NO: 3142 - DNA, 2178 bp, Saccharomyces pastorianus
atggctaaaagagttgccgatgcgcaaatacaacgggaaacgtatgattctaatgaatcagacgatgacatgaaccaatcaactaaagttgcatcgtcagatgtcatgaatagaagaaaaattgccatgcctaaacgcaggatggcatttaaaccgcttgctaccccagcatctgatgaatcaaaaattgcgagctccttcaatcctttgaaacaggcaaataacagtgaagcaaaagctgataatgatcacactactcaaaataattcgaaactaaaagcactaaatttgcaattcaaaaccaagatagacgagctagtttcaagcgagcctttggcagatttgagacctctcttaaccaaatatgaagagtatataaagagcattctaaaagcgtccgaagaatccacagaaagctcaaaaccgtctattcaagagaatggcggtaagcttgaagaagtggaagatgaccaagagagttctgattcttcatcggacgaagaagttaaagtggaagggcctaaatttacaatcaactccaaacccattacttcagattcggttttctcatttggcaccaagaaggaaaagcccaaaaaggaggaaagtgatagcgaaagtgatatagaaattaaaggccccgaattcaccttttctggagctgtttcaagcgaaatatttaagctaaatccaagcatagaaaagagtgataagagtgatgagaagagcgaagctgctcccaaaccattttcatttacttcaaccacgccaagctcaaccaccgaagaaaacgaggttaaaaaccctttttcatttacagcttctaccaagaaaaatgagagcgataatgtaaacatcaaaccttcgtttacttttggagcacaagatgttgtagatacccaaactaaaaagccaacttttatgtttggtcaaacggcggccaaaccatctcaacaaaatagttcctttacatttggtgttgcgaaaaatgaaagcacgaatgaagactttaactcaaagcccgtaaactctgacgatggcaatgagactaaatcatcttttacattttcaatgcccaataaaaatacatcagatgcaactaagccatccttttctttcggagcttcaacctcctctaatgcggcctcaaaaccggggctttcgtttggttcagtaacaatactaacaaaagaagccaatacgaacgatagtaacaataacgtcgaaaagcccatctcaaagcctgcctttggctttctatctaatactgatagtgagaaaaacgccgaaaaggaagaagggtccaaacctgttttttcatttgggaaaacaagtgaaaatgacaacgaaggctctgtcaaacctgtgatctcttctggattcggaagcgaaaataataacaaggaggcagcaaagccggcgttttcatttggaaaaagtactgcaaccgatttagacgccggtagtaagccccctgcgtttacatttggctctatagctggtgacaataaggaggtcaccaaaaccgatgccaagcaacctttctcattcggtactgcttcatcaaatggcgctccttcattttcatttggaaacacaacaaattcgcctcctaacccttcggcggctcctgctcctgctataccatcgaccggctttaaattttcattgccatttgagcaaaagggaggccagaccttctcagataataaaaatgaggaatcaacaacaaaaatgacaccagctgatccaaaaggtcccagtaatgtcgacacagcctcagaagaatcgaaaccactggatttgcagaatggtgaagaggatgagatagctttattttcacaacgagcaaaattgatgacgttcaattccgaaactaaatcctacgattctaagggtgtaggtgaaataaagcttctacagaggaaggatgacccctcaaaagttcgtctactttgtagatctgatggtatgggtaacatattactcaatgcaaccgttgtcgagtcattcaagtatgagcctttagctccagaaaatgaaaatcttatcaaaacaccaactgtagcagctgatggaaaactaacaacttacattatcaagtttaagcaaaaggcagaaggccattcattcacaaaatctatcgaagatgtcaagagagaaatgaaaaacgtataa

SEQ ID NO: 3143 - DNA, 2745 bp, Saccharomyces pastorianus
atgcagaagacagatggtattagaatcccgggcattattttggatgaattgaagactctcgattacagtcaggatgaaaggttttctgctgcagacgataaaaagagaaaaagaggaaatggtaaacatatgagtcgtaaagaaaagagaaagatacaacgtgctgaaaagaaacagaaaagcattccaactagggaaaggactcctacacttttaagaccaacgtctacgctcaaagagaggggtgcaaattcagttaagaaggatgtagttaaccaagtcagcagcagacgttccatttcttcagaagtgagcgaagatctagacgatcaagggtttcctggcgaggaattgagcgatgatgactacgatgaggcgttcggtgatgacgattttgatgaaaagctagaagtggatggtgagcaaacaatgtctgttgaagacacaatgaaagaattggaattattgaagcagaaaaaaactaatggaaaaggagctgaaaagtttggaaaacatgagggaaaatccaatgataaaaggcatattcaaagtgaaggtacaagtgaagattttataagttatccgttggcaccttcagatagagcagcttttgaaagagatgaaatggatatgcaatactatgcgaagaaacttggcttaaagggagagaagaggactatacgtgcgaaagatgaatttgatgctattggtggacttctggaaggcttggactatttcgaagattacggtaaagatgacgaagagtacggagattttgcggcagtatccaaatctgtgaaagatgatgaaggcgaacgtgagaaagcattctcctctgatgacgatctttcgacttctgattttgaaaattccgatgattttgatcaatctagcgacgacagcgttgcggaatcagacgataatgaaacaagagaaaaggaaaacccgtatgttgccccaacacagcctgaagggagttatattccaccctcgctgagaaaaaaattgattgatcatgacggtaacgctgctttgtctgaaattaggaaaagggttaattcatcgttgaacaagctttcagattccaacattgctattattattactgaattgaatggtttgtatgattcgttccctaggcagtatgtgacagaatcgttgaccaaaggaattttaattatcatcagccaaaaccaaaagttattggacggattcataatgaattacgctgctgttgcgtataccttatggaaactaagaggtattgaaatgggtgcattctttattcagaaaacagtagaaagctttttacaacactacaaagagggaatggaaaatgcgtctgaaaatcagcaggagaaattcgtttccaaaatatgtagcaatattgtgaccctgttatcgtattgttacaactttggttttgtatcatgccgcttggtttatgatattattcgtatatccgtagcagatcctaatgaattcgctactgaattgcttctaagggttatatccgtttcagggcaactaatccgtggtgatgatccctccgctttgcgagatatacgatctgaactgctaaacaatgccaagaatttagagcagcaaagtccaagactaaggtttttaatggatactatgactgacttgaaaaacaacagattgaaaccttcaattttggcggctgaccaccatcctttaaaaaagagtttgcaaagtgttttaagatcatcgtcttctcaagaacctttgcaagtttctctcgacgatatcaaacatattgatactaagggtaaatggtggctggttggtgcttcttggaaaggaaacatggaaaatgctttcgaggtttcaaatgatgataatgaaaatattggtaaatccaagaaagccaaagttctaatagaggacgatcttctcgatgatattcccgattggagtgtcattgccagacaacagcgtatgaacaccgatattcgtagggctatattcattagtattatgtcggcgcaagactatctagatgcatttggcaagcttgaaaagttaagcttaaaaaacaaacaagttcttgaaatcccgagagttattctacattgccttttggctgatagtgggtccaatggttataatcattattacgcactggtcgcaaataaaatttgtgaaagatatagtcatttatcaaaatcatttcaatttttattttgggatgtgataaagaagtttgaggagaagtcaggatccgattctgaaagtgaagcagacgaggaagatgatttggacgataacaagaaactagttagtatttcaaatcagggaagatttttcggatcattgctcgctaatgatattctaaaactggatgttttcaagcacgtttcattcatgggtgggttaaatacagagggaatgttatttatggagatattactgtttcagctattattagctgttgctaagaaaagtgaaacaaaattgaaaaaagatgaaaacggaaatagacgcacaacctattccaatgatcatttgcgtgatgttttaacaaaaaatgtcaaatcagagaatatgccttttattcttaaaggtttgaggtggttcattaacaagaagtttaagtatcataatttcctctcgggcaaaaggggtgataaggctttcgatagagatgaaagaagattggcttgggcttcaaagacagccaaatctattttagataaggagttggaacaggctgatttgtaa

SEQ ID NO: 3144 - DNA, 1668 bp, Saccharomyces pastorianus
atgaggcaggaacaaagattgtgtatagccattcaattgtttgtttgtttttttatacattttactttctgttcctcaagtcacaattatggaaatactccggagattaagatagttggaagcaagtttttcagctcactggatggagcacagttttttattaaaggcatcgcatatcaaccacagagaagtgaagaggagcttgcaaatgcaaatggcgcttttgagacaaaatatatcgacgccttggcagatccagagctatgcttgagggatataccatatcttaaaagattaggagtaaacacgttgcgtatttacgcaattgacccaacaaagtcgcacgaaaaatgtatggaagcactgtctgtcgaaggaatgtatgttctattagacctttcagaaccagatatttcaataaatagagaagaaccggcttgggatgttaacatctatgaaagatataaatctgtaattgacgcaatgtcttcttttccaaatctgcttggcttttttgcgggaaatgaggtgaccaacgatcatacaaatacgtttgcttcaccatttgtaaaggctgcaattagagatgccaaagagtacatatcgaggtccgactatagaaatattccggtcggctattctaccaatgatgatgctgtaaccagagaaaaccttgccaattactttgtttgcggagaggtcaaagctgatttctacggaataaatatgtatgaatggtgcgggtattctacatatgggactagtggatatagggaaaggacaaaagaatttgaaggttacccaatccctgtatttttctctgaattcggctgcaatatcataagaccgagaccatttactgaagtcagtgctctatatggtaacaaaatgtcctcagtttggtcgggaggtcttgcatatatgtattttgaagaagaaaatgaatacggcgttgtcaaaattaatgacaaaaatgaagtggatattcttcctgacttcaaaaatcttgagaaagagttcaaaaaagccgatccaaaaggcaccacagaggaacagtattcaattgctttgaaaaatcagcaggcacggaatgatactgaatgcccaagtatcaccgggagagtttgggaagcaaacgaaaaattacctgcaacaccggatagatctaagtgcgcctgtttggaaacggttttgccatgtgccgtggttccttttggttctgagtctgaaaaatacgagaactattttgactacttatgttcgaaagttgattgttctgatattcaggcaaatggtaaaacaggtatgtacggtatgttctctgattgttccgtagagcagaaaatgtctttacagctaagcaaactgtactacaaagtaggcgcgaaagatcaacgctgccccctcaatgatagaaacgtgtactttaatttagaaagcttggaacatctctcaaatgattcagtgtgcaatgatattctcaattctatagtgaacagtacgtgttccaatggcgattgttcaatctcaaaccaagcacgaaataaagaaaatttaaaggcgaagcatcccccaaagaatgatataaatggcagtaccgttgcatttaaaacctcagggtttataatacttttgatttctatggtgactgctggagttgttttctga

SEQ ID NO: 3145 - DNA, 654 bp, Saccharomyces pastorianus
atggatcgtcatctaaatgaaccgttgaccgtcgatgagccatcgctcaccccgaacgtgtcgtccaacctcaaaccattcccctctcagagcagtaaaatgtccactcccgtgaccgaccacaggagaagacgctcctccagtgtgatatcgcatgtggagccggagacgtttgaagacgaaaacgaccagcagatgctgcccaacatgaacgcgacgtgggtcgaccagcgcggggcctggttgattcatatcgtcgttattgtgctgttgagactcttttactccttgttccccgggtccacgcccaaatggacgtggacgttcaccaacatgacctacatcattgggttctacgtcatgttccacctcgtcaaaggtacaccctttgaattcaacggtggggcgtacgataacctgactatgtgggaacagatcaacaacgagaccttgtacacgcccaccaggaagtttttgttgatcgtgcccatcgtactgttcttgatcagcaaccagtactaccgtaacgacatcacgttgttcctctccaacttgctcgtcaccgtctttgtcggtgtcgtgcccaagctgggaatcactcacagactaagaatctccatcccaggtatcacgggacgtgcccaaattagttaa

SEQ ID NO: 3146 - DNA, 1977 bp, Saccharomyces pastorianus
atgctaaaattcagcacatacaactgtctgaaatcgtgtattaggtcgcgattactatactcaacgagcactcaagtagctaaaagggtaatcggtatcgatctgggtactacaaatagtgctgttgcatatatccgtgattcaaatgataaaaaatcagccactataatagagaacgatgaagggcaacgaactacaccatcgatagttgcctttgatactaagagctcaccacaaaatagagatcaaatgaagactcttgttgggatggcagccaaaagacaaaacgcaattaacgctgaaaacaccttctttgccacaaagaggcttattggccgtgcatatcatgacaaggaagttcaacgagatataagtgttatgccgtataagattgttaaatctgaatccaacggccaagcctacctgagtacgtccaatggccttgtccaatccccgagccaaataggatccatactactgaagtatttgaaacgagtttcagaagaatacttgggggaagaggtcaagatggcagttgttaccgtcccagcgtactttaatgattctcaaaggcaggctacaaaagacgctgggaaattggctgggctgaatgttttgagagttattaatgaaccgactgcagcagctttgagtttcgggattgatgataagagaaataatgggctgattgcggtctacgatttaggtggcgggacatttgacatatcgatcttggacattgaagatggtgtgtttgaagttcgtgctactaatggtgatacccatttgggcggagaagatttcgataatgttatcgttaactatatcatagatacttttgttaaagagaatcctgaaatcacacgtgaagaaattacaaagaatagggagaccatgcaaaggttgaaagatgtttccgagagggccaagattgatttatctcatgtgaaagaaaccgtcatagaacttccgtttgtatataagagcaaacatctaaaagtatcaatgacagaggaagagttagataatatgacttcgtcactaatcaataggaccatcccacccgtgaagcaagctttgaaagatgccgacatcgagccagaaaacatagacgaagtgatacttgttgggggaatgacgcgtatgcccaaaatcagatctgttgttaaagggttgttcggtaaatctccaaattccagcgttaatcctgacgagacggtggccctgggtgcagctatccaaggtggtgttttatcaggcgaaatcaaaaacgttttgctcttggatgtgacaccattaacattgggaattgaaacgtttggaggggctttttcgccgttgatacctagaaatacaacagttccagtgaaaaagaccgagatctttagtactggggttgatggacaaaccggggttgatattaaggtattccaaggtgaaagagggctggtgcgtaataataagctgattggtgatttgaaactcaccgggattacgcctttacccaagggtatgccccagatatatgttacatttgatattgatgccgatggtattatcaacgtttctgctgccgagaaaagtagtggtaaagaacaatctatcactgtgataccaaactctggactaagcgagcaggaaatttccgaattgattgaagaagccaacgccaataggactcaagacaatttaatcagacaaaggctagaactgatatccaaggctgacattatgataagcgatactgaaaatctattcaaaagatacgagcaactgatctccaacgaaaaagagtatcctaaggttgtagaggatatcaaatctgtaagacagtcaataagtaaattcaaagccaacgaaaacgacatgtcaatcgatgttaatgaaataaagaaagctacggatgcattacaagggaaagccttgaaattgtttcaaaacgccacgaaaaatcagcagaagcaagcgagcaagtaa

SEQ ID NO: 3147 - DNA, 729 bp, Saccharomyces pastorianus
atggaagtgttaaagaatatcagagtctaccccctgtcaaacttcattgcatcgtccaaaacctatataaatctaccaaatgaactgaaaaacctaaccactaatgagcaagaaaccaaactggggttcttgcacgtcattgaaaatgacttcaagccctcgagcatactgcagaagctggtcggcgataccgcggacggaggcaagatcctgatcatagacattgtatcgttgtggtcccaacaaaagcagaggcaaaatggcatgatctatatgaattcagtgtcttgtataaacatcaccggcttgatcacgtttctggaactgttgtatgacgcgcccatggacgcattgagaagatgccaagtggacgatttcaacttccagctccgggggataatgatcgataatttatcattcttgaatttcgaaaatgacaacaattacgatgtaataaatctatcgaaattcgaaaaactgttcaagattctaaggaaactcagagatttcttaggatgttggatcatcaccaaaagtttccccacggaattctacaacggcatcgagaatactcttattgataaatggtcgatcaagaagaaaggcggcgttgcgcaatacccgacaaaactgcctgaatcatacatgaagggcatggacctgatagtttataaagagcttgtcaacggcaaggcccggtacacacgaatatctgcagttaagacatga

SEQ ID NO: 3148 - DNA, 1047 bp, Saccharomyces pastorianus
atgccaactctaatcaacggaccaagaagagactctactgaagggtttgatacggatatcatcactcttcccaggttcatcatcgaataccaaaagcagttcaagaatgctacgggcgacttcactctggtgctgagtgcgttgcaatttgcgttcaaattcgtgtcccacaccatcagacgtgctgaactggtcaatttgattgggttagcaggtgcttccaacgctactggtgatcagcaaaagaagctggacgttctgggtgacgagatcttcatcaacgccatgagggctagcgggatcatcaaggttcttgtctctgaagagcaagaggacttgatcgtcttccccacaaacaccggctcgtacgcggtatgctgcgatcccattgacggttcgtccaacttggacgccggtgtgtctgtggggacaatcgcatcaatattcaagctgctaccggactcttcaggtaccataaacgacgtgttaagatgcggtaaggaaatggtcgccgcctgctatgccatgtacggttcctccacacatctggttctgaccatgggcgacggggtcaacgggtttactctggacacaaatctaggtgagttcatcttgacccatcccaatctaagaatcccgcctcaaaaaaccatttactccatcaacgaaggtaacacctttttctggaacaacatcatcaagtcattcgtcgaaaagttgaagcagcctcaaccagacaacaaggagcagccattttcggccaggtatgtcgggtccatggtggctgacgtgcataggaccttcctctacggtggtctttttgcgtatccatgcgacaagaagagtcctaatgggaaactaagattactttatgaggccttccccatggctttcctgatggagcaagcgggggggaaagccgtcaacgatcgcggtgaaagaatcctggacttggtgccaaagcatatacacgacaaatcttccatctggttgggttcctctggcgaaatcgataagttcctagaccacattggcaaaccacattag

SEQ ID NO: 3149 - DNA, 2217 bp, Saccharomyces pastorianus
atgagtctggtactagacgacatcgtccgctcgctgacaaattctaacgaaagaacacctctacagaccctcaagaccaccttacacctgctgtacgaaaaatcaaaacaatatggtctctcatcaccacaactacaagagctcgtacggttcatttgcgagacctctgtgatagacaccgtgacaaaagtgtacatcgtggaaaactgcttcctgccgaacgagtacctgaccaaggaccccatcttggaggtcattaaccatctcggtacgccaaccgtgttctctcggtatcgcatacaaacccccccggtcttacaatcagcactgtgcaaatggctggtgcacgtttacttcctgtttcctgcaccttcggaatggggccgtaacatatcgggctccatctggttgcatttatggcagttttcctttctgcaaaaatggataacttacctcattatttggcaaacctccacgccaaatgacgtcaagccctggaaagtgtccatcatcaggaaatgcgccatgaatcccggttaccgagacgctcccgccactgcgacgttgatcttgcaacgctaccagggcctcgtgggtgcctccaaccaactcatcgaattgattataaatattaattgtaataagaaaaccctgaaaaatcacaaaaatctgaaactaaatccacatttcctatccgctttacaacgaatattgtctagagctcatcccgccagttttcccgtggaggttgttcagaatacagtcgatatgtttttaaatgaaatccatcaactaggtaccgcctccacacgcccactccggcttcaatcattaccaggacattcatcctcaaatggtatggtctccctactggatatcacttcattggatcaactagcccaaaactggacgcaactgtatattcccaatgacgtggattctatgctggctccgtcctcaaatatcaattcttcactacagccaagagtcctatctagagaatcgctcaggcatttatacccctgtatcactctaatcaaaaatggtcgccagacatcatcatcatcgtcatcgtcatcaccacgtgagtggtgcatttggcaattaaaacgatgttttgcacatcaggcagaggctcctcgagatctgttatataccatcgtttcaatctcctcaatggacagcgaattgtcttatcagatcattcaaacattttgcaatttgaaatacctaaagcacgacgaatataccttgaagaacatatgcggcggtatcttgccattatggaaaccccaattaattagcggtacaagagaatttttcgttaaatttatagctggtgtcctcatgtggagtactcacgatggctacgataacaatcgaaccttccctgagatatgtttttatattttacaaatgattacaaattggcttctcgatgataagctaatgacgcttggactgacactactgcacgacatacaaagcttgctcactttagaccaaattttcaacaattccacctcaaatcgattttccaccatggcaataatcacttcattgaacgttttgactcagttatctacacagagcaattcagactacgcgattcaatatttgatattgggtccggacatcatgaacaaaatcttcacctctgatgaccctttacttttatcaaccgcatgccaatatttaatcgcaacaaaaaataaattaatgcagtacccaccaacaaacaaatatgttcaaacacaaaatcagtatatcatggatttaacaaattatctatatagaaataaagtgttctcatccaaaagtctatttggtatcccaatagactttttcaaaatgactctagaaaacgtttatgttccaaccgtggatttcaaaaatttgaaattttttacaataactggtatcccagcatatgcgtatacttgtgtcattattctcaagcaattagaatcaacccaaaataccagaataaaatttaccagcggtattataaatgaagagacgttcaaggatttcgttcgaataaaccacagcgagttcacccagcaaggttggattaagggtatatctaatatcaacgatttaagagtcgaaatattaaaacacacaagtacaacagccaacccgtatagcggaattgccgtattcttatttacctatttgaaaagtctctccaagtataatccacagaacccgtaa

SEQ ID NO: 3150 - DNA, 399 bp, Saccharomyces pastorianus
atggattgtcctttaaacatcgtactattgctactgcaaatcattttacagcgccagcaagcgctcagtcatcgggataagtcactcaacttggaagagttgttaaaggagcctatcattgacaatgaaatccttacagaattcaagacacacaagctggtccaattgtacggcccccagtactaccgcgacatatccctaagaggtctcaagacaatggtaacggatatcttcgcaaacggaatccaggaaacagcacaaccatcagatacagacgagccaataactgtggtctcgctagccaaccactactatgcgcaaaggattgatgaactacagggaagagaactgcctcaactaaaagagcagttgctcaataagctggagcacatgacctag

SEQ ID NO: 3151 - DNA, 2820 bp, Saccharomyces pastorianus
atgccggtcgacttgaagaaaagaaaagttgaagaacttgttaggagtgtggggaaaagctctaaggtcttttctccattcagaatcatcggtaatgttagtaacggtattccatttgctactggtacgttaggttctaccttttacattgtaacaagtgtagggaaggcattccaaatatacgatgcaaatagtttgcatttgctatttgtttcagagaaagagacctcatcctcaattgtagcactaagtacacatttccactatgtctacgcagcatatgaaaacaaggttggtatttacaaaagaggtatcgaggaatatttgattgagctagacaccagtgcgcatgtacagcagctgtgtgtttttggcgattacctttgtgtttccactgacgataattccatttttatttacaagaaatctgatccgcaagataaatatccgtcgaaattttacaccaaacttacaatcacaaatattcagggcggtgagattgtttctttgcaacatttggcgacgtatttgaacaaattggttgtggttaccaaatccaatattttgctttttaacatcagaactgggaaacttgtttacacatccaacgaatttcctgaccaaatcactacttctgaaccagcaccagttttagatattattgcattgggaacagtgactggggaagtcatcatgtttaacatgagaaaaggtaagaaggttcgtacaatcaaaattccgcagtcaagaatttcatcattaagttttagaactgacggatcttctcacctaagtgtaggaacgagtaatggtgatctgattttctatgatttggaccgtcgttcaagaatccatgttttgaaaaacgtccatagagaatcatacggtggtgtcactaaggccacctttttaaatgggcaaccaatcatcgtcacttcaggtggtgacaattccttaaaggaatacgtttttgatccatcactttctcaaggaaatggtgacgtagttgttcaaccaccaagacatctgcgttccagaggtggtcattctcaaccaccttcgtgtattgcatttgctgattcccagtcacatttcatgctatccgcctctaaagataaatcactttggggattttctctgcgtaaggatgcgcaatcgcaagaaatgtcacaaaggttacacaagaaacaagacggtggcagaatcggtggtagtacaattaaatccaaatttcctgaaattatagcgcttgctattgaaaatgccagaatgggcgaatgggaaaacgttattactgcgcataaagacgaaaaatttgcaagaacttgggatatgcgaaataaaagagtcggtagatggactttcaacactactgatgacggatttgttaaatctgtagctatctctcaatgtggcaactttgggtttgttggttcttctaatggtgccattaccatttataatatgcaaagtggtatacttcgtaaaaaatataaattgcataaaagagcagttacggggatatccttagacggtatgaaccgtaagatggtatcgtgcgggctagacggtattgttgggttttatgacttcaacaaatcaactttgttaggcaagttacaactggatgctcctatcacctcaatggtttaccatcgttcttccgatctgtttgcgttagccttagacgatttatcgattgtggttattgatgctgtgactcaaagggttgttcgtcaactatggggtcacagtaacagaatcaccgcattcgacttttcccctgaaggtcgctggattgtgtccgcttctttagattccaccatcagaacatgggaccttccaaccggaggatgtatcgatggtatcatagtagacaatgttgccactaatataaagttttctcctaatggtgatttacttgccacgacacatgttacaggcaacggtatatgtatctggaccaacagagcgcagttcaaggctgtctcaacaagaactatcgacgaggctgaattcgcgaggatggcactacccaatgcgtccgtgaaagggaacgattccatgttgtctggagctttgggaggcgatgatgcggatgagcaaaatgacattgatttcaatacctatacctcactagcacaagttgataaggatttgttgacattatctataggaccaagaagtaagatgaacacattgcttcatttagatgtcatcagacaacgttccaagccaaaagaagctccaaagaagtcggaaaagcttccatttttcttacagttatctggtgaaaaagttggtgatgatgcgtctgccagagaaggtatagcacatgaaacacctgaagaaattcatcgtagagatgaagagacacaaaagaaaattgatgcagaagaacaaataagcaaattcaaagccacaggaagattaggatttgagtcccatttcacgaagcaattaagagaaggttcggaatcaaaggactattcatcattattagccacactaatagacctctcacccgctgcagtggatttggagattagatcattaaactcttttgatccctttgacgaaattgtatggtttattgatgctttgacacaaggcttgaagagcaacatgaattttgaactttatgaaacctttatgagtttgttgttcaaggcacatggtgacgttattcatgctaataacaagaacaaagatattgctggtgctcttaaaaactgggagaatgtgcataaagaagaagacagattggacgatcttgtcaagttctgtatgggggtagtgagttttgtgacaaccacgtaa

SEQ ID NO: 3152 - DNA, 1191 bp, Saccharomyces pastorianus
atggaaaactcactagagagactgagagagcacttgaaaaatggctataaaattattttgaaggatagtgaaggacaggatactgatgatatcgcgaaagctatagaggtgcaaactgaatctagtaatggcagctctaaaggcactttcctgctgaatgaagaaacagaaatcgagattgatggctcaccagtacagttgcgagtaatcattcattgttggatgaacaaagactctagtgccgctaactatttagctgactgtaaaaataagcaattgacaaatgtgtcctttctgcaaagaacggatttaattaactggttgtctggcaaaactgaatcatcccaatatttgaaagcaatcggtcataatggtcaaacatccgataaagcaaacacatccaacgatgaaagtgcacctttaacggatggatcacctgacgcaaaactagccacttcaggatctgctggaaatggtcttgtaccatcagatccggtgctagcagaaacgatgaaaaatgaacgtgtagtgcaggaccataactctgcattacgcggtgctagaccaattaattttggctatctaataaaggatgctgaactaaagttagtgcagtccattaagggatctttgcgtggctctaaactgcctcccggccataaaggtgctcacggtcgtgtctccaagacaaatggttcgtccagcggccctcgcaaggatcctatcattttaattccttcagctgcatcgtcaatgttgactattgcaaatataaaacagtttctacatgattcaaaatatatgaatcctcgcgatttaccgtcaacgccaaatgggttagtcaatatagaaaaaaattttgaacgtatatctagaccgattaggttcattatagttgataatacaaggatgttcaccaagccggaatattgggatagagttgttgccgttttcaccacaggccacacatggcaattcaacaattatcaatggaatacgccacaagaattattccaacattgcaaaggttactatttccattttgctggtgactctgtgccacaacacgttcagcagtggaatgtagaaaaagtcgaacttgacaagaataaaagattcaaagacgtggaagtggtccgttatttctggcatagtttggaaaaggagcttatttcgagggggtatcattga

SEQ ID NO: 3153 - DNA, 1095 bp, Saccharomyces pastorianus
atggtgcaagaaatagatttgggcgtaacatgcgatatgcacgtgcacgtaagagaaggtgcgatgtgtgaattagtcactcccaaaattagagatggcggtgtttcagtagcttacatcatgccaaatttacagcctcccatcacaacattggacagagtagtcgaatacaaaaagactctgcaaaaattggctcctaagacaacatttctcatgagtctttacctttctaaagaattgactccagacctaattcatgaagcagcccaaaaaggtgcaatttatggagtcaaatgttatccagcgggcgtaacaacaaattcttctgctggggtggatccaaatgattttagtgtcttttacccaattttcaaggccatggaagaagaaaatctggtcttgaacttacatggtgagaaaccttcagtactggaaggagacgaagaagccattcatgtattaaacgcagaagaagcttttttgccggctttgagaaagctgcataccgacttcccaaacctgaaagtgattttggagcattgcaccagtgaggctgccataaacaccattgaggatataaataaagacgtggtgaatgcttcagatgtaaaagtcgcagctacgttgaccgctcatcacttgttcttgacaattgatgattgggctgggaatccagtaaatttttgcaaaccggttgcgaaacttccaaatgataagaaagctttagtcaaggctgctgtatcagggaaaccatatttcttttttggttccgactcagctcctcatcccgtacagaataaggccaggtatatgggcgtttgcgcgggggtttactcacagtcctttgcgattccatatatcgctcaaatcttcgaagagcaagaggctctagataacttgaaaggatttgtttcagatttcggaatttccttttatggcatcgaagatagtaaattagcctctgccgacaaagtggtgctattcaaaagcgaacagacagttcctcagtctataagtgacgggaaggaagtaagcgttatcccattcaaagcgggtgataaactaagctggtctgtgagatgggagtcttgttga

SEQ ID NO: 3154 - DNA, 468 bp, Saccharomyces pastorianus
atgagttcgactgtcattaaattcagagctggtgtcagtgaatataacgaagaaactcgtctatgtacaccaattccggttcagggtgagatcgagattaaaccaaatgaagaagaagaactggggttctgggactttgaatggcgtcccactgaaaagccgataggaagggaactggatgctatttctttgattttgattcctggagagacaatgtggattccaataaaatctagtaagagtggtagagtgtttgctttggtcttctcttctaatgaaagatacttcttctggctgcaagaaaagagtccaggaaacctgcctttaaatgaattgagcgctaaagacaaagaaatttacgataagatgatcactgtgctcaataatggaggtgaaagtgataatgaagaagaaattcatgacgaaaagcagaaagcacaagatgcagatgttgatatgcaagactag

SEQ ID NO: 3155 - DNA, 1653 bp, Saccharomyces pastorianus
atgtcaaaagactttaattcttcacgtattaaaatcatcaaatccaatgattcttacgcaaaggtcaatgaaaagaaagacctaacaaaatacgctctggaaaatggtaagatcatttctacaagagagcggcccatagcctctgtccctgctataagggggaggataccaagtgatgaggaagtattcgactccaaaactggattacccaatcatacctttttaagagaacatttcttccatgaaggtcgactttccaaagagcaagccataaagattttaaatatgtcaactgaagcattagggaaagaacccaatttactgaagctgaaagccccaattacaatttgtggtgatatccatggccaatactacgatttattgaaactctttgaagtaggtggtgatcctgccgaaatcgattatttattcttaggggactacgtcgacagaggcgcattttccttcgaatgtttgatttatttgtattccttaaaactgaataacttgggaagattttggatgcttagaggtaaccatgaatgtaggcatttgacctcgtattttactttcaaaaatgagatgctacacaaatacgacatggacgtttacgatgcgtgctgcagatcatttaatgccttgccgttagcagcgttaatgaatggccaatatttttgtgtacatggtggtatctctccagagttgaaatcggtagaggatgtcaatagagttaatagattcagagaaattccatctcgcggtctcatgtgtgacttactgtgggccgatcctattgaagagtatgatgacgcaagggatggcagtgaatttgatccgagggaagatgagtttgtacctaatagtttgagaggctgttcctttgctttcaccttcaaggcatcctgcaagtttttgaaagcaaacggtctattatctattatcagggcacacgaagcacaagatgcaggatataggatgtataaaaacaacaaggtgaccggcttccctagcttgataaccatgtttagtgctccgaactatttggacaactatcacaacaaagccgctgtattgaagtatgaagaaaacgtcatgaacattagacaatttcacatgtctccgcacccttactggttaccagattttatggatgttttcacctggtcactaccatttgtcggcgagaaagttactagcatgctagtatcaatattaaacatatgtagtgatgaagaactagacccagaatcagagccacaggctgcggaaactaatgaaaagataatcacagacaccactaaggatgcttgcactgatgatagcaaaaagacatcatctgcgatattagaagacgagactagaagaaaagctttgagaaacaagatcttggccatcgctaaagtttcaaggatgttttcagttctaagggaagagagtgataaagttgagtatttgaagacgatgaatgctggtgttctaccccgcggtgctttagctcgtgggtctgaaggacttgatgaaacactaagtacctttcaaaaagctagaaaggaagatcttatcaatgaaaaactaccaccttctttatcagaagttgaacgcgaaaagattaaacactatgaagaaatattaaagagagcagatgataaataa

SEQ ID NO: 3156 - DNA, 3090 bp, Saccharomyces pastorianus
atggctgaaactctaaaggacttggagggatggcaagttatcattaaagatgataaggggaggatcatcgaggaaaacaatagaagaagatcaagaaagagaggtgtagaaaatgtgtatttacaaagaatttccgatggcctgagctttgggaaaggagagagtgtgatattcaacgatagtatcaccgagacgtattctgtctacttgatccatgagattagacttaacacattaaataatctcgtggagatttgggtcttctcatacctaagatggttcgaactgaaaccgaaattgtattatgaacaatttagaccagatttgattaaggaaaaccaaacgatggagttttacaacgataaatttcttaaagaagtgaataagagcgaattatatttgacggctgaactatcagaagtttggcttaaggatttcattggagttggacagatacttccagtttctaaatgggatgataatacgaccagaaaagtagaggataaagatttcttagtgcgctatgcgtgcgaacctacagcggaaaggtttgttccaattgatattttccagattatcaggagagtcaaagaaatggagcctaaacaatctgacgaatatctaaaaagaatatctgtcccagcagcggttaataagataagcaaacaggtactgcataagacagcacctgaaaactcggcacctgaaaactcagcacctgaaaactcagcaaagagacaacaaagactaacaaaaaaatctccaatgaaggaaattaaagtagagatccccccaaattatagcttaggaaaagtcagtttgccattcaatcgaaaaatctcaacaccaaatggcacacttcctttgaaaaataactccattcatttcaagtcttcttcgggatctcctgcaaccccacggccacgtgaagatgctgcgagaattgtacaaaggagacctatttcaaaagaattagtattctcggaggaaataccaatatattcatcagagcaagagtctgaaaacgaatacccacaagacctaaatagtgagattcagcaagcacaggctccagcttcagttaaaccgagatcaacggcaagaaatagagttgaagaagatgatgatgaccgccatgaggattttgtagacgcagataattcaatgaaagtggatggagacagcgaaattgaagaggaaatcgatgaatctacttctgaaagttcaggtgaggcgatatccttaataaaaaaaagacgtggggcttatgatggcaacatgaacagaaagtctcggaaaattcacagagcagaaactcaagaactttcccaaaatgatgagattgaaagttccagaagccgactaactggagaagatgaatctctcaagacccgagatattctcaaacaaaatgtcacaatagtatcttctaaggcaggaaaaaagacgaatgtggatgagaaaactaacgcaactgagggtagtactaaaggcaagggtattcaaccgttacatacgaaagatagagcaaaggtgattgattttgctgctttggcagagttgaagaaaaagtatcagacaattctggaccggtttactccttccaaccaaatcatggatctttctcagttgaaaaaagttagagaaacacaatcaatcctggacgttgcagaacttgaaaataagttcagaagaacaaatcatacaccccaaaaagatactattttgtctaaactcgatcgtaagagtgatttgaaggagttgatcagagattcattacaaaagagggaaccactaaattcacaaattgaggattttattaaagtattccttccaatatatgaaagtttaacgtcttcccaaaacaagctattttatatagttgatgaagacgagtccacgaaatctgtacttgtcaaagaggtgatggaggagttggtcacctcttcgaagcaaaacgaactgcccattttcgattacatttacatcgatgcgctggaatacaatgacaataaaagatttttcgagaaaatatggactgctatatccaaagatgcgctttctggtgacatatcactagaagctctgaatttctatttcacaagcgttccaaaggcaaaaaagagaaagactttgatattaatacaaaatttcgacaacatatcaagtaaggagacttcggaatacttcgagaagtggatttcttcagagaactctaaactatccatcattggcgttggtaggggtaatgaggcgatgaagaggcaaatgaacgagacacccgcatttgaatcatattttactacaattacactcaacaagataacaaaagacgatttgcaacgaatgatcgtaaagcatctccagtccttattgaagccattttatataagagtgaatggcaaaaaggaaatcgctctttataatgatatttccgaaggggagaaacaaaagttacctaaaaacgtatcagcgatagatcatatcatcaacaccaaaatcatagaacttattgcgaaaaatatagcgaatatgagtgataccactgggaaagctttcaagatatgtgacatggctgtggaaatctctaaaaaggactttgtcgcaagaggtggtttacaaaagggcaaacctgtattatttcaggagatattaccacgttatttttcagaggctattagcatgttcaaagatgacatagtatcaaagagaattacggggatgtccctattggcgaggatattactgtatacactggcatgtgaaacggagggcaccagtagccatacacttgggctggatttcctcttgaccaagatgacacagatgttacaggataactcaggttacaaagcctccagagatattaaagaggtgatttgcggtgtctgggagccccagataaccatagagaaactcaagcaattctcctggataagcgtaatcaacgaactaataaaagaaaagctagttgcgttgctaccgaaagagtcacatgcaaatattatggtggagttaaagctccctcatctagaaataaattacgcattttggatggacgaggcgttcaagaatatggaccatgtgtga

SEQ ID NO: 3157 - DNA, 1341 bp, Saccharomyces pastorianus
atgtcaagaatacgagatataatagctagaccgtttcaaaacctcactgctcttgaaaaagtggtacaatggttacgactgggtacaacgttgcttataatatcgttcgggttggcactaacagttgggcccctttcttcgcctaggacaatatacatgtcgcgactggatacttattctgctgatatcacaacgggcttatttaccgtgttgaaagagtccatggaaaaatcaacatctacagaggcaaataatggcgtgggcctaacgacatccgaactatacatcctaactgcgtacacagagagccagatcaagaatgtccctcaatatatcacagtttcactttatgggagatgtgattcttcgtattctatggtggaagcgtttgattcacaaggaaatatgtatagtgaaaagaattcatctaccaagagcacttgcattaaagcaggaacaaactatctttttgactatcgtgaagttttacaaaacttgggtctagatattgttttagattacgcctataataaagtgagctcgcaacaggctgaaacttctgcgtatacgagctatatgaagggattaaaaaacaagaaggccaatgtgctacatttactttatgctgtcattagtttccaagtgtgtatgctattttttatgatatggtactactatatcaagggaaggtttttgaacgcgctgaaagaaagggcactggttcatcttaattccttgctttcactggtcgttttcattggtggattgacaagtacaataagtcttgcctggataaactataccatccaatctagaatcaactccgaattagaggcctttgggttttcctaccatctgggagtcacatggtttgctctcctgtggtgcttcgcaggtttaatttccgtatcatgcttagcatggtctggcttagaatggtgtatttccgataatggcatggcctatggaggtggaatagatgacaaatttttgggctaccaagccggagtattcaccaatgcggatacagacgaagacttagcttacggtcaacgtaacccacaacgacagtctacttcaggtgaagctgaactgatgagaaatagcgataccatgccaacgataagcaagacagccaacagtggtgtaaacaggtcggacgaccttaactgcaattcagataatcaagaaggcacagcggatataggcgataatgatgggaagagtccatttgctagtagagaggaattcgaattgcaggacataagattccgttccagtagcgatagtgaagagagtgtgcaaaggattatcaagccttcatctgcattacagttttaa

SEQ ID NO: 3158 - DNA, 1299 bp, Saccharomyces pastorianus
atgacaattgaagggtctatagttcgagaactaacgacgttgcttgtaccctctaatcccattgcgcatgttgtggacctatttcaagaggaattgttatcacgactacaaacgagtgaaacttcaatgctgccacaatgcctggtcccggatgagcgatcacgatgggatcccaaggacaggatcttggcgattgattttgggggaacaaggttgaaatttgcaataatctcgctgccccaaattgttattgaattcaacgatgcctttgaacttacctataacgtcgtagattcgatgttctttaatgaaattatctataaaatatgtaccaaattggctgaaaatggttatataaaaagcaaaaatgaaacttctgaggcgactaaattttttgtttccgtgacattcagtttccctttaaattcaaaaggccaagtagtcgctatggggaagggttttgtaatgactcatgacctccaagcgttaaccgtgaaagaagtgattcagttgtcctttcaacaaataatatcagagaatattgatgagtttttttgtgtaataaaagtgtgtgatgtaataaacgactcgattgcagtttcattaacgagcaaatttatatgtgagcatgattcaatctcactaatagtagggacaggtacaaacgcatctttcgaagtaccctacgggtacttaccgccttgtaagagagactctttaagagaaacgctgccaccaaactacatcaaagaaactttgaattttaaacatgttctggtgaactcagagattggtttcatcggtaaagatgtcattgcattgcaatcgttcgacattcacggggcgatctcgtatgaaatgcctttagaatgtatcacttctggcaagtggcttccattatcgttgaagatcattctattacagtataatttaataccgaaaaattttccgagaatgtttgatggtgaattggtgtgtcagttaacagaaaactctaccaacaattggttcaataaccagcattatcctttgatttgtcaaatcgcgcgccttttggtcaaaagggctgcattttacattgctgctattatacaggctattgatatcatcacaggctgcagaaactataacttcattcacgtaggctatgtcggatcgttccttcagcattcgaggttttatcaagagcaaataaagtattattccgacattaatgttgagctccaatttttaaatcatagtaatctactaggagctgccattgccacctacttgaacaagtcagataagcaagtttga

SEQ ID NO: 3159 - DNA, 1188 bp, Saccharomyces pastorianus
atggaacatctcgagtccgattttgcacctataagaaagtcgcaaaaggttgtagacagcgacaaaatcgtcagggcaataaacgacgacctggagcaaaaaaatttcacgattttgcaaaaattaagtctggtaccaattaaagagagcttgaaaggcacaaaggtttccaagccaaggtcagttaagaggcaggtggatcttactgtctaccgggactttaaatcgaaggctttggatgaattgagcgccaattattcctcagtcggttatattccaggtttggatagtttcctgacgaatgatcttggagaaatgagagatcacgttgttttttttaatcagattaaaaatatacatcaatatgccggcattgatcgtgaagtttctggaatactgtcatcaatcggttcgaacgtcgtgattgttgagatgaacgactatttaaccaaaggaatctttccgttagataaattgaaagtctacatcaggacgaacggaaagcgtcaattgaaagctcatttcgacttcaaaatcaatggtaacaccctcgatgacacttttgaccttatgatgatactactgagaaaaataggccaaaatctggacataggccacattgtttacttcagatttgaacaattagatgaatcatctccttcaaatacgataattccttcgaagcttatggaattcataaaaatattatcatcacttcaaaaaattgagaatattgcgttcaagtttctattttattcgaataacagcagcgtttcatctctcttgtctactgctctcaaaaaaaaccttagtacaaaacctatcatatttcaatgtcccgttttaactcctacccaagtacaagaacatttgaaaaaaatgattaagttcacttcttatccaaaaaacgagttacagcagtcgtacaatttattcatcataggccaattaaatactaaaaattccaatttggcaaagttccttgagtttttaaaaaatttcccgcatccttttacttatttatttggtgttttcaccgaaatcctggtacaaagtaaaacttttgatgaactactagacatgatcactaatagactgacaacaagaaattacccacatcgttcttataactttaagaaaaaccagcgccttccacttaaggtgactcgagacgtgcatcaaacataa

SEQ ID NO: 3160 - DNA, 7884 bp, Saccharomyces pastorianus
atgtctgaaattaaaactctactctgcaaatgggttattattgcagtaactctcttatggagctgtaaaatttttgtaaggatattttttggcgtgaatgtaacatgggttaatttgtttaagctagaaatttgtggtttatccctggaaaacggttcagtatcgataagatccatccggttcgtcgtttatgaaaagaaacttattatcaaaggtttacggatcgactccagcgacaacgcacgtaatggtaagtcaaatacagaatctccaagtgaggatgagagatcaactccaagatcttcaaaagctatcagtggctttttcacttctaagtttctttcattttcgcagcactggctcagtgggatctccgtcatacttgatgacacaagactagttaatcttgatatcggtattgaaaagcttggctttgttttttcaattgacggttccaaaaaaagtggctcactgcgattcgattcctatttaagaaagctttgttggaatgatcaaatcattattgctgataccattttcattgtgaataccaatttatcaatcgacgaaataatgtatccattaaaagatgattttcaaattagcttagacttgaaattaggtgacctaaacgtccccatgagcttactaaatctattcatcaataaagaaaacgttgatttaatgtccaatgaagaacttttacaaaaattaaaagatacaacaagtgctgaccaagatataaaagacgaagatattatcagagctagaaacgacctaatgcatacaatgggcaaattcgtggaccaaataaagcctttgaaagagtttaacgttactatcgacaaacttcaaatcaaggatttccctttaaccattcatccagacttaatcggaatgaccaaatatattagttatgacattttcatttccaacataaattttaatgcaattagatttaaaaatgagatgcccgggtatacgttaatttttgaagaacgtgacactccattcaaatttagcatcgtcatggcaaggttcaatatctgtttgaatataaatcgaaagcaccaaaagctgacaaaattgctaaagattgttgaaatcccaaacgtttcaatttttggtgaaacgaatttattctctcaaaattttagttattctgatgatttgaaaccaaagcacctggagaatgctacctttaacatcaaggggaacatttcttctttaacaattgacatggatccggttaatatttcatttatcaaatgtttcctgtctaatattaaagttttcacatcctcttgtcccaagaataaaattctgaaggagaactcccacattaagttcttaagaaggcgaagaattctgttcgattatttcaagtgttttttgcccttaattaatatgaaattcacccttgacgatcccaaatttgtcatcaaaaacaaagataatttgataataagtaagttttccgtcttcatgataagtcatcgctctcagaggtatatattaggaaatggtttgagcgaggaaaaagaaaaaacgcaacaaattttctatgagagtctttggactattgaacttctagacatgaaactgcaacatattattaagcaccaaaattatgaacatacaatactgagagtagatagcattgctatagagcaaaacgttcgacttctacctgaaattctgtatgctgcagatggtgacattgacacattaatgctagacttatctgaattaccaacgatggttatgttgagcgatttggtacataatttagacggccaattagcaaatgttgaagaaaattattttaaggagttttatgaaaagtttgcatccaatcttcaaaacattaaaactgaatgctctaatatggccaaatgtctaagacaaaaggacattctgcccagcgatttcatgttcgaacaattacctagtttttttgattatatcaaaattaacattagggacatatcctctaccttaggtgcaagatcggttttcatgccaagagatgttttttcttctatcgatccccaaagttcaaaggatctaattaatggcaagctaagaaaatattgcaatacaatcgaaaagttgcaaatcgccttttttggcgataagacacagtggcataacaaaattggttctaaccatgctaccatggttaggtcgggccagcttacgaacttcgacaatgcaagtaaagaaaagcccaagcacaaatcaagtattgctgatttagatgacatatcaaccagcgatgcaacggaagtacatcatctttggaaccttaacttgttggtaaatgatataactactgaaataattggggaaacgcctgaatcgagcgaagagttgtctaccaaaaccgtttccaaagtttctaacttatcaattaaactattcccagatacagactcttttagtggggaagaaaacagttcaaagatcgttttacaaatcaatcacacaagaggaatgtcggtagtatcactaatgagcatttttttggctgtttcaggaatacacacattaaatcaaatatttggacactgtgtatgccaaaagacacatcaatctaaaaccaaacaatatttcattgcactatccgagtcgaaaaaaaaatcgtgtctaaaaagtgtaaagtggggccaactaaaagaaatgatagaagtagatttttcttccgaatttatgagtcaaatagttgcactgcctaacggtcttagaacgaagtttgaaccaacttccacatttatcactatgaaaaacctcaacgaaatttccatttcaggtcaatattttagaatgctggtggaatccccaacgaatccaaatttctgggaacgcatgattagcatcgatagatttaaagtgcagatacatattgacttactaagagaacaaatgaaaaaattagactctctgcaagactgggaaactttacagtccgctataactctagagaacgaatcatcgcacttttctataccgcatcaatttgaaatgttcaaaattatcgatagtgtgcctagcgttttcaaaagtattaagcagatgctatattctttgaagacatctaagagtgatttgattattttcccgcacaaaattgaaacccctctttcactgcctaagatcaagctaaaatctaaaaggtggttatttagcattggcgatgatccgctagaggctgaattgaacactatctttcagattggtttgcaagaacaaagagaaagacttacgaagttacaggaattcaacaagcgtatttcggagaatttgattaaaagtcaaaagaatgtcaaagaagtaaaggatgatttcgaggccgttgataatgaaatattaaaatgtcgtacgggcttatggacaaatgatggaagaagagttttacgtaaatctgccacagattccgaagtacccctcattccaacacctttcaatgttgatggaaaagacaatcacaatcctgacataccccaacttatcactcccgaggttgaaaaagcttataatgctttactagaaaacttttccgattcgtggatcagaagagtaaaagaatacaaagtcaaggaacgccgtgagtttgataaaaatttttcttttctatggggactaattgactataacaaactgcctaaagatattaacaagaaggttttgccatttgccactaacccatttttgatgaatttaattgttgaaaatattgatatcgatatattaagacctttctgtggtatcgaaaatattccaaactttatttatgatgttggaaagggcgttccaaaggacacagaatattcaattatgataccaatgcacttggatgctaaatttagtgaagtgagatggcatttaagagattacccattgccgtttgtctgtatacccccattaagttctacacaaagtaaagaaacaatcgctacaagaattcatggggatttcatgataactgaggatatgcttcaatcggaaaaggaattaagaacgttatttgtacctttgatcccttcggtcactgtcgagaatacagacaagtattactctttatttgtaccaagaacgatgactagtgcgaagatattcacgaatttaaattttgaaatcaactctaaacacacaacgcgagtaacctggggcggctcttatcagccagccattcaacaaactatgcaatgtttagataacttttcaaagcccccgttagacccttcgataaaattaggattctgggataaaacaagatatcttttccatggtaaaattaatgtactttggaaaaataaagggaagtttgaagtctctttaaaaggtgcaaagagcccttacatgcttggcggcgattctgccgggtttatagttggatttgatggcaatgttaatttaaaatgtaatgaggataacgatcccaaaaaatttctatcatgcagtgcagataaggttcatttcagcattccaaattattttgcgaaaccattgctagtatggtctagacctagcagtaacacaatgttcataccaaatcaagaggaaactaatctgcagcgatacgcttcattttattacctattgaatacgacatctagccgaaatgaaaaggcggaaaaggaatccatgagaaagtcgtttatcgaaaagacgggtatcaaattatcaggaggtatgaccttggatatgggcattctttttgaacggttggggtctagtttagatgagagaacttttgattcaaaggaacattacttgactcgtctatgtaatccaatatatgttcaagaccgttcaaaacatgattcctatgctggctttagaagcgactttatccatatgtctttcgggttatcatccaattcaaattctgcgtacaacgctatgcagctaagtcctaatggattcaaagcgttctttacttggtggaaatcattttcaggaaactttcctgtgaggagagggcctttatttggtcttcagagcataagccctaagtttggtgaacatttgtataccatctcttatcacgctgacgtctcaccactcttcattacttacatgtatcacaatgttgacgctgaccaaattttacgtaaaaactacctagagattgctgagttcgttggtttaaaggctaaagcttctcattttgtaatggatttacaccaaagaaaagaggttttgacggaataccaagctggattaaatatcaggaagagagttatgaaactaaagtttttagccggtgatgtagtatgccaagacgtggatattcgggctgttagtggtgagttcaacaaattgaactatatagaagaaaaagaggatgccgaatatgaaatatttgacaatgatatgacatggcttgatataaccgacttccaggacgcatttttcattaaccctgagaattatttaccgaaaatcaagatcatgccctttgctttctctcctcaatttgcttatcagaagagggcgagttatggtgacaagtaccaagttgatccaaaaacttacaagccaataacgccctttgataatcgtatctcacataactgtactctagggcataatgtttctctacgtactgatctagttgaaaagagggttaatgttttgaaaaagtttcaacaaagattggaagaagaatcagaagaaattaaaacggcgggaatgtcaaaggaatatttaaaggacttactctcaaaagcaaagtttagtgtgaagaacgtcgaaatactactaaaagactttgaagcaatatgcgagcaacgggaaactggggaaaccggacatccttttcatttcgattctttgaatctattgaaggctactaaaaaaacaatgaaactgtttgaaaacagatttttcattttcaacgtgcttttgaaatggaatgaagatacaaggaatgctatctttaaatttctttactatgcagacctagccaatgaatttgcatcattagcaagtgggaagggcttgagagaatttgaggatgcaataaagaaaagagagaccgttgaggaaacagcaagcttggaaggaatatcggaaagagaggggaaaagaaacactggcaaacagtttgggagttgcaatgatgaggaatttaccaatgaaaatcttttgaagatgtttgagaagaatatcacagaattgtcctgtaatattgagcatatgatacatcataagttctttgtacagttcgtaactccacaaatccagttaacgtctcttgaaaatccagaaacgtgtgttatagtgtcctcaccattctttatgttaaagacgcttgagtttgatgcaaataccaccacaaacacgtatatgcaagatattttcttaaaaaggtatggtattttatttggaaatgcgaatgccttcttattcaataagaaggattacaaagaattttttgagttgtactttggatcaagctcttatggccagcataaaaacgaacaatggccgccgtggctgggtttggagctaggatttgaaccttctgcattggaaaagaatgcagtggttaagaatatctctgccttgctgcaatatcaaaagctgtcacagttctccgctaggtacgattccttaaaagataaaatagaggatagcatttgcggatacgttccccaaataaatgtagagttaaattcacaagagtatctaatgcttacaaagatggtattgaaactgtttgtttatgttgaacccgaagatggtgaattgaggaagtatattgaaaaattgataattggttacgacatctatgatacgagtcaaattaaaacattagtaaataatttccacaataacgaacaaattctagctgttgttgaaaaggagttcttatttaagaggagcttattggatgatgtcggcaaaattgatttatccaatgttcacaacgaaagaatgcatcaacttttgaggctgtatatactaatgaaggttttcacttcaaacggaaacaactgcattaaccggacgttggtatggaatattaaagtgaatgaaattattttacatctcttagagaaagacgataaaccatttgtggatattgcagtggcgaagctgaactttaatagagtccgacatgcaatgggactgagaaaaaatattgtcaccgttaagatgatgcaaatattcgacttggaggaaaatgtaaattaccactgtttactcgggcctttagcatctaacaccaatgatttggctagttcaaaggatgacgtgccattggtacaagtaagctgggacatcgataaacccgtaggtggtatcaaggttatcaagaatgttgagactacattgtcgggcttgacagtaaaattggatgaagacaggttaattaaactattggaatggctgtcactaaaagagctgatgtctgatgagaatggagcagacgaagatagcgaatccagtattttagatatgatatcgtcatcatcagaagaaggaaatattaaattttcggaagatacaagtcctgattttaacgaaatgttaaaaagatcgagcgattacatgattgttgaaaatttgaaattaaacagcttcaaactttgcatcagttataaaggtaaaggcacaatgagattggccaatgtgacaaactttgtcttcgatttcccaaccttaagattagccaatcaaactttgaggcttgcagatctattacttgcccttaagaaggtactgataaaggttctaataaaacacaccggaagatttattagtaataaactgaaaagaaactctaaaaataataagatggttgacgatactgctccactaaaacagctcaccacttacaagtcatacaccgaacctgaagagctttgttag

SEQ ID NO: 3161 - DNA, 363 bp, Saccharomyces pastorianus
atggtcaaattaacttcaatcgctgctggtgtcgccgccatcgccgccggtgcctccgcaactaccactctagctcaatctgacgaaagagtcaacttggttgaactgggtgtctacgtttccgatattagagcacatttggcccaatactacctgttccaagccgcccacccaactgaaacatacccagtcgaagttgctgaagccgttttcaactacggtgacttcaccaccatgttgaccggtatcgctccagaccaagtcactagaatgatcactggtgtcccatggtactccaccaggttgagaccagccatctccaaggccctatccaaggacggtatttacactgtcgccaaatag

SEQ ID NO: 3162 - DNA, 1755 bp, Saccharomyces pastorianus
atgagttccgttgctaaagatactattagtgttgctgaaagaagtcttcacaaggaaaacttaactgaaggtggtaacctggccttccacaatcatttgaatgattttgcccacattgaagatcctttggaaagaaggagattggctttggaatccattgataacgaggctttcgggtggcaacaaatcaagaccatctccattgctggtgttggtttcttgacagattcgtacgatatctttgccattaacttgggtatctcgatgatgtcctatgtttactggcacggtgatatgccctcctccagtcagaccttgttgaaggtttccacttctgttgggactgtcattggtcaagtcgggttcggtactttggccgatattgttggtcgtaagaagatttatggtttagaacttattatcatgatcgtctgcaccattttgcaaaccactgtcgctcactctcctgctatcaattttgttgccgtcttgacattctaccgtatcatcatgggtatcggtatcggtggtgactaccctctttcttcgattattacttctgaattttctactaccaaatggagaggtgccatcatgggtgctgtcttcgccaaccaagcctggggtcaaatctccggtggtatcatcgcccttattttggttgccgcttacaagaatgacttaaactatgctgattccggtgctgaatgtgactacagatgtcaaaaagcctgtgaccaaatgtggagaatccttgttgggttgggtactgtgcccggtctactttgtctgtacttcagattgaccattccagaatccccaagatatcaattagacgtcaatgctgaattgttgcgtaacgaaaagaaggaactggatgctgaaaagaaggtccacgacaccagcgatgacgacattgctattcatggtttggaaagagctcctaccgctgtcgaatcccttgacatgcatcctccaaaggcctcattcagagatttctgcaagcatttcggtcaatggaaatatggtaagattttattgggtactgctggttcatggttcatgttggatgttgcgttctacggtttgagtttgaacagtgccattatcctgcaaactatcggttatgctggttctaaaaacgtttacaagaaattgtacgactccgctgttggtaatttgattttgatctgtgctggttccttgccaggttactggatgagtgttttcactgtcgacattattggtagaaaaccaattcaattggccggtttcatcattttgactattttgttctgtgtcattgggtttgcataccataagattggtgaccatggtcttttggctctttacgtcatctgtcaattcttccaaaatttcggtccaaacactactacctttatcgttcctggtgagtgtttccctactcgttacagatctactgctcatggtatttctgctgcatccggtaaaattggtgccatcattgcacaaactgctttgggtactttgatcaaccacaactgtgctaaggatggtaaggccactaactgttggttgcctcatgtcatggagatctttgccttgtttatgttgttgggtattttcaccactttgttgattccagaaaccaagagaaagacgctggaagaaattaacgaacaataccacgatgaagttgatcctggtactcttaactacaggaacaaaatgaatgatgtcgaatcttcctcgccatctcaaatccaacattga

SEQ ID NO: 3163 - DNA, 1542 bp, Saccharomyces pastorianus
atgaatagccaagcagaagacgcatcaccaacattacgtgacgtgggttcatcttcttccacgccacttttcagctcctctagtgaagaagatcttacacataaaaaaatccctagacatcaattaactgaaaatcaagttaaaagaatccgagaggaacgagcaaaaaaaagacagagccacaggaactcattaatatcccaaggcaaggatcccgattttcccacccctgatttgcagttcattaagaggccctttctgcacttgcaccatgaaatgactcatgactccgctgaattgacactagattccaccacatctagtgcacaaaccacgccgaactcattggacgttaaaataatgacctataatactttagcacaaactttgattaggaggaatttcttcccacaaagtggctctgcactaaagtggcacaagaggtcaaaagtcctggtccacgaattaaaaacctataatcccgatattgtatcattacaagaagtcgattataacgaactgaaattctggcaagataatttccgtaagctgggctttgatttaagtttcaaaaggcatgaagggaaaacacatggactattgattgcgtggaaaactgagaaatttcagctagaaaacgagtggatgttagactacgatactatcttggccgggaatgttattcctgcaagaacaagaacaaaaaatattgcgtttatagcatcgctacgtctaaagaatataccaggtccatccaccgatggaattattgtggcaaatacgcatttattttggcacccttttggagtttttgagaggctgagacaatcttacttagtattggcaaaaattcaagaaatcaaagcttgtccaaagtataatgaatggtacagtgtattgatgggggacttcaacactgaacctgaagaaccaccgtacttggctataacaagaaagccagtgacgctcagaggtccagcaagggccatggctgagtgctcattagcgtatcgatattccaagaaaagaaatggagagggaagcagccaagatgatgaggaatgtgatgaacaatctaggggagaaggccgctttaaccagccacaaaaccctaaacctaagtcttttccagcaacaagtgaacagaaaggtctagtaaatcaactagtcgcgctacacaactccttgcacgtgaaaggagtatcattgtatgggcttggatacggtaaggtacaacctgagaactctcacgaaagtaatggtgaaccagaactatcgaactgggccaactcgtggtgtggattactagattatatattttatattgagcccagtgacgaacagagtacacacgaagagaaccccttggacgactttgaaaacaaaaacaatttaagagtcattgggtacctaaaaatgcctcgcgcaaaagaaatgccaaaacattctcaacctttcgaaggagaatacgctagcgaccacgtttccctaatgtgccagctacgttttctttcagaagagaaattaaatagcataaactaa

SEQ ID NO: 3164 - DNA, 1593 bp, Saccharomyces pastorianus
atgggcttgtttcttaatctgaggtcaaatataaaagaaaaatccatggacaatggactaagcttgcccatttcaaggaacggtagctcgaataaaagcagggacaaacgttcacatcatgactccaagtcattgaaggggaaatacatgtaccagccgcggtctacatcgtccaaatttcagcttacagtgaacgtcatatctcttattattatcactgttttgtcattgtatctggtgattttatttctttcagaaatgagattgggtttatctatacaaaacgggaacacactattgggttcagagaattacaagacgatagatctggaagatgaagaatattataactacgattttgaggatattgacccaaaggtggtttcgaaatttgatgatggtgtgcagcattatctaatatcccaattcggttcagagactttgacccccgaggatggcgaaaagtaccaagaggaaatgagcatgcttttggattctaccgtggagaaatacgacttaacaaatttcgaaggtgcaccaaacggtctggaaacacgtgaccatattcttttatgcatcccattaaggaacgcagcagatgtcttacctttaatgttcaagcatctgatgaacttgacttacccacacgaattgatcgatttgacctttctagtcagtgattgttccgaaggtgacactacattggacgcattaatagcatattcgagacaattacaaaacggtaccctgtctcaaatttttcaagaaattgatgctgttattgactcgcaaactaaaggtaccgataaactatacctcaaatacatggacgaagattacatcaatcgtgttcatcaggcattttcaccacctttccatgaaaattatgataagccattcagatcagttcaggtctttcaaaaggatttcggtcaagtaattggccaaggctttagcgatagacatgctgtgaaagttcaaggtataagaagaaaattaatgggaagagcaagaaactggttgactgctaatgctttgaaaccataccattcttgggtttattggagagatgctgatgtagagctatgccctgggtctgttattcaagacttgatgagtaaagattatgatgtcattgtccccaatgtttggagaccgctacctacatttttaaatagtgagcaaccatacgatttaaattcttggatggaatctggagaagcactagatttggcaaaaacacttgacgaagacgatgtcattgtggaaggttatgcagaatatccaacatggagagttcatttggcttacatcagagatgcaggaggtgatccaaatgaagtggtcgatttggacggtgtcgggggtgtttcaatcctagcgaaggctaaaatattcagaaatggtgtacagttccccgcattcacctttgaaaatcacgctgaaacagaagcatttggtaaaatggcaaaaaaaatggggtatagagtcggtggcttaccgcattatactatctggcatatttatgaaccaagtgacgacgatttgaaggaaatcgccacaagggaaagggagaagagaagacaatcatag

SEQ ID NO: 3165 - DNA, 1551 bp, Saccharomyces pastorianus
atgacaatgacttctgcaacgtcgaatagcggttctggtgccaggcagaccatggttcagttgacgaacctgccggatttgacggaagttagtcacttggaaatagatgcgcccgtactggaaatcctgaagaaatcggtcctgtttcaattgaactcgttgaacatctgcatttcgaactttgctctagatgagatggtcaatctcgtggccgttcagatggacgggatgtttcggaacttacacaatttggcactgttgcaaagaaggtcgcaagtttctcaggcggatttgaaactattgtttagagagttcaatctggactctggttccctttttcaagaatttcaagtttcagaacatatcaaatcgagaaattctgctgaatatcaaaaactggttaaatcatcatcatttatctttccttcgcatatcgacgacgatgaagaggacgaaactaataatattgaagaacaacaaaatgagatcaacgtcttgctgcctccctccaatccattggagaaactgataccgagctggctgcctaacttcccgccagatcatacctacaagtttacacccgaattcaaccatccaattacggatctaaaaactatcaaaagagaaatagtcaaagaaagtggggagtcggaaagagctctactaaatctaaataaacgtctcttccacatatcttcagcttctcacactccatcgccccgccttcctgatgcttctgatgctagcgagcgattagagatttggggcaacactcttcatgaaaggaaaacggcaataacaacgaaatctttcgatgagaaaaacatcgagcagtacgccaagtataggatcgaactggctagagagcgtgtctcaaagttcgagatcaaccaattgaaaagaacgaaaaacccatttttgaaaatttcagaatctctctactctttcaagaacccgcaccagtctcataaagttgtacaaaggtccatagatttgcaactacgcaagtcggtgacattgtttatgcataacctacccaaaatccagaaactaaagaaggaaaaaatacaactgtccaaagaagaaagacaaaaatcactaaaacgtcgacaagaagggcttatttcgcaacgaaagaaaaaggaacaagatgaaggccacgatctagaactcctgttgaacaacgagcacgtaagggaatctactgacaacgataatagcctcaacgcattaaacgcttccaccatagacataaacgcgaatgcgaatggcgacgaagacgaagacgatgatatgaatctatttggtatactgggcagtagcgaagatgaaaacgagttgtcaagcatacaggtggaaactgtggtcggggaatcagaacctcccacggcgtcagcacgagacactacaaataccacgccagtagcacaaaacacaaccaatatcgacaccactgcaaacctctccatcctatccatcccttataaaaatgcaccaacgtcccctcccacagccacagccacagccacggataatgatataaatatataa

SEQ ID NO: 3166 - DNA, 318 bp, Saccharomyces pastorianus
atgtcaaaaaacaatatgtaccgtatgctcgtcttactagaggacgataccaaaataactaaagaagatgaaaaattcatcaaaggtaagccagggaaaatgcatgaatttgtcgatgagttaatgttaccatttcaggttgatgaactagacgaactaaacgtttggtttgataaatttgacgctgaaatttgtataccgaacgaaggtcatattaaatatgaaattagcagtgatggtttaattgtacttatgctagataaagaaattgaggatgttgtcgaaaaggtaaagaaattcgtcgaagaaaatgtctga

SEQ ID NO: 3167 - DNA, 1416 bp, Saccharomyces pastorianus
atggaggcttcacatttgcagatatactggcacgactcgcagcccgtgtacacgctgacgttccagcggaacggctcgaacgacaggctgttcaccgccggtggtgataacaaggtccggatatggaagctgaacagggaggagaaggaggagcaggcccgcggcgtgcgcaagatcgagagcatggatttcctcgggtcgctgacgcaccacgagcaggccatcaacgtgatccggttcaactcgcacggcgacgtgctggcctctgccggcgacgatggccaggttctgctgtggaagcaggaggacccggatgcgcagcaagaggccgtgccaaggccctttggggcggaccctgaggcgggcgacgcagacgagaacaaagagaagtgggtggtatggaagcggctgcgcggcgggagcggagccactgccgcggcagagatatacgacctggcctggtcaccggacaacagatacattgtggtggcatgcatggacaactcgatacggctgtttgatgtcggggccgggacgctggtgtgcggccaggcggaccacggccattacgtgcagggcgtggcgtgggaccctctgaaccagtttatcgtgtcgcagtcggcggaccggtcgctgcacgtgtacgagatcgtgcagtccgcggcggggatggtgacgggtctgaagttgaagaacaagatcgtcaaggcggagctgcccgttctgggcagcgacgtggcccggacgaactacctgttccataacgagacgctgccttcgttcttccggcgctgcagcatctcgccctgtggcgggctggtggtggtgcccagtggagtgcacaaggtgggcgatgacgaggcggccaattgcgtctacgtgtacactaggtccggggtgttgaacggcggcggcggcgtgaagaacaggcccgcgctgaggatcccgttcttgaagaagcccgcgctgatggtggagttctcgcccgtgttctatgcgacgcgtcagcagagcgtgttgcgactgccttacaagttggtgtttgccatcgcgacgaccaacgaggttctggtgttcgacacggacgcgtgggagccactgtgcgtggtgggcaacatacactactcgccgatcacggacctggcgtggtccggagacggctcgacgctgctggtctcgtccacggacgggttctgctcgtacgtgtcgatcgacgcccaagcgcagtttggtgcgaggatcgagccgccggcgctgcgtgcggcgcaaccgggcgacgacgtagccgccaagaacccgcccaccgtttcgcgtggggtcgtgaacatgttgcccgtgagaaaggcagacaacgcggccggcaacaacaacgataacaaaaagaggcggatccagcctacaccggtagacccgtga

SEQ ID NO: 3168 - DNA, 510 bp, Saccharomyces pastorianus
atgtcgaggaagctgaagagaaccaacttgttcaacaaggacgtgagctccttactgtacgcttacggcgatgtgcctcaaccactgcattccacggtacagtgcttagatgaactggtatcggggtatttggtagatgtgtgcaataatgcattccatacagctcaaaactcccagagaaacaaactccgattggaggatttcaagtttgctctgcggaacgactctgttaaacttggaagagctgaagaactgatagctactaataagttgatcacggaagctaagaagcagtttaatgagacagacaatcaaaactcattgaaaaggtacagagcagaagacgaggaaggtgacgagatagaggaagatgaagatgagcaactggtaacagacgatgacgaagtagccgaccgcaccagtagtaagcaacactcagaatcaaagccagcaaaggctaagaagcaagggaccaagaattccaagaaaacaacaaaaaaaatgatatag

SEQ ID NO: 3169 - DNA, 3780 bp, Saccharomyces pastorianus
atgccatcggaagagttcaaaggactacccatcaaaagggatctttctgccaccgatcatgctgataggcctccggctctgtctgctcctccatgcgttatttctgtcgcaagcgacgagtcgcaagtgctgccgattcctaagaaatccaggactatcaagaccgataaaccaagaccttttctgtgccatatctgtacaagggggttcgtgagacaggagcatctgaaacgacatcaaagagcacatacaaacgagaaacctttcctttgcgtgttttgcggaaggtgctttgcgagacgagaccttgtgttgcggcatcaacacaagctgcattcggcattggtttccaaagaatctgtggattctagaggcaagaatgaaatagatgccatgaacgataaaaacataattcaaattcaaggcaacaaacaaactattcttccgacaccaagcaatccattagccaaaacggctgctcagttgaaaaaagcagcgaaagagaaaaaaggcgggaagcaggacgaattggatttgagcccttcgtacagtatgaatggccacagtgcgggcattctgcctttagtgggtaactcttccacacctgcaataattcaggtacctgagtcgtcttcgcgttcccctcctccgccagatatgagtattccgacaaaatataaaagacatgcatcattttcagcttccagtgcattcacgtatagttctgacaaatttcaaaaactgcatcaacaaaccaaatccgattttgacgaattgcaggaaagcgtccctcatcaggtgggattctccacacctcaattaacagcgcaacaacttatagaaaatgctatcgaatctggtgtggtggacttggaaactttggacttgccaccatttttatcattagacggtcagccgcctccaacgtcaactgcggctgcttcaggtcctgaacatatagatttgtatccttcttccacggcggacaccgccacaggtagtactgccactccgcatcaggctgcgacagctcctccctctcaactacctataccaagagaaagcagttctttatttttggcgcatactccctatttatcggattttttaacaatgggctcctcatatggtggttcgggtgggtttgtaagatccattactgcagatcctagtttagattatttcaattacaaaagccatgcacattcagacaccaagcataacagtattgcaaactgtaataatacgaacaaggataatattactggtaataatgttaatgtgactgaaagaactcgaagcaacggcaacggcaacataaatggagaacctattaatcataccgggtttgttcaaagttatcgtgcaagtggtcatgatgattcattcatagaaagtgaggaatggctatccaagttcatcatggattctcaaattgaaaatgatctgaaacttaatatcagtcattttaacgatattgggttcaacaacttacattctcaacatcccacaactcgctcagaaccaacaaatatgcataatgaagataacaacgcacatgatccttccaatcaattccagtccgtgtcagcaaacatatctccaccaggacagttcgctttgtttaaaactaagccaaataaagccatttcaagatttctgtcagacgagaaaataccttcgactgcatcaccttcctcttctgcctctccaatgcaattcggtaagaaaaatgaagatatcaacgagtttttattagatgaatctgtttctaatttattcacttctagacaaatcgatttattcaagaaaaacgtgaatctatattcaccactctttcaaaatcaaaaaagtgcagtttcttcttcaagttcaacaccaccattaactactccaaccggagtgacactaccaattccacgaaaaaaggaaaaacaccctaaaaaacttaaatttttcacagaacagttgcgaaactcaattattgaggaacataaattaggatctaatctattccccactgttgaggaattaaaccattacgtcaatctgtaccaggtggaatttcacaaatacttcccctttatccacctatactcgattctacctgtaaatgaaaactatccattagtaatctctatcagcatgattggtgccctctacggcttccactccacgcatgcgttattattgtcaaagatagcaagaacaaaagtaagggttttcctagaaagtaccaaaaacagtcacgataagacccccatctggttaattcagtctttggttttattgacgtttactagtattttctccaatgatattaatgtattcagaacggtgaatacacaaatagttattttggttcaattaatcaaaatcacaaaattaaacttcccactagaaaattttataaaaccgccaatcgagagcgatcatgtgctagaattccaagataaccctgctgtcctaaatcagtttaaagcacaatataacacattggaacaaattaacaggaacttcaaatacttcattttagctcaatcgagaataagaatatgtcacatagttttgttgatttccaacttattcaaatctttagtagatttcgattgctgctttcattcgattgatttgaagtgcggtgttccgtgctacaacgaagtattgttcttttgtgaagatttcaaagtctggaatgagaatttgacaaggttcaatatcgttttggattctaaattttccttaattgaagtatctaacggtgaatccaattacgaaaaatgcttaatgtacctatcaaatggcaatccttacctttacgacaacgctaaagtctcgtttaggaccttattatctttactgatctctatccatgaaaagataaacattgaaagagacgctttgagagataattataaaggagattttcatatgaaagacgtgcaatggaggatgcattcaaggcccctagttgctaccatgctaaaacactgggaactgttatatatcaagaatggaggaatactggctctcaataatgaaaacttaccaataatcaatacgaatccgtcatttagattgatcatccctctgtatttttttgcaaaattaagaaaatgtctagatgtggctccaacactgagattcatttggaaccaggattggaattcgatgaatagttccttagaaaaagtttgctacgaatgggaatcattacgcgaagccacggaatacgctgtttctgttgtcacattttggattgacacagtatctataatgaaaggaagatcaacgcaaactccgattttcaccattacttgtatctttgtttcaatcttggtcatagccgggtacatgaggaaattggaagattttgcgcaaaaccaaaagggcgataccatgatcggtggtttgaagatcactgatagaattctgtggctgaaggcatttaaaactttgaaaaggattgaatcgcacttatctgaaagagagtataaactgcaaacatttgcagaatttttaagacttccagataatggtggtttagatatcgagagtttggattcttctttgatagaaagggctttgaacccagaggttgttagtgatagagcgctagatataatcatgagaacaaggctatcttcaagaacattatactgtggtgctagaatcctcggcgatacacccgtctggcctgtgtccctgctgtttgctcatgctttacaatccagggctatttataatattaatcacggtaaagctctaaacaaaagatag

SEQ ID NO: 3170 - DNA, 606 bp, Saccharomyces pastorianus
atgtcagctaatatacaagaagctgctgatgcagccattgagcctgtaagctttgttaaagtccctgcgcttgagcctccaactagtttgcaacaaatgattcatgattggcaactgatcaagcacagagaaggtgggtacttcaaagagacagacaggtctcccttgaccatgggcttagaaaagccacaagacggagactctaccgatagtgttacagtgacaaggaaccagtctacgctgatttattacttgctgactcccgacagcccaattgggaaatttcacaagaatattaatagaattacgcatattttgcaaagaggtaaaggtcaatacgtactagtgtaccctgatggccaagtaaaatcatttagggttggatttgactataagaagggagaagtctcccaatgggttgtccccggaggtgtttttaaagcaagtttccttgtaccaaacgaagaattcgacaacgggttgttgattagtgaagtagtggtacctgggtttgatttcgaagatcacacctttatgaaaggtgaagatgagttgaagagccttgttggtcctgaaagggcagccgagttggcattcttagtttag

SEQ ID NO: 3171 - DNA, 2841 bp, Saccharomyces pastorianus
atgaacgcacaattttcagtagccggacttgccgctggaaaagagagtaacggcaactcgaaggccagcagtaaaatgacgtcgccaaggtccgatgacccactcatagatatgactacgcagacaattatagagggatgccttgacgacgatactagactaatgttccccaccaaactggagactactgaaaatggtaagataaaaagaaattcatttgcatgcgtatgttgtcattctttgaagcagaaatgtgtgccttccgatgctaatgatatctataggaaaccatgccaaagatgtctaaaacataagaaagtttgcaaattcgaccttgctaaaaggactaggaagagaaaacacaggtcgagatcctctgcatctctcgaatcgccgatacagaatgtctctacaaaaggcgaatttcccgctgattttaaggaatcgagcttaaagaataacgcatcctttcccatcgctttccctcccgatccgaatacgaaacaggttccgaactctcgtacagttttacctggacttcagcaaagtttgtctgatctctggtcaacgctaagccagccaccttcggaaagagtaagggacaccgaaccaacacctagtgaggacagaattgtcaataaatctacgcaagctaacagtgaaaactctgtatcgacaaatatatccttattggcatccactgatgagcgtacaaagaatggcggtgctccggtaatatacagctcttataactcgccaataccgatgccttctatccccaccagtactaatagcgaagcatctttcaagcgtaggccaagtgttgtgggaaataaggaaacttgcaatggcaaaatgaaaagaaaaaagaattcatattccaaacacatgacacgatcatttaggaagcagctacaatcactaattatatctcaaaagggtaagattagagacatttcaatgaagttggatacgtggtcgaagcaatggaacgatctcgttgaaaggagcatgtttttaccgacaatatcggatcccgtatccgtaggaatcatatctcatgaagaagccaccttgaggctgcatctttacaagacaaaaatttcatatctgtcaaaattaccgtttataaaagtcgaggaaaaagtcagcgtcgatgagctgagaaaaaggaaaccaatattattttctgtcatcatgtcttgtgtttccatcgtattagctcccaaacaaacaaccagaggaacgataatgaagcttgatagttttgtattaaacttaatcacaaatcagattttcaaggccaacaacaaatccattgaaataattgaatcactatctacattgtgtctatggtacaatttctttgaatggtccagcaagacaagataccatatattcaattacatttgttgctgcttaacaagggatttggggcctacttatgtcaatagatcctttggcatgtttagtgatgaggatcccgataggttcaaatcacctttggaactctacagcagcggttccagattaatcttattggtgtatgtttcggcactaaacatttcaatttttctacgtcagtcgatacaggctcgctggagtcacgtcactgaaaaggcgtgccaggatttgatcaaggaaaaaaaggaatcaaaccagaatgacaatgataagtcattacttgatataactgatgatcctatcctagtacaatttgctaaaatgaaccatgtcctagaaaacatccatactcacttacacgaacgagatttcaatgaagatgaatttgatgattgtgattttacgaggaactatatcagcaaactgattgaaaaattccatagacagttaaaagaaatttttattaatctcgatagaaataggccaagagtaattgcattttattattctgtggaggcttacctatatcaatataaacttgcggtatttattggagaaaagtcccatgccttaaatgaaaaaattgaattacccaaagaaataacggaagattttgttaagtgctatcagtgctgcaaatgtgccctcgaggaattttcaaaattagagccaattttaataacctctctgcctttattccatacgtctaggatcatttacactgtaggtatgcttttgttaaaattaaggtactctgttgttgccattccttcctttcatgatctgatgccattgacagatgatgccattgccttggtgataggggtgaacaatcttttggaaaagacatccgaattatacccgttcaacaattctctttacaaatttaggtatgttatcgcattattttgtcagacatatgcaaacaaagttatcaatgtcgctgatcgctacaatgcaaaaagagaagaacaaacgcaaaggcaaactgtaaatgaaacgtgccatgatgacaaggacgtgcgaccaacagatacgtatgaaacggaaccacaaaacatggagaaagaacaggatcctatcgtcgaaaataatatccgccaaagtgtatccactgttccagatgagatgttaccagtatattcaagagttcgtgacgatactgctgccgtgagcctgagtatcaatagcacttcctactttaatgggtccttacgccaacctcaagagagcctggcaggatcaacgctattgcccccaccattcatttcgaatactaacatttccattaacactgacataagtaatataaagccatcacccagttcgtcggttgataatttgaacgattatctgaccgatattaattccttagcatggggtgtgaactcactaaatgacgagttttggacagatcttttcatgaatgacaattaa

SEQ ID NO: 3172 - DNA, 5022 bp, Saccharomyces pastorianus
atgaactgctccacgaattctagcatcggtaaccgcgctaccaatcagaatctaaacagcagcctcgcttctagcattaattccagtaattccacgtcctacagattccagacgtgtcttgccgaccagatcgtctcggaggcgcagacgtggtcgctgtcgtcgctgtacaacttctcctgggtcgtgtcttacttcgtcacgggcacttcccgcatggtcttcagatacagctggtacctgctgacattatcgcttttaaggtttccgaaatggatcttcctcaggttccaccacgtccgcttcacgctctccttttggctgatcctgtttgctctggccatcatcttgtatgtgacctactccatcttgaaggaaagaatcctttcgcagtacaagaaactgaccccggagtttctgccgctggatgatactggcaaagccgcctccggcgccagtgccacagcagcagccactccatcaaacgacccgtcctctattacaggctcacccatcacggatccaagctcaaacgacaactcgaaaaagcagtctttgaaagacggcaacgaaaacgaaacgtttctttcatcgtacctagaccagtttctaagcgccatcaaaatatttggctacttggaaaaaccggtgttccatgaattgaccaagaatatgaaaacgcaaaaactggacgagggcgagatcttgctgttggacagcaccatcgggtttgccatcgttgtagagggcactttgcaattgtaccatgaagtggaccattcggaaaaggaccaggacgatggagccgaccaaagtgacacggattactctgacgacgacgacgacgaagacgaagacgacgacggagacaccaggtcttgttcttccggccccattggtgaagaagacgaatccgtgggttacatccggttgaaaaacggactagggaagttccaactactgaacactgtcaagtcagggaacccactgacttctcttgtgagcattttaaacctattcacgcactccatgccctcggaaaactccgggttctcttcggacttgtcttctccagtagataccactgtcaccggcagcaatttgttttattcatcagagcacaacttctccgccacggattccatggcgcattccagcagtggctctcgaactttcccctcttccatgcctaagctagtcgcccgggcggctacggactgtaccatagggatcatcccgccgcaatcgtttgccaaattgactgcgaagtacccgcgatctgcatctcacatcatccagatggtgcttacgaaactgtaccatgttactttccaaactgctcacgactatttggggctaacgaaggagattatggatatcgaggtcctgttgaataagtccatcgtttacgagttgccgtattatttaaaggaggccgttatccgcaagttcaaaaatgcagataagactagtggatcgagtgactcaaatctcgatgctaacaagaataaagcaacttccgagttgaaaaaacaatctaaatccaagcccgcagaagacattataaactcgctcaagatagccaacgccaacgcgagttcaagctcaaactcccttttgatcaaaccggaatttatccatcatccaagttcaagacacgtcgtactgggttcaagagaccagttcaaccctggtgatcttttgtcgaatgttccattgtcaagaacaatggatatcttgtcgcccagcccggtccatgtcaacaaccgtcccaaactaaacggcctcaacactgctgctccggcccattacaaaagatcttctagaagtagcagcaacaatgcttccatccactccaaaagattgtcttctttgtctccagagtttcacaacccccaactcaacacgtcacctttgcttttggaaaacacttctacgtatgaccataggcactcaagcccaacctttttgaagaaagggcgtgcctctccaagacccaatctacttcctacaacgtctttttctgcagctcaagaggagaccgaggaatcttctctaagaatggctctagtcgaggcaatgctaacgtatttgggagttaataaaagcaatatgtccatttcaccttcttcgtcagcaaacaagtccacctcaaaatcttcattgtatgatgatatttataaccgtcatccgagtaatgcaagtttcttaatgaactctaactatccaccgtctgacgtttctgtagcttcgtcacttacctcctctcaaacccaacagacgatgttaagaatcttacccaaggaatacactatttcctctactaaaaggcatagcaacaatagaaacctgaataagataaaagctaaaatttacaaggaggaattaaccccaaacttggatttcgaaaatgtcaaaaacgactttgcccaaggtatccaactgaagttttacaaacgtggtaccactatcgtggaacaaaactctcgtggtaagggccttttctatatcatttccggtaagattaacgtaacaacaaattcttcagcatccttcgcaacgtcaatgcctaaacccgaaaagggtcctcctcagacctcacgcatgggcgagaaatctcaccattctcataatctgttatatactgtgggttccggtggtattgtgggttatctatcctcgttaattggttacaagtcttttgttaacctagttgccaaaacagacgtttacgttggatttttgtccagtgaaatcttggaaagactattcgataaatatttcctaatatatttgcggatttccgactcactaaccaaattgttatccacaagattgttgaagctagaccacgctttagagtgggtccatttaagagcttctgaaacgctgttctcgcagggcgactcggcaaatggtatctatgttgttttaaatggtagattaaggcagctacaacaacagttgttatctaactctgatacaaagtccggagaagctgaaactcaaaatattattttaggtgaattagcgcagggtgagagttttggtgaggttgaagttctcactgccatgaatagatattctaccatagtgtctgtgagagattctgaactagcgagaattccaagaacgttgtttgagttactagctcttgagcatccatccatcatgattagagtttcaagattggtcgctaagaagatcgtcggagatagaactgtccccacattgacgggagacccattgtctacgaagcaaaacgacttcagcactttaattcctccaacaaaggcatcttactctagttcattaagtcataaacctcaaaatatcacttctggaacaatcaccttcagaactataaccattttaccgattactagtggcttacctgtagaagcttttgctatgaaattagttcaagcttttaaacaagttggaaggactaccattggtttgaatcaaagaaccaccttaacacatttgggtcgccatgcatttgatagattgtccaaattaaaacaaagtggctatttcgctgaattagaagaaatgtatcagactgttgtttatatctcagacacgcctgttaaatccaactggacaagaacctgtatcgcacaaggtgattgtatcctcttattggcagacgctggatctccatctgctaacattggagaatatgagaagctattgttgaattcaaagactactgcaagaaccgagttaattcttctacatccagaaagatacgtggaaccaggattaacccataaatggttacgctacagaccgtgggttcattcgcatcatcatattcagtttagtttagcaggaacaactttaatgaacgagggcaaaatgcacacgctaaataacggtgcgttagcattaatggacaagttgatccaaacagaattcagtaggaagacccaacaaaacatttcgaaactacttcccaactctatcagaaacacggtggaaaacttttcctcgagatttatgaaaagtaaaaggcaatactataccccagttcataggcataaaaatgatttcctaaggctggctagaattctttctggccaagccatcgggcttgtccttggtggtggtggtgctagaggtattagtcacttgggggttattcaggctatcgaagagcaaggtatccctattgatgttattggaggaacctctattggttcttttgtcggaggtttgtatgcaaaagactatgatttggttccaatttatggccgtgtgaagaagtttgctggtcgaatttcttctatatggagaatgttaacagacctaacctggcctgttacttcatatactactggtcacgagtttaatagaggtatttggaaaacattcggtgatacaaggattgaagacttttggatccagtattattgtaattctactaatatcaccgattcggttcaagagatacattcctttggttatgcgtggagatacattagagcttcgatgtcgcttgctggccttttacctccattagaagagaacggttcaatgctgctcgacggtgggtatgtcgataatttacctgttactgaaatgagagcacgtggatgccaaactatattcgccgttgatgttggttctgtagatgatagaacgcctatggaatatggtgattccctaaatggattttggatcatcttcaatagatggaatccattttcatcccacccaaatatacccaacatggctgaaatccaggtaagattgggttacgttgcatcagtgaatgccttagagaaggccaaaaatacgccaggtgtcgtttacgtcaggccacctattgaagattacgctaccttagattttagtaagtttgaagagatataccatgtgggtgttgattacggtcgcgtgtttttacagggtttaatcgacgacgataagatgccatacattccaggttctcaagaaactgctttgaagtctcaagttcctgagtttttgttacatagaagaaacagtgtttga

SEQ ID NO: 3173 - DNA, 216 bp, Saccharomyces pastorianus
atgaccatggaccaaggccttaacccaaagcaattcttcctcgacgacgtcatcctacaagacaccctatgctcgatgagcaaccgtgtcaacaccagcgtcaagaccggctatcttctacccaagggccacgttccctccgccaacatcattgctgtcgagcgtcgcggtgggctttccgacattggcaagaccccagcctcctctgccaactga

SEQ ID NO: 3174 - DNA, 537 bp, Saccharomyces pastorianus
atgagtactgctaaacctattaacgtgtattccatcccagagctgaaccaaactttggacgaggctttaccttctattttcgcgaggttgaactatgagcgatcatacgctttgctcgataccaaattgtacatagggtattccattgctgttgtagcagggttgagtttcttcctggataaaaaattcgagagatctgaaatcattctgtaccagaagcttttggtgggcgcatatgttgtcttatcgttgatgttctggtacttcactcgtttcgttgaaaaggggaccgtttatacggggaagaacagagacacaaaggaggagatatacgttaagaccaaatttgaaaagaacgaacctctgtaccttgttgggctcatccagaagaagaaggggaacagttcgaggaaagatctgaagactaaattagaagttaacaaggtcttcaatgaaagtggctatttacaaaatgaggtgctcttcaaatggttttctgaacagctcaacgttctggctaccaagaaaaacatataa

SEQ ID NO: 3175 - DNA, 1059 bp, Saccharomyces pastorianus
atgggactaacttcacaaaaattgagatttcaagacattgatatgagtctaattcctgcagcaaaatggtctacaaagttacagtacttattatacagttggtgtcagacaatattacatttggcgatgttttcatcagatgtatatacatgcattaaattgctggcattcaatacatggtcaaacaatattatccaacctttcttggcgttccgaatttccaagtggttgtttagtgggtgcatactgtgctctacagttatactaatcatagagctgataattgggttgaaagtgtataaaagaaaagagattacatcaaattatatgaatggaattagcaggttaataaattgtcttttcaatttcaaaaagtaccaaatttttgagatgatagtgttgagtgatgaaaaaaaattcagtaaatggttatttttttcatattttgaaatcagtggatgcttgaagctagtatttggtgattctccgagacaaataataaatggattaactttatggtcagttttactgacagtttccaatgaaaacaacagtaatactaacggcacacaaagtttgagtaatttagacaacctgaatggtataataaacaagataaaacacattgccaagacaaattatgaagaaagtgtgattttgtctttcatgctattttcctttatcatatgggtgattttaataagtaaactaattataagtgtgataatattcgttatatctatacatccaagattcttacctaacgaaatgaaagccaaagggtatgagttaaaactaaagaaatatgtgtccaaggtcatcgatgagaatttgagtaagacggttcgtaaattggggatactgagagatgatgaggaagacagaaccatatatggggacgacgagatgaaaaaagtagtcgattacgacagcaccgattatggtgacgaaaatacaataccgagttattactgttactcagatggagaggtgttcgaaagagtgtatacgcctacaaaagtatatttcccacaaaattataaatacaagtgtatgtga

SEQ ID NO: 3176 - DNA, 1020 bp, Saccharomyces pastorianus
atggacgaggataaattagttgaccagttattgagcaaagaagatagctctcgggacgatcactgtaaaccaaaaaatgaagatgtgtcgctatatgggttactagatgaggtttccaacggtaggaggttgatgaactgcttgttccattcatctatgcaggtcggaactagattgagtaccaacaaactggatcagaaatgtcgacaaattctgagagattggaccgatgaggaaaaaactatggctatggattctggtggtttacaactagatgcaccagttctgttttcttggagccataatgcagcatccacgtctgtgcaaggcaatacaaatacaaacttgaagggttctacacacggtgggaagaaaaggactaaaattaccactagcagccaattatttgataaggcttccgcagaaattagcagatgtataagccagactacaaatagttggatggtggatgagagcactaacgcgagtgagacaaatggcatcgacaacgacaaaccgtcctctccatgggctagttccagcttcaaagtggatcctctccagaaatttgttgtcaagcaattgccaaaaccaaagaagaaacctgaaagtgatcaagcaaagaaaaacaagacgaaaaggaagagcttttttggattctggggccattctagttccaaatcgagctcaaaaaagaaacccgagaagcctatcgaaattgaagccgatgttcacgaagaatcgggaactcctagcccgccactggatgaagatgctagctccaacaatgtatgtactacacaatcaaatcaagaaagcatgaatagccaacaagttgagcccgtagaaagtgaagtttcagtcgaaaacacccacagcgaccatggtgagttcgaagaattcaaacaagcaactgtacacgccaacgatcttctttctagcgagcccagtatagccaaccccctttcgttgaacttgggctcatttgtgccattgcaaccaaaaaagaaaacctcatag

SEQ ID NO: 3177 - DNA, 2430 bp, Saccharomyces pastorianus
atggataatcaagctacacaaaagctcaacgacctatcgctagagcctgctccttcgcacgacgagctagatggctcaggcctgatcatcgacatcgatcagagaaaaattggtgatgaacaggcgggtgccgtcctggatgacgagacaaaccccttggaacagcaggactcgcacgatagtttggttgctgattcccggaatgccaacttctcgtaccatgaaaaccagcagttgttggagaatggcactaaacagttggccctggatgagcatgattgtcactctgccatcttagaacagccttcgcacacaaccaactgtagctcttctaatatagcggcgatgaacaagggctacgactccgcggatcatccttcggcaagtaccggggccaagccaaggaccctctctgctagtgcccagcacatcttgccagagacactgaagtctgtggctggcaccccggccgtggttaaaccggcacataactcggcctcatacaagatggggatgctggctgatgatgcctcgcagcagtttcttgatgacccctcgtcggaactgatcgacttgtactcgaaagtggccgagtgtagagacctaagagctaagtaccagaccttgtctgtgcaaaacgatgatcaaaatccgaaaaacaaaccagattgggtggtttacccacccccacctaaaccttcatacaattccgacaccaaaaccgtcgtccccgtggccaacaagccggatgcggacgtgtttgatttcgccaagtgtgagattccgggtgaagacccggactgggacttcgccatcaattccgatgactcgtatgtagttcacaaggccaataacaccgatgagttgattgctcagatccccactctgcgcgactactatctggacttggaaaaaatggtctccatatcctccgacggtcctgctaagtcgttcgcttatagaaggctacaatacttggaagcacgctggaatctgtactatctcttaaacgagtatcaagaaactagtgtttctaaaagaaacccacacagggatttctataatgttagaaaagtggacactcacgtccatcattctgcctgcatgaatcaaaagcatttattacgtttcattaagcacaaattgagacattccaaagatgaaaaagtcattttcagagatgggaaacttttaactttggacgaagtgttccgttccttgaatttgaccggctacgatttatccatcgacactttggatatgcatgcgcataaggatacgttccacagattcgataagttcaatttaaaatataatcctattggtgaatcccgtttaagagaaatctttttaaagactaacaattacataaaaggtacttacctggccgacatcactaagcaagtcatatttgatttagagaattcgaaataccaaaactgcgagtacagaatctccgtttatggtagatctcttgatgaatgggataaattagctagctgggtcatcgacaacaaagtcatttcccataatgttcgttggttaattcaaattccgaggttatatgatatttataaaaaaacaggcattgtgcaatgtttccaagatacttgtaaaaatttgttccaaccattatttgaagtgaccaaaaaccctcaatctcatccaaaactgcacattttcttacgtagagtcattgggtttgattctgttgatgacgagtctaaagttgatcgtcgcttccataggaaataccccaagccatcgctttgggaggccccacaaaaccctccttattcctactacctatattatctatattcaaacgttgcatctttgaatcaatggagagctaagagagggtttaacactttggttttgagacctcattgtggtgaagcgggtgatcctgaacatctggtttcggcatacttattggctcacggtatttcccatggtatcttattgaggaaggtgccatttgttcaatacttgtactatttggatcaggttggtattgcaatgtcaccattatctaataatgcattatttttgacttatgacaagaatccattcccaagatactttaaaagaggtttaaacgtttctttatctactgatgatcctttacagttttcctacaccagagaaccattaattgaagaatattcagttgcggcgcaaatctataaactgtctaatgtggatatgtgtgagttggcaagaaactctgtcttgcaaagtggatgggaagcacaaattaagaaacattggatagggaaagattttgccaagattggtattgacggcaacgatgtggtcagaacaaatgttcctgatataagaattaactacaggcatgatacactatcaaccgaactggaactggttaaccattttgccaattttatgaaaaccattgaagaatag

SEQ ID NO: 3178 - DNA, 1980 bp, Saccharomyces pastorianus
atgatacagacgcctagggagttgctgaatccacggtacacgtaccacgctatcttcagcgacgtgtgcaagacccggttcaaccatttggtaacgagactgttttttatatgctcaatcatccagagtgtgtgtatctcactgctggctttgcctcacttgcccttttgggagctggcgttggcattcattcccaacctgctgattcttaatctggtttccctattgattattgtgacgaggaaaaattacatgcacgtgaagaattttgggtttgccaattcatttactttcgcgctgggccaattgttgtcgatgaagtttcttgtataccaagttgtttacactttcggtagttttcttttgtcgttggttttgagcacagtctttggacgtggaggctctggctctaggccatactacaggctgtttatctggataattatacccacgatttataatctgcaacatcaattcactgatgctgacaagttatctttcaactgtgaaaacttctttcaagctccgcaagactacgtattggagcgactcaagaaaatttttgggaagtcactaatcctaagtgtagccagtttgttcgtactgccgatctccaccacaattgttttctctagcacgacaccagggttatttgtttcatttacgagtggcgtggcatctatcataaggctgctgatgatctcctgcattatcttcatcactttcgagttcatcaatatagcatttgacgcacatatgtccattggttgtttgcataagggcaaactaatttcgaatctatcgtccacccccatgggaactctgttaagcggactttcttcggataagccgtttaccaagttgactgcttaccaagagttagcatatagagcaacatcgctagatccatccttgcgagcaccaatatatagttccaaattcagaaacaataatggtaacacgtggtcgttgattcttaaggaatgcctgaaggtcatccaggaaaataacgagacagtaatgctgtacctaagatccatacaggatcttagcgactccacaagcgctatgcatcacaaaaaagtggacaacctagattatatgtatgagaatgggaagttgactagtgccaacgaaaggctttttggtaaccgaccttcaatgatggctccattgaaaaatagtgatccgttgaatgaatcaccaaataagttaagagttagaacagatgacagtgtgctacttaaccgcggaaacaaaaaaaggcccacttctacgtatttgcaaaatgacatagatgaagctagacagactttcaatggttctatattcacccacgagacgacattaatgactgctgtacgtcttatatgcaagaaattaaagaactcgataatgtcatttgttttcccctcatacgcagaaaggcaatcttatgacgaagataataactacaaaacattgccagataagaaacacaactccaacaggggccagatttcagtaattgatatatggtccatttccaagaaaagacaggctgaaaagctgattccactacccatatgccacgccaatagtgtggtagcactcacaggactgctgatcaaatcaagaacagaggacccgaagggtggcatcattgcatctgtcggtgatatcctcaagactttagaaaggtctatttgtgcgttgggtgagttcgccgattgggacccagaatccatggcgtacaacgctgctatccaggcacaaaaaactgctcaagacagagtccaacaggacagcgaggacgaagatggcatgaaggacacggcggacatgataagcgttctctaccaactgtccacgagcgcgtttatggagatagtgctcgagtacaacgtcgcattgaatgatgtctacttagatgcagatgtggctaaactagccaactggtttctagaagtgtacaccactggcgcacccgcagctatataa

SEQ ID NO: 3179 - DNA, 2550 bp, Saccharomyces pastorianus
atgtccgaatatctagctcagacgccctgtaaactcactatttggtcaagggagatcgaacttatcagaacgaacctcttggtcaacgctcatcccttgagtacggtcggcaggctgctccaatatatccattatcaaatacacaaacaattaggggctatccatcagtcagatgaacagtatttgactccagcagcagacacacccttaaatagtattaatgtgtatttcttaagttacgaaggtcaagagttatctccaacatgtttattgaaggacatcacatcacctgcccatctggactcaaaccattttgttagattacagttagaaaagcgtgcttcaccttcgggttcttcattcaatttggattacgatatggacactgagtttgactcgatgaatatacaatttgagatcaatacattatcctctcaacgtatattcaattccatggagccaaacctgcccatcggaaccacattggttaggttagagaaattagcattggaacgtataaagaattttgagaactcaatgggaaatctctgtggtattcaggaaaagcattcagtgcatgattttcaaggattcataataaaggggaaacaaacgcctatgtttctaaactacgggagcgattctgattactataaagatttgaatttagtagatttgttgggcattgatttcacaccggcacatgagtcatttttcacatttttgttcaagatgattcatgaacaaggttcacaaataacaagcgatgaggaggggtttatattggaattcgtatctgacgctacgctctccataacgcatatgactgtccagcccgaaaccacagtaaagcaagtgaaggactttatctgttcagtttatacacattcattaaacctgagaagaaatgatatcaagttgatctacaaggggcaattgcttcatgagagtaattttgcaggcaactcgtccaagatcagtgaatgcattaaagagccacacgaagtaaaaattcatgtgcaaattaatcaggaatatacagagtctggacccggattttggaatgaagtgttcaataacccaaatattttccaatttatgcccccagacacaagatcacagtctcctgttaattttgtccccgcggaaaaacaatcgcctgctgccatggctgacgatgataaaggcgtgcaatatgtgactgaatctgccaatgacttcattgttccgactgatgaactttatagaaaatgcatcattaatgggaatgaagtggtcttcattcccgtcaacgaactaaacccgcaatgctgttacttatccgttaccagaagagattatgacgaaacgagaatccctctatctcgcggtgactacaagatcaatggagataatatcctgctttcatcctttgcgattgagcaactagaagctgctttgaacttcaagattgaaaagatacaggcgccaatggacatgggacagaatgcgtacctcggtgaacgagtccgagtcgcagataatggggcgtctgcgaccgataatggcgcaaacgagatcaacgaatcagcatgggataggatagtcttgcgtcctttgagaaatagctttcctttgctactggtgttggtaagaacgttttacttaatcggctacaattcattggtcccctttttcattattttagagtttggaagctttcttccctggaaatatatcatcttactaagtttattgtttgttttccgaacgatttggaatacgcaagaagtgtggaatttatggagggattactttcacttgaacgatatcgatgaagccaagtttgtccagatcaaaaacttcgtgaactccaattcattgacgttggctttctacaagaaatgcaaggatactcagtccattattgatttactgatgatcccgaatttacacgaacaaagactatccgtatattccgaatacgatatcgagtacgacgccaacaccccagacgttggtcaacttaggttgctattcatcaaggtgttgtcgggcgaaatctccaagaaagctctagacgagttattcagaggatttttcgaattgtacgaagccacaagaaacatgaacccactgtaccctcaggactctttgaacgaactactattgatgatcttgaaggagtccaacaagaaagacatcaacacgctgcccaaatacagaaggtggttccaaaccgtgtgcttgcaaataagcgcaattgcagagcacagcgtcttggacttcatgctcggccacataatcccggacccggcgaacgacagggtgctaaccgccgtggtaaagaactttgtgctcttctgggtcactctactcccctacgtaagggagaagctggatgaaattgtggcgcaacgagccagggatcgtgagcaacctgtttcatccgtccaagaccaagaccaagaccaagaacacgacgagcaagaagcggtagtgatccctgaccaagaccctaccgctacgggtgcgcaagcccacatctacgtctctgacgaggaccggtaa

SEQ ID NO: 3180 - DNA, 1071 bp, Saccharomyces pastorianus
atgaggagatcgtggacgtatttggctatgacggtgaatcaaaagaggaaacagaccaccattgaggatttctttggtgccaaaaagactgctactgggacacccagtaagaaagctaagacgagcgccacttttacgagcgtgacaaaagatgcagttacgaagattgaaacaaaggacgtcgtaaaggaggccactgctagcaaagatcttgtgaattcagatgttaaaggtgatttttcaggacatttaagcacgaatttgcgtgacttactatcattagagatcaacacaatcgatgattcgtggttcccacacttgatggatgaattcaaaaagccatactttgtgaagttaaaacagtttgtcactaaagaacagactgatcacaccgtatttccgccacctaatgacatttactcgtggagccggctgacaccattcaataaggttaaagtcgtggttatcggccaggacccatatcataaccataaccaggcacatggtttggcgtttagcgtcaaaccccccacgccagccccaccttctttgaagaacatatataaagaactgaagcaagagtatcctgattttgttcaggataataaagtcggagatttaacgcactgggcttcacaaggtgttctattgcttaacacgtcattgagtgtgagggcgcacaatgcaaactcacattctaagcatggatgggaaacgttcacgaaaagagttgtccaactgttgctccgggacagagaagctgacgggaaaagtttggtgtttctcttatgggggaataatgccattaagctagtagagtctttgttgggttccacttccgtgggagctagtagtaagtatccgaatatcatggtgttgaagtcggtacatccatctccactaagtgcaagtaggggtttttttggtactaatcattttaaaaagatcaacgattggctatataatgctcgaggagaaaaaatgatagattggagcgtagttcctggaacgtctctaaaggaagttgaagaggcaaatgcgcgactggagccaaactcagaagagctttaa

SEQ ID NO: 3181 - DNA, 2109 bp, Saccharomyces pastorianus
atgggtaactcaagctcaaaatcctctaagaaggattcacgttcaagcacctcctcgagaaacccccggcctccagtctctaggactgacacgtctcattctgtgaagtcttcgaaatcaaacaaatcttcgaaatcaaaacgatcccttccctcatcgtccactacaaatgctacttcaaacgttgccgatcccccaactccatccaagtcaaaccttgaagctaatcatcagcgacatagctcacacacgagtcaccactacctctcccctcgttcatattcgcattcgaattctcaaagtgagttgctaactacgccttcgtcttcttccacaaagagaccctctacttcaagaaggtcgagctataatacaaaggccgctgccgatctaccgccttcgatgatccaaatggcacccaagtcgcccatattaaaaacaaataacagcagcatgcatgtatctaagcataaacctccatattcctccacatattatgaaaacgctttgacagatgatgataatgatgataaagacaacgaaacaacacatacaaaaaagttttccaaatcttcaaattctcgtccctccagtataagaagcggttcaatgtcaagaaggaaatcagatgtaactcacgacgatagtaacaacaacaacaacgggtcctcatcttctaacaatcaggaaagttacttggtacaggcactgaccaggtcaaactcacacgcatcctcactacacagtaggaaatcttcctttggctcggatggtaacactgcttacagcactccattaaattcgccaggattatccaaacaactggaccactccggcgaatacttcacatctaatccaacgtcctctttgggccaccattcaagccgtgacgtttacccaagtcaattactcaatcaggacgctgatatcgaaaattcatcccaattgaacgacgtcgatacgtccatggaaaatactaatgacaactataataataccacaaacaacaaaaacggaccgagtgccctgctgaatgaagattttgatgacataatgcattcttccgcaaataagaatgccaccaaaaaattcaaaaaacctatcgatattgatgaaaccattcaaaaattactagacgcaggttatgcggctaagagaaccaagaatgtctgcctgaaaaataatgaaatcttacaaatttgcatcaaagcccgcgaaattttcctctctcaaccttcgttattagagctatcacctcctgtaaaaattgtgggcgacgttcacgggcaatatggtgatcttttaagacttttcactaaatgcggatttccgccatcttcaaactacctattcctaggtgattatgtagaccgtggtaaacagtcgctcgaaacaatactactactgttttgttacaaaataaaatacccagaaaatttctttttgctaagaggcaaccacgaatgtgccaatgtcacaagagtctatggattttacgatgagtgtaagcgtcgttgtaatatcaagatttggaaaactttcatcgacacttttaatacgttgccgttagctgccattgttgcagggaaaattttttgtgttcatggtggattatcgcctgttttaaactcaatggatgaaattagacatgtcgttaggcccactgacgtacccgattttggtttaattaatgatcttttatggtcagatccaacagattcacccaatgaatgggaagataatgaacgtggtgtaagttactgttataataaagtagctattaacaaatttttgaacaaattcgggtttgatttagtttgtagagctcacatggttgtagaggatggttacgaatttttcaatgatagaagtttggtcacagtattttctgcaccaaactattgtggggaattcgataattggggggctgtaatgagcgtcagtgaaggtttattatgctcttttgaattgttggacccgctagatagtaccgccttgaaacaagttatgaaaaagggtaggcaagaaagaaaactggctaatcaacaacaacagttcatggaaacgaacatctccaatgataacgaatctcaacaacaagtttactaa

SEQ ID NO: 3182 - DNA, 1224 bp, Saccharomyces pastorianus
atgtcagcaacaacaggtacgctaaccgctaccttggcaaaggacgtcgcagtcgccactgctactaaagtgtcgtctgacgtgggtgatactttgtattcatacctgcccaaagtcgatcagttttatattccagaatggcttacgatgcagtttattgccaataacctcattagttttacccctctattctcctatggtaccacaattatcagcattgagaaatgtaagaccgctttgggattctccatagatatttgtgccacaatgttgattgccagtatcttaaggatatcttactatttgattacaccatacgaaatcacgttgctgagacaatcattagtgatgattttcattcaattaatcctattgaaaacaagtttaaaatatagacccgacgaatacaaatatcaaaatttgaccgatgttgaaccattgtcgcatttgattcatgacatatggttcgagtttttcagttgcattaacagaccgaaatttttaagtgaagattggaagaacctgatcaagtcactatcattcacaaacttgttgaaatttacatttaaaatttttttggccttcttatacaaaatcctaaagttcttcgacccgaattttaaaagaattggagcattttggcaatgggacaacgataggaatttttggaggtttttggcgctatttgcaaccttacaaatactagtcacattttgtatctcgaacattttaaactgggactcattggatcaaggtcttggctccattatagggtcgctgggtttgctagtagaatctcttctccctctaccacaaattgccattctttacaaactaaaatccgtccagggtttcaaactaatcctattggtaagttggctttgtggtgataccctaaagatcacttacctaatttttggtgcaaaaaatatttccgcattattcgttgtttttgcgttattccagatgtcgttagatttttacatcggcggtcaatacatttactatagatactactatccgaaactaagacatatccaccatcccaataacagcaatccaccatcagatgaagagggtgaaagcgaaatgtacgaattggaccttttcaatactttacaaaaagatgtcgaaaaggccttgaaacacgatagtcatgatacatcagattcacctcaatatgatcaagtaggtaaatctcagccacatacggttacagtataa

SEQ ID NO: 3183 - DNA, 2376 bp, Saccharomyces pastorianus
atgcctactagtaaccaaatcaacattaatgatattcagcccaatcgaatgctttcagaatcaaatatgagggttataaacaataatgaacatacgatcggccagtcggcccagcagcaacaacaacaaccgcagcagcagcagcagcagcagcagcaatatctcagccagggtgttcaacctctggtgcctgtatcataccaatatgtagttcctgaacaatggccgtatccacaatactaccagcaatcacaaccgcaaccgcaatctcaacagcaacagcaaccacaaatgtgtcaagttcaagaaccttgccagaggaatagttctgattcgaacggctctaacccgtcgtccacatcagtagctatttcctccgccgtcagtggtgctgctttgtccaacgcttctggtcctgccatcggtggcaatagcaacagcaataacagtaacagtaacagcagtagcaacgtgccatactattattacttcccacagatgcaagcccctcaatcaatggcttattcgtaccctcaagcgtattattattatcctgcaaatagtgatgggactactaatcctaacggcatagcatcatctgtaactaatattcaaaatcaaaactctgacacggagaaaaattactcggcgtttgagttacagcagcaacaacaattacaagctcaatcttatccatcgcaagcaccaaaaatcagtaatgtattttcaaagtcgcacaaatccggacctccttcagatacttccactggttcaatatctcctagttccaaccgtaccagtcgcaacagcaatggagctgtatcactaacacaacaacttccgatgccaaactatccaaaaccttccacatatcaatttcctggattccataagacttcctcgatctcaaactcacattcacccatccctcccaggcctttaacgacgcctacccaagtcccagtaatttctcaaaaggatacagtaaattacaatcacccccagatgggcttactacctcaacaacaagtaagtccattatatgatgggaactccataacaccacccgtcaaaaccatgacggatcaagaagcttatttgactgtaaacagacaagggaaaactgaccaacaatatgatccaatggctaaagccatgaattcctttcaaacaaccaccataagacatccaatgcccgtaatagccgccgccaacgatccgagcggtagcaatactgggtctgcaaatataataagaccaagagtaacgacaactatgtgggaggatgaaaagacgctttgctatcaagtcgaagctaacgggatttcggtggtaagaagagcagataacgatatgattaatggtaccaagttacttaacgtaactaaaatgacaagaggtagaagagacggtattttaaaggcagaaaaaattaggcatgtggtgaaaattggctctatgcatttaaagggtgtttggataccgtttgagcgtgccttggcaatagcacaaagagagaaaattgccgactatctatatcctttattcatcaaggatatccagagtgtactaaagcaaaacaatattagcaatgacagcactagcagcagtagcagtgctgctggtataaaatcaattagcccgcgaacctattatcaacccattgataattatcagggtgctaatgccccaacaactgcatctgctgcccaattggcttactcctcgatgaacttgaataataaaagtgtacacaataatcccatttcaactgtaactgcaattgcggcgggtcaacgaccaatgagtcagtatccaattcccaatatgaatcaaactgacgtcttcacaatggccaatgcacagaatctttctacaacgatgccgatgaaacagcaggacagtaggatagtttcgccattatcataccctcggaataccgtgataagtcccgtgagtagattaggcaacacatctagtgcttcaagggtcttcacactctctccacacacaacaagcacaaaccaagcatctgaaacaaacgttgggagccttcatacaggaattactcttccgagagtgggatctgagtcggaatcgcgttcggagggttcagaggaaactgacggtaacgacaaggttgcggataatgaaaacacaaaagagtcacggtcgagccaactgccgatctctgcattgacatcaacacacacaggtacaggaacaacaagcactagccaagacatcgcgcattcaaatgagcctacggaaatagaaccagtcaaggaacaagcctctttcaaatcgcaagctggtaaccccgaaggcgttttcaaaaaggtaacaaccactaatgatataaagaaacaagagtga

SEQ ID NO: 3184 - DNA, 1224 bp, Saccharomyces pastorianus
atggtgttccaaaagatacttgctagcaaatcacatcacagtcgtcaccatcataattctctccaccaccaccatcatcttagcctcaagtggccaaaacgccgtcatacactcatttcaaacgttaccggatccaatgaaacaaaatatctatcgccatttagaaatagtacagatacgggaagtagaaaacgtgatagattgaacgtaaaaataaagtcgctgagaaataagattcatatgcggttccatcccacatacataattgatgacacggctacagtaaccagtggtgaaaagtatgatgcttacggagaaactaaaagagacgagctcaccacaatgtcgttagaagaacttttccccaggtctaatcggtatcgaatccctgaggataatgaagaagaaacgaatagcgttattcacagggaattgggcaaaagtgaaaatgaaaatgaagatgaaaatgattaccccagatggggaaacgcggaacaacgctacagttttgaaaacgaccagttcaatgaggacgaaattgtgaacagaataaggtctgaaatcaggactacaaaattgaactccgtaaaaaccagtaacagaacactggcaaaagctacagaggcccaactaattggaaaaagggttctccagcagttaagttgccaaagtaatcaactaaccaagatcgaggataattgcgacattcttaaaatccaatctaatgtggctgacaaaaaaatcgacgaacttgttcatgaaaatagaagtttgtttgcattgacatcacccaacccgtttaggaagaaaagagaaagagaaaaacaaaaccaaatcaatgacttgaagatgaaacagtatcatctacagcaggaaaccgtgaaacgggcccaagaatctgggagaaacttagccgtacgcctaacttctaactatgagcgatatgataaagaggaagaacgacaatatattctcaaaaacgcccaaaaatatcagtttgaacctgatgaagaagataataggatggaaattgaattgtacgaaaactttgaacaaataaaagcagcgagtggcaacttgaaagaaatggctcaagcatttggcagggagtttgaagcacaaaattccagaatgtttgatatcgaaaacaacgtacaacaggtggacggcgccttacaagccaaaagatttagattagacagggtgataggaagaaaagagtaa

SEQ ID NO: 3185 - DNA, 1566 bp, Saccharomyces pastorianus
atgaacgaagccaattgttccgtaaccaatggcaaccccattcacaggcttaataatgagttaaggccaaaacgaagtaatctgagtagatcttccggttctcaaaataacggatgcaccacgctaagtgccacaacaatagagcgcatttttactaattctcaaagaggcaacattgccaataaaattgattttcagaatgcatcaccggtcgctcaggttcaagcagaggcttactatggcggcgatggcggtgaaggaaaattgtcaaggcccgagaaccaatggtcaaaggaattctcttgctcttacaagaataaaagtattgatgtcgtaatgcctggtcgaatgaaaaatgaaaaatactctattggtttccacgacaaggttttcacaccgtatcgtaatgaagcataccgtctaaaccatttatatccttacgggaaaacttatggtggatgctcgtctgcttctaacggccattgggagactcaattcgagctaattgaagaccagttaataagcgaactgaaaatagcaaaaaaagtagagcaaacacccattggttacgactatttggccgaatatgaagaaacaatagattttaaatacacctcactacccgtacctgagacgtaccagtttttgaataacaacgattactcatgccagccggacccctataaaataggctgtatactaatggaaaacggttcaaacttgaacgaggtagtaaaggcttttgaagccgctatttctcaagatccgtcgcacgtgaatgcatggctaaagctaggcatagttagtattgaaaatgaaaacgaaaataacggcgagctcgctttgcaaaattgtttgaatttggatccaaataatacatctgcaatggaaagcttagcgattcactatacgaaccaacaaaatgaatcagaagcaatgaaactctttcaaagatggattctttcaaaattttctgaatatttataccccactgtaggacaaaataataaatttatggatacaactcttggaaagtctaatttgatgtctattttggagtctttgctgaagatgcgtgtaacaaaaaaagaccaacgtaagattcattccgtattatcagttttatactattcagatcagaaaattcgacaatctctggagagcttggaatttttattatctgaaaaacccaatgatgaaataatctggaataggtatggcgctatattagccaataccaagtcgtatcactctgcaataaacgcatataataaatctaagctactcagacccaattttacaagggcccgctacaatttggctattgctttcttgagcaatggtgactacatcaaagcaagcaaaactttaatagaaattatattattacaaagcaaaggaattgaaaatatcaagacgaagatgcacaacaagttcatgcaaaatctaaaaaatgctctgattgctttgaagaagtttgaccttttagatgatttagtaaacaattctgatgaagcagaattattgatatcaaccttgaaaattatttacaataagataggttag

SEQ ID NO: 3186 - DNA, 1518 bp, Saccharomyces pastorianus
atgagtacggttttaccaattaagaagactgtcgtcatcatcggtgcggggatcgcagggctcaaatctgcatctacattgcaccaaaacggcgttcaaaattgtgtcattctcgaagccagagatagaataggtggcagactacataccgttacaggctaccaaggacggaaatatgatataggtgctagctggcaccacgacacattgacaaatcctttatttttagaagaagctcaactaacttctagagacgggaagcagaggtttgttttcgatgacgacaacttcatttatatcgacgaagaacgtggaagagttgatcatgatgaaaaactgctattggagattgtggacaatgaaatgagtaaattcgcagaattggaatttcaccaacaactagacgttccagactgctccttttttcaattggtgatgaaatacttagtccaaagacgccaatttcttactaatgatcaaattaggtattttccgcaactatgtcgatatttggaattgtggcatggattagactggaaacttttaagtgcaaaggatacatacttcggtcatcaaggaagaaacgcctttgctttaagttatgactctgtggttaaacgaattggtgaaagctttcctcaagaatggatgaggttgaattgtgaagtcaattcgattaagcgcgaaccttcaggaaatgtgacagtgacctgtggtaatggcaccgtataccatactgactacgttattgtcactattcctcaaagcgtattgaacttatccataaagcccgataaggatcttcaagggagaatagaattccagcctgcgttgaaaccagtgattcaagaagctttcgaaaaaattcactttggtgctctcggtaaagttgtttttgagtttgaagaatgttgttggtcgaaggaaagttccaaaattgcgactttggccaactcatctgatgactttgtcaaacaagttcgtgatgccaaagatttagatgacttgaattctatgctagaaaaaaatgccctgaaaggacacacaaatgttagctgttgggatcaacctttgctttttgtaaatctgtcaaaaactacaggggtagcaagttttatgatgctgatgcaagcgccgctatctaattatatagaatccatcagagatgataaagagtccatttttaaattcttccaacccgttttaaacaagatcatgaaatgtctaaattctgtagacgttattaatggcatgaattcagctgaaaagcatattgataaaccaactctgaaaaatattattgtcagtaattggacacgcgagccttactcccgtggtgcttattcagcctgttttccaggggatgatcctgttgatatggtcgttgctatgtctaatggtcaagattctcgtataagatttgcaggcgaacacactgttatggatggtgccgggtgtgcttatggtgcctgggaaagtggtaagcgagaggcaaatcacatctctaatttgatgtag

SEQ ID NO: 3187 - DNA, 936 bp, Saccharomyces pastorianus
atgaatatagaccatttggggttaagccccttagccatttcagaagttaactttctgcatgagtcatcttccagttcgaaagaccattcttggttcttatttttaggcttcaaacaggaccaaactagcgaggtttacgtaccaataaatgaaaatgaaactgattccgggtggtacgttgaaaaggttataccaatcccggtacatccaaatcttcaaatcgatcaagaaagtttgcaaagaaagatatctttggtgaaagtcactcaaaaggacatctgcgtacttggtataatagatttatatcgatctgatcatgatgaagacattgaaaatgaagtgatggaaaaaatactaacccaattgactcccctatcactgatgtatttaatcaggtacaacgcgtcatatcctcctgcatcatccgaagaatttatcaataacttgaaaggctttcgaattgaaaaccagatccaagtaggcatgagaataatccttgaattcctacaagaaaaggtacaaatacatgatatgaacgacaaataccaaatcctcataccagataaagacgtggatttgcaccgcgacgaaatcctcatatcagataacaacatgggtctgcatcgcgacgaatttaagctgattgatatgaatgatcaagaaattaacattcaggaatataacaatagtgccattagaaaactaatcgaaagaataaatcgaatgataaagttcttggagaattatgacattcatgataactccttctccagtggtcgagatgttatactccgaaagatatcgatgttaataacgcaactacaaaggggtgggactaatgatatgaattacttattagacaataaggtcaatgaaataagactattggaaatttcgtgtaagcaatgggaaatttcaaacgcattaaaaaaatag

SEQ ID NO: 3188 - DNA, 1998 bp, Saccharomyces pastorianus
atgaactatagttatgaaggctgcttttgggacccgaacgagaatggggtgaacattgttctgagccacatcgcccaaggaatcaagtcgtgtgattcgatgatacactttttcaaacagcgtagtgagctggagaaggattatgcaagacggctgggagccatcactgggaaactagacaaggacatgggaacgaacctggagtatgggaagctgaacgatgcgttcagtgtggtgctcagtgctgagaagtctagggcccaatcgcattccaagcaaagtgaagttcttttcaggcagatttacacggacacgaaggcattcgctgctaacctgcaagcaaggtacactactctaagtggtaagatcgaaaggttacggatggacaagtttagcaaaaagaaaggctgtgaagtgctgcagaagaagttacaggatgcccagatcagggccagagacttacaattgaatgaaaacaacatgattggggccaagagggccgaacacaacaagagagaactgttgaaatgggagtcgaattcccaagaatacaagatccaactggatgtcctgaaacaggaattcaaggcttcgcaaaaattttggatacacgagtgggcacaactatcttgcgaactacaagagatggagaatgccagaatctccttcttgcaatcgaaattacaacagttcgccacttcatccatggaaacgtgcattttagaacaaacaaagatggacatgttaaccacacacctgaattcatttacagctgcagacgatatatcaacgttctcgaaagaaaatgggaccggtagattgaaacataaaaactccaaggacgatatggcttccagtgccaactgggctcaaatgagcaacctgtccacaacaagtaagaagggtgagtcatatatggataatataaggaaactttcgtctcaactaaaggaaacggaaaataaaagaaaactagcttccataagcaaaccgttgccatctccagaagtgacaatggcaagacagttcagaaactccactcctgtcatacgcagtgagagcaaagctgtggcggaccccacactattcttacagtcttcgcctattcgaatacaaagcaccgtggaagaacccacaagaagaagtgagcctgtgatatcaacagcggttgaccatactgagcaattgaaaagggatgacaacacaagaccttctggagatgactgtccaaaggcacaccaaagagatagatcgataacgtcaccatcagaatcaagttcctctaatccaacagattttagtcacatcaaaaagagacaaagtatggaatccatgaccacatcagtgagttccatggctaatagcattgatgactcgcaaaggtttgccaagtcctggaactcaactaataggaagaggaaatcaatgagccatttgcaagtgcccacatacacttcgaggtccgacagtgaagaaagaacgtctagtttcgaaaataatcgtgacggacctgattacaacataacaagagacgccagtgcaagtacgattcttttcaaaccccccgtatcacagagaggaatgtctaagggacatacccatagaaaatccatgatattgcaaggctcaagtaatccgatcgaagatgcattatacgaaatggaaaggatccaaagtagctctaagccgggcgggaaaacaggaaacgttatgaccgaaagaggcatggtaagagataacggcatcactgttacattgcctatcgttactagtgaaggcttcccagttattgaatatgccaaggccatgtatccgttagttggaaacgaggcaccagggctggccaatttccacaaaggcgattacatattaatcactgagatcgttaataaagactggtttaagggtgaggtctacaataatgaccgaattgaaagagatcacagagtagggttgattccttacaacttcatacaactgctacatcagggaccttaa

SEQ ID NO: 3189 - DNA, 480 bp, Saccharomyces pastorianus
atgggtgtttatttaggcgcgctcttttcgttattggtcattgaaatggccatactgtttgttttggtgctgccactgccacagcgtgtgaggaagtggttatacctacgctatcatgctgtaatttccaataagaaatccaggacatatataatggtagtcacgatattggtggggctcttgttcatcgattcgtggaagagagcacagataaaagtttctacgtaccataatccgagaaacccttacgtaacaaatagtgtcaccccggtgaatgcactggctgcaagggcatacaaccaaagaaatgtttacatttcagggttcatcatttatttctttatatgtatactcaccgtgatgagtatactacgcagaatagtagagtggaatgacaaagtgagaagtagagatgtcatcttaaaggcccagctgaagcaaaagcaaaaatacttgaatgatctgaagaagaaaatgtag

SEQ ID NO: 3190 - DNA, 3300 bp, Saccharomyces pastorianus
atgtttggagttagccgtggtgcatttcctagcgcaacgacacagccattcggctcaacagcgtcatcatttggtgctcaacagcagcagcaacaacaaccagctgcaaccacttccacctttgccttgggccagcaggcaaatacatcccaggcccctgcattcggtaattttggtaaccaaacttccaactccccctttggaatgtctggatccacagctgccaattccgctccttttggtcagactcaattgggttcaagcagtaacgctccaggttcgatgtttaccggaatgggcaataacacctcactttctgttggttcggcatccgctgtgcccaattccaacgcaggtacgagtgtcaaaccttttactacgtatgaggagaaagatccaacaacgggcgtgaccaatgtttaccaaagtatcacctgtatgcctgaatacagaaacttctcttttgaagaattgagatttcaagactatcaagctggaagaaagtttggcacggggcaaagtggctctagtactacttttaacaacccacaagctactacaagtacagggtttggaatgatggggaataataatcccagcacttctaccacgggtggactatttggccagaagccggcaaacggcatctatggagctggttcaggcgggggcttcggttccggtgctgctaatactgcaggaatgttcggaagttcaactagccttgcaggtaattcgtcgttcggagcaaacaaaactgccacttctggagggctttttggtggcacggccaatccaacgaataacaacaacagcacaggcctatttggacaacagaatgcaaacgcaaacgcaagtccatttggccaacagaattcatttgtggcaaataatatgaataacgaaggtgcttttggtcaggttagtcgtggcgccttccccccacaacaagcacaacagagcactggtggtctatttggtcaatcaaacaacaccacaaatggcggtgcctttggtcaacaacaaaacgctagtagcggtttgtttggagcaaaacctgcttctagtggcctatttggacaatcaggtaataccaacacgtatggagtaaacaataatacgaatagtgctgtatccggtggcttattcggccagagtaaccagcaacaaggcggaggaggactattcggtcagaataaccaaccccaaaaccagacaggaatgtttggacagcaaaactcgtcaaattcatttggtcaaccacagcaacaacaaggtggcctattcggaagtaagccagcaggcggactattcggacaacaacagggagcatccacttttggggctaacaacactcaaggaaattcttcattcgggcaaagcaaccaacagcagcaaacaacggggggattgttcggacaacagaacaatcaaccacaaccgcaatctggcgggttgtttggacaatctaaccaaggccagaccaacaaccaaccatttggccaaaacggtttacaacaaccacaacaaagctctagtcttttcggtgcaaaacccactggtttaggtactacaggattattttctaacagcgcagcaaaccaaaatggtggcctggctggaaataattttcaacagtcatcaggaggtctattccaaaacaaacaaccggcctcaggaggcctgtttggcgcgaaaccagcaggctctgtcggaggcggattgtttggaaatagtcaaagtgccaatcaaaacaataccgctccaacagggtctctgttcggcaacaagcctgctacaaactctctattcggtggtgcaaataccacagccccaagtgccacttcaggcggattatttggacagaataatgcctctagtacagccgctacttcaaattctaccggcttgtttggaaataaaccagccggcgttggagcatctacacttggtggaggactgtttggaaacaataacagttcatcaatgaacaacgccattggttcaacaggtttgtttggtaacaacaattcatctcaacctacgaatggtgggggtctatttcaaaacagcaccggcacgaatatttcaggtggaggattgttttctcaatcttctcagccaaccacgcaaccgcaaaacatgctccaacagcaacaacagcagcgacttcaacaacagaatagtaatccatatggtaccaatgaactattttctaaggccactgtcgctaacatagtatctggcccaattcaaccaaatgctacaaagatcaaagctgatgagcgcaaaaaagcaagtttgtctagcgcttatagaatggtgcccaaaacattatttgcaactaaactgaactcgaataatgttgtaattgataaaaccaagactaatgccgatgcaaaattttatatttcacttggtaaaaagaataaccaaactacaatttccaaccaacaagaagaaactttagacgaaagcatctcgaaggctaatttattattcaaccccgataaaagatcatttaagaacctgatcaacaataaaaagttgctaacggcaactgaggaaaagaaaaaaggactatcgagcagcagcagcagtaaaaatagtaacagcgaacagagaatgataccagcaatgctacaggtagatgaaaaacaaactacgagcagcggtaacccctcaactctgccttcaaaatccatagaagatcaaaacagtaccaagagtcaactaaggagtattgatgaagaaaataaggagaatattattaattcaaaaaccaaaaaatattcagaagacaataaaaaggtaattgacgttggagttactgagaaggatgcttccttcataaatgaagattattatatctccccatccatagacactctttcctcttactctttgctacaattacgcaaggtcccacatttagtagtaggccatgagaactatggtaaaatagagtttcttgaacctgttgaccttactgaagtgcctctaacttcattaggaggaatcattatcactttcgagcctaaatcctgtataatatatgcgaactcatcaagcagaccgaagagaggcgaaggtattaacgttcgagctaaaattacctgcttcaattgttatcctgtagataaatctacaaggaaacctataaaggatccaaagcatcaattggtcaagaggcatattgaacgcttgaagaggaatccaaactctaaattcgaaagttatgatgccactagtggtacatacgtattcattgtaaaccatgctgcggaatacatgttttga

SEQ ID NO: 3191 - DNA, 2412 bp, Saccharomyces pastorianus
atggtaaagaacaataagatttccgagacgaagatctccaagaagagagcagccaatgaagaatccgatgttgagcaggatgaggacaacttcttatccgtcgatggattaattgatgccgagacaagcgagagtgacgaagagtatgaatccgctgtcgaagagaaggagtcgtcttctgatgaagaagccagtggagatgccgatgatgattcggacgctgaattaaacaaattgctagccgaagaagaaggcgaagaagaagagggttatgacagctctgaattttctgacgacacaacttccttaactgacaaattatccggcgtaaagttacataccattgctgatccaaatatctactcaaaatacgtagatggtagagacagagtcatcaaaccagagattaatcccgtttacgacagtgatgacagtgacggtgaaacgcaaaatactattggtaacattccactgtctgcttacgatgaaatgccacacattggttacgatatcaatggtaaaagaattatgagacctgccaagggttccgctttagaccaactgttagaatctatagaattacctgaaggttggaccgggttgttggacaaaaattccggatccagtttgaatctaaccaaagaggaattggaactcatttctaaaattcaaaggaatgaacaaactgacgatagtataaacccatatgaacctttgatcgattggttcactagacacgaagaggttatgccgttgaccgctgttccagaacctaagagaagattcgtcccatccaagaatgaagctaagagggttatgaagatagttagagctatcagagaaggtcgtattattcctccaaagaaattaaaagaattgaaagaacaggaaaagactgaaaactaccaattcgatttgtggggtgattctactgaaactgatgatcatgtgatgcatttaagagccccaaaagtacccccaccaactaatgaagaaagttataacccacccgaagagtatcttttgtcaccaaaagaaaaagaagcttgggaaaataccgaatacagtgaaagagaaagaaattttctacctcaaaagtatgctgccctaagaaaagttcctggttacggtgaatccgtcagagaaagatttgaaagatctttggatttgtatctagctcctcgtgtccgtaagaacaaattgaacatcgatccagattctttgattccagaacttccctctccaaaggatttgagacctttccctatccgttgctccacaatatacgctgggcacaagcgtaaagtacgtacactatccattgatccatctgggttatggctagcaacaggttctgatgatggtacggtcagagtatgggaaattttaaccggtagggaagtttacaaaacgactctggtcgatagtgaagaaaacccagatgaccatattgaatgtattgaatggaaccctgacgctaataacggtattcttgccgttgctgttggtgaaaatattcatctaatagtaccaccaatatttggttacgatattgaaaataatggtaaaactaaaattgaagatggtttcggttacgacacttttggtactgttaaaaagtccaacctagaagtaaacggagatgacgatgataacgaagaaggtaaaaatgatacttccaagaatgctgtgaaaaagcaagtagcccaatggaacaaaccttctcaagagcagctggaaaaagatatctgtatcaccattacctgtaagaaaactgtcaagaaactttcatggcatagaaagggtgactattttgtcactgtccaacctgactctggtaatacttccgttttgattcatcaagtctccaagcatttgactcaatcgcccttcagaaaatctaagggtatcattatggatgccaagttccatcctttcaaacctcaactatttgtctgttctcaaagatacgtcaggatttatgatctatctcaacaggtgttggtcaagaaattgttgcctggtgcccgttggttatccaagattgatattcatccaagaggtgacaacttaattgcgtcatccttcgataagagagtgttatggcacgatttggatttggctagtacaccatacaagacactaagataccatgataaggccgtcagaagtgtgaacttccacaaaaaactgcctctattcagttccgccgctgacgatggtactatacatatttttcatgccactgtttatgatgacatgatgaaaaatccaatgattgttccattgaaaaaattaaccggccataaagtaatcaacagtcttggtgttcttgatgctatctggcatccaagagaagcttggttgttctctgctggtgctgataatacagctcgtttgtggaccacttag

SEQ ID NO: 3192 - DNA, 1506 bp, Saccharomyces pastorianus
atgcgccacatctttttgttagtagtttgcattagatttgtttcaagttccgaaatagggaaaatcaataatcaactacaggaaagactggtatacgcagacaatttggttgcgacaaacgttttagagtccaaattcccatttttaaaatctacatgtgtcaaagatgcgctaaaaaggtatttaccacaatgcatggcaaacggatttgagtccattgatacagaaactagagtagaaacggccataaaactttccatatgcgagtttcaggcatctggccttggtgaagtgcctgccaattgcatggtcggcaatctagattcaatgatggattgtatgttcgaactggaatcatcttcacagtggtggacgacctatagtggaaattaccagcggctgtcaagtatctgttacgaaaacgttcttccgtttgaaaaggaacaaatcttaaaattgtttttgaatatcactgaactatatgactcattcggagatgatatcaatattaaattacatgatttgatgtttcaaatggagcgagaatctgaaaatcatttaaacgatttggctacgatgttccatgattatgacagtgaactgcgaaatatgacagacaagaatcgaataatcctagaaaatgacctccatctttttagaaacaaagtcagtgatatcttttatgatacttcagaacaattagaagttcaaattacagaaaaaaacgaccagctgttgaatgaagttagtactatccatcatatcatgagcgatctagtagatgagctgaataaaaacgatatcaaactgaagattaaagatttgaaagacgaaaacataaataatttacaagacctggtggaaatgtcacacgatatgagacaatactattctagaaataacgagctggttaatactgagttagagaattttttgatgggtttaaagacgcaattgggcggcatgtcgagagatctttctgaatcacaaatggaagctatagacctattgcaaggatttaactccatccttcatgattcattgttaccttccatgacgaacgaaatagtacccgagatgataaactttaaaaacagtgtactgcaagaatggacagtaataacgtctacgctgaacgaagattttgccctttggaatgaagagatcttcggcactttcaatgaaatatcggaaaagctaaatggaacaaaagagaaattggatgatattgatgtcaggatctcgcatattcataagaatattatagcactaatgaagatctttgatgtagtatggaaagctgggagaacagctatgaagtacggatgcgcttcgcttaaaaacaaatacagctggttagtgtgctgtgccgtttggagttggtcaagatattccgtatcatggactaacatcaagaagttcccccccaagcgtttttaccaatggggggccgtgctcctatcgatttacctaggagccaggaccggatcattaataagtttttga

SEQ ID NO: 3193 - DNA, 552 bp, Saccharomyces pastorianus
atgaacacttacagtctactgaccaggtccttccaccaatctacaaagcctctcttcaacttgaccagcaccttgttgaaagcctccaagagaacgcaaattagaaatgagttaataaaacaggggcccaagaggcctacctctgcttatttcttgtatttgcaagactacaggggccaattagccaaggaaaacccaaccttgcgccctgccgaactaagcaagatcgccggtgaaaaatggcaaactttggaggcaagtttaaaagataagtacataacccaaagaaagcaattgttttctgaataccaaaaggccaagaagatcttcaacgataaactgcccccaaagaaacctgctggtcccttcatcaaatacgctaacgacgtccgtactgaagtccttagccaacaccctgagacttctcaactggacttgatgaaaattatcggagataaatggcaaaatttggatcaaggtaccaaagataaatatactcaagaatataaaaaagctcttcaggagtataacgctagcttcccgctcgaatga

SEQ ID NO: 3194 - DNA, 3837 bp, Saccharomyces pastorianus
atggtaaaaggagccgtgagtaagctgaagttcaagtcacctataatatccacttcggagcatctgatatcaacaaatgaacttctagatcgtttgaaggctctacacgaagaactggctgctttggatcaggataatgccgacttaactggactggacaaatatcgagacgccttggtcaatagaaaacttctaaaacataaagatgtggggattcgtgcctttactgcctgctgcctgagcgatattctaagactatatgctccagatgcgccttatacggatgctcaactaacagacattttcaaattggtgctctcccaattcgaacaactgggtgaccaagaaaatggctatcatattcaacaaacttatctaattaccaagctactagaatatagatcaattgtattaatagccgacttgcccagttcaagtaatttattaatcgaacttttccaaatattttacgattctaataggtgtttcccttcaaggctttacaacgttattggcggtattcttggtgaagttgtctctgaatttgattctgttccactagaggtattgaaattgattttcaataaatttctaacctataatccaaacgaaatccccgaaggtttgaacgttcgttccgattgtggctacgaggttagcttaattttatgcgatgcttattccaatagaatgagtagacatctgaccaaatactactccgagattattcatcagggagccagcgataataatgattctagaacactcactgtgatagcaaaactacacaaactggttttaagactttgggaaactgttccagaattaatttctgcaataatcggatttatttatcatgagctatcttcggataacgaactattcagaaaagaagctactaaactaatcggtcaaatacttacctcatattcggatctgaatttcgtttccacacacactgatacgtttaagacttggatttctaaaattgctgatattagtcctgaagttagggtccagtggacagaatcaattcccaatattttaactacaagagatgatatatccaaggaactcaatcaggctttggcaaaaacatttatcgattctgatcctcgtgtgcgtagggcttccgttatgatctttaacaaggtccctactattgaaatatggaaaagcattaccaataaagccatttatacatcattgctacatttagcccgagaaaaacataaagaagttagagatttgtgtataaacactatggccaagttttattcaagctcattgaacgaagtcgaaagaacttatcaaaataaagaaatctgggaaataatcgataccataccatccaccttatataatctttattacatcaatgattcgaacattaatgaacaagttgataatgtaatttttgagtatctactgccctttgagtcagataaccataaaagagtccatagaatattaacggtattatcgcattttgataagaaagcatttacttcgttttatgcatttaatgcaagacaaatcaaagtgtcatttgccatgtccaaatacattgaattcagcgaatatttgaacgatcaagagaatgcaaactcatctcaaggaccattgatattgagcaaatacaaccaaactatccaatggctagcgtctggtctgcctgattctataaaggccattgattctctagaaactataaaacaatttaatgataagaggattttctatttgataaacacctgtatcactaacgatattccatttgccactttaaaaaactgttttaatgaattaattaataaattacaaacacccggattattcaagaaatataatatatctaccggggcttctataatgccgcgcgatattgccaaggtgattcaaattttgctgtttagagcttcaccaataatctacaacgtgtctaatataagcgtcttgttgaagcttcccaataattcctatccaaagcatttaaatttaaagaggaaaattttggatgatatttcaaaagtcaatcctaccttattcaaagatcaaatcaggacgttgaagacaattatcaataatttggatgatacagatgcggaaaaacatgataccttgacactagaagaagccctaaagacgttatacaaaacttccaaaaccctaaaggatcaggtcgactttgaagatacgttttttttcactaaactatacgactttgccgttgaaggtgaaccagaaattgctaaatactctacaaaactaattgctctatcaccgaaagcggaagaaacgctaaagagaataaaaactcggatcctgcctttagatttgaaaaaggacaaacatttcacatctcatattatagtccttatggaagctttcaaaagcttcccccatattttaaatgatgattcaactgatatcatatcatacttaatcaaagaagttttattgtcaaatcaagtcgtgggtgattcgaagaaggaagtcgattggatagaagattctttattagatgaatcgaaatattctgcaattggtaacaaagtttttactttaaaactgtttactaacaagctgagatcaattgcacctgatgttcttcgagatgaattagcagaaagttttactgagaaaactatgaagttgttcttttatttaattgcaagtggtggtgaattaatatctgaatttaataaagaattctatcccactccaagtaattatcaaacgaaattgagatgtgtggcaggaatccaagttctaaaattagccaaaatttccaacttaaataactttattaaaccttcagaaattattaagcttgtgaatttagtggaagatgaatcattgccagtaaggaaggcatttttagagcaattgaaggattatgttgctaatgaactaatttcaattaagtttctacccttaattttctttactgcatatgaaccagatatagaattaaaaacaacaacaaagatatggataaattttacgtttggcctaaaatcatttagaaaaggaacaatttttgaaagagtactgccaagattaatacatgcaatttctcatcatcctgatatagtagagggtttaaaattcgaaggtgacgcatatctgaatgctttgacaactgcaattgattatttgctgttttactttgattctatcgctgctcaagagaactttagtttattgtattacttatcagaaagggtaaaaaattatcaagataaactaattgaggacggggaagataatgaagatgacgaggaacaggaacaaaaagcaccaaacaagggcgaatctcgtggtgagaagatgtacataattggggaactctcgcaaatgattctattgactttgaaggaaaaaaggaattggcaacattcagcgtatcctggtaaattaaacttaccatccgatttattcaaaccttttgctaccgttcaggatgcacaattatcatttaaaacatatctaccagagaacttaactgagaaaatacaaaataacataagagccaaaataggacgcatccttcatacatcacaaactcaaagacaaaggttgcagaaaaggctattagcccatgagaacaatgaatcacagaagaaaaagaaaagagttcaccatgtgagaccaaagcatcacgatgatgaaagtgacgaagacgaaaaatcaggcagtgacaatgatagttattcgccttctaacaaaaacgaaaacagaagagtatacgagaatgttgtaaagaagaaattaagagtcagaaaggaaatagattacaaagatgatgaagatgatgatatagaaatggtttag

SEQ ID NO: 3195 - DNA, 2913 bp, Saccharomyces pastorianus
atggtcgccggctctcacactccttatgatttatcaaattctccatctgatgtaaatatccaacctgccacacaattaacctccaccttggttgaggatgacgatgtggatagtcaaatgcttgaggagacccaagtcgccgacacagggttccgctctgcatcagcctctgacaactcgtgcgcatactgtggtatagattctgcgaaatgtgtcatcaaatgtaattcatgtaagaaatggttttgtaacactaagaatggtacaagcagttcccacattatcaaccatttggttctgtctcatcataacgttgtgtcgttgcatccagattcagatttgggggatactgtgttggagtgttataactgtggtcgtaaaaacgtgtttttattgggatttgtctctgccaaaagcgaagccgtcgtggtactgctctgtagaataccttgtgcccaaactaaaaatgcgaattgggacactgaccaatggcagcctttgattgaagacagacagcttttatcatgggttgctgaacaacccactgaagaagaaaaattaaaggctcgtctcataactcctagccaaatatccaaactagaagccaaatggagatccaacaaagacgctacgattaacgatatcgatgccccagaggaacaagaagcaattccacctttgttattgagataccaagacgcttatgaataccaaagatcttacgggcccttgatcaaactagaggctgattacgataagcaactcaaagaatctcaagcgttggaacacatttccgtctcatggtccctagcactaaacaacagacatttggcttccttcactttatctacctttgaatcaaatgaactaaaagtggctattggtgatgagatgatactttggtactctggcatgcaacaccctgactgggaaggtcgtggttacattgttcgtttacctaacagcttccaggatactttcacattagagttaaaaccaagtaagattccaccaccaactcacttgaccactggttttactgccgagtttatctggaaaggtacttcttatgatagaatgcaagatgcattgaaaaaatttgccattgacaagaaatctatttccggatttttgtattataaaatcttaggacatcaagtcgttgatatttctttcgacgttccattacccaaagagttctcaatcgcaaatttcgcccaattaaattcatcccaatcgaatgcagttagtcacgttttgcaacgcccattgtctttgattcaaggccctccaggtacaggtaagactgttacttctgcgacgattgtgtatcacctttccaaaattcataaggatcggatattagtctgtgccccatccaatgtcgctgttgatcatttggccgctaaattgcgtgacttgggtttaaaagttgttagacttactgccaagagtagagaagatgtagaaagttcagtctctaacctagccttacacaatttggttggacgtggagccaaaggtgaattgaaaaatttactgaagctgaaggatgaagtcggtgaattatctgcctctgatacaaaaagatttgtcaaattagtaagaaaaacagaagcggagattctaaataaggcagatgtcgtctgttgtacatgtgttggtgctggcgataaacgtttagataccaaattcagaactgtattaatcgatgaaagtactcaagcctcagagccagaatgtttaatcccaattgtcaagggtgctaaacaagttattttagttggtgatcaccaacaattaggcccagtcatattagaacgtaaggctgcagacgccgggttgaagcagtctcttttcgaaagactgatctctttaggtcacgtgcctatccgtttagaggtgcaataccgtatgaacccttgcttaagtgagtttccaagtaacatgttttatgaaggtagtttacaaaacggtgtcacaattgaacaaaggactgttccaaatagtaaatttccatggcctattcgtggtatcccgatgatgttctgggccaactatggtagagaagaaatctctgctaacggtacctctttcttaaacagaatcgaagcaatgaactgtgaacgtattattacaaaacttttcagagatggtgttaaacctgaacaaatcggtgttattacgccctatgagggtcaaagagcatatattttacaatatatgcaaatgaatggttcattggataaagatttatatataaaagtcgaagtcgcctctgttgatgcattccaaggacgtgaaaaagattatattatcttatcatgtgtccgtgccaatgaacaacaggctatcggtttcttacgcgatcctcgccgtttaaacgtcggactaactcgtgccaaatacgggttagttattcttggaaacccaagatccctagcaaggaatacactatggaaccatttgttgatacatttcagagaaaagggctgtttagtcgaaggtacattagacaacttacaactatgtactgtgcaactagttcgccctcaaccaagaaagactgaacaaccgataaatccccaatttaacatggaatcagagatgggtgacttcccaaaattccaagatttcgacactcagagtatgatgtcatttagtgggcaaatgggtaatttcagtagtgcatttgtcaataattctgagctttcatcttacattaataatgattattggaattttgaaaattttaaaagcgctttttctcaaaagcaaaaccataatgaaatgaacgatggaaatctctaccaggaggaaggcccccgtttggattcgaattttgcaagagaattacaaagagaagaacagaagcatgaactttcaaaagactttagtaatttggggatttaa

SEQ ID NO: 3196 - DNA, 1686 bp, Saccharomyces pastorianus
atggaaccgttagacgagacagcaaatctgcttcccgctcctgaggaagcagaagtcctccccctggagcaaaaatatcacgagtacaatttggccttaccaaagtttcccattctgttttcgttatggctgggtagcttcctgagctccttggatagtactattgtcgcaaatattatgaatagggtggctgaggaattctctgaatccagtaaaaaacaatggattgcgacaagcttcctcctaacgaataccgctttccaaccattgtatggtaaactttccgatataataggtagaaggcctgcgctattaaccgctcagtttttctttggcctgggatgcctgttgacatgttttgccagaaatgttacgggattctcaatagctagagccatatgtggtattggtgcaggtgggttgaatgccataagtagcattgcagttagtgatatatgcacggcaagagaaagaggtgtttatcaaggatatgcaaatattgtttttgggtttggtcaattgttgggtgctccgttgggtggtgtattcattgagactattggatggagagcccttttcggtgttcaagtacccatgataattctgtgctcgatattagcaatcaagaacattaacattaagctatttcatgtgcctcctatgaaggaaaggtatacattaaagaacttatcacgcatagatatatttggttctttaagtttagtggccaccatcagcggcgtgctatttttgtgctctagtcacatgaataagatttacttagcactgtttaccattggcagtttcattgtatttgtacttgttgaacggtattacgcaacagaaagaattttgcccttcgaattattgacttggtcattctgtttaagttcggcggtaacagttatatcttcgtttgttgtatttggtgagattttcaggtcaccaatttatctacaactactccaaaatattagcgttacaaagactggtttgtttttgattttcccctctatatcagttgcggtaggatcattggtaacaggatgggttttgcggaatacgaaaatgaacctagctcactgtgcataccagatcatttttggcggcatggttacgcagttattgggtttgggtttgggttatttgttgctgggacacctgtatcccgactatactgtttacgatatgcttgagtctatcacattcaaatcgcattccatatggtggaaattgatctacgtgtttgcgtcagtgttagtgtcatttggctatgcatgtttattggtggccacattagtaagcattgttttcactgttgaaaaatctcaacaagggactatgaccggtgttttttacttatggaggtccattggtaacgtccttggtgcgtccttgactttagtgtcctatgaaaatagcttgtcgtccatgttatggagctatatgtttgagagagagcgtgacgacggataccatttcactaaaaagcagtactactctctcattaatgattcaagctacttgagaaagcccaatttcccaacggatgtttttatccgaatcttagatgtctacaagaaagcatttttgatttcctatctcccaaatatagcccttgcagtagtgggaattgttttatcactatatttggtaaaacatacgtttaaacgtactagtacttga

SEQ ID NO: 3197 - DNA, 2484 bp, Saccharomyces pastorianus
atgtcaatgctaatacattcttggtcgaggatcgcggtcaagatggctgtaaggcctatttacatccggccctattacggtttgacccaaattaagagtttgcatacccactaccggctaagcaataggctgcaggataataaaagtaacagaaaaggtagaaggagcaacagagacgctgagttcaacagaggaattcccacagacgaagaagtcgaggcgataagaaaagaagtagaaaaatatatcgaggaggccaaaaataatacaataccggctaattggaaagaccaaaaacgcaaaattgacgaaagcatcaaacgtctagaagatgccgtattgaaacaagaatccagccaaaaggaaaaagaggaaaaagaagaagaagacggagggggaaaggaacctctgaaagcaaaaccaagcaaaactagcgaacaagggtatttcgaaggtaataatagcaagaattttccacctcctccacctcctcctaaaccacctctaaatgaccctagtaatccagtctcgaaaaatgtcaatctatttcaaatagggttaactttcttcttactttcatttttattggatcttttgaatagttccgaagaacaaagtgagataacgtggcaagactttagagaaaaactgctgacaaagggttatgttgccaaattaattgtcgttaataaatccatggtgaaagtgatcttaaatgacaatggcaaaaaccaacccgataattacggccgtaattactattatttctcaattggatccattgatagctttgaacacaaacttcagaaagcacaggacgaactagacattgataaggactttcggatccctgtattatacgttcaagaaggcaactgggctaaagctatgttccaaatcttgccaactgttttgatgattgcaggcattatttggttaacaagaagatctgcgcaagctgcaggcggtagtcgtggggggatatttggtttaagtcgttctaaggccaaaaaatttaacactgaaacagacgtcaagatcaaatttaaagacgttgcagggtgcgatgaagccaaggaagagatcatggagttcgttagctttctgaaagaaccttcccgttatgagaaaatgggggccaagattccaagaggtgcaatattatctggtccaccaggtaccggtaaaaccttgcttgcgaaggcaactgcaggtgaggccggcgtcccattctattttgtttccggttcagagtttgttgaaatgtttgtaggtgtcggtgctgcaagggtaagagatttgttcaaaactgcaagagaaaacgctccttcgatcgtgtttattgacgaaattgatgctatcgggaaagctagacaaaaaggtaatttttcaggcgctaatgatgaaagagaaaacacattaaatcaaatgttggtggaaatggatggctttactccagctgatcatgttgttgtcttggctggtactaataggcctgacatccttgataaagctttattaaggcctggcagattcgataggcacattaatattgataagccagaactggaaggcagaaaggctattttcgctgttcatttgcatcacataaagcttgctggagaaattttcgacctgaaaaatagattagcagctctgactcccggattttctggtgctgatattgctaacgtttgtaacgaagccgcattgattgctgcaagaagtgacgaagattcagtgaaactgaaaaattttgaacaagccatcgaaagagtcattggtggagtggaaaggaaatccaagctactgtctcctgaggagaaaaaagtggttgcttatcacgaagctgggcacgctgtatgtggatggtacttgaaatatgcagaccctctcttgaaagtcagcattattccacgtggtcagggtgctctgggttatgcccaatacctgccaggtgatattttcttgttgacggagcaacagctaaaggacagaatgacaatgtctctgggtgggagagtttctgaagaattacacttcccctcagtaactagtggcgcctctgatgatttcaaaaaagtgactagcatggccactgcaatggtcacggagttagggatgagcgacaaaatcggttggatcaattatcaaaagagagatgatagcgatttgacaaagccattttcagacgagacaggtgatattattgactccgaagtgtacagaattattcaggaatgtcatgacaggtgcacaaagttgctcaaggaaaagacggaagatgtagagaagattgcccaacttctgctgaagaaagaagttttgacaagagaagatatgatcaatttacttggtaagcgtcctttcccagaaagaaacgatgcctttgacaaatacttgaacgattacgaaacggaaaaaatcaggaaagatgagcagagaaaccaaaaagacaacgagcttaagccatctacagactga

SEQ ID NO: 3198 - DNA, 1302 bp, Saccharomyces pastorianus
atgtcagattcggataccagtttggcttctgaagttgaacaggagaagcggtcaagatctaccagtaacagacccaattatgcaattgacacagaagatttaaatatcgatgaaaatgatgagagtgaggatgatgattacaaggaagaggacttcaatgaaggaggacatgaggaagaaattagtgatgatgaggaacatataagtaaaagtggaagaagcaagagaaagcgcatagatgaagaggaggatctatccgatgaaaaagacggaactagatctaggagtcgttccacttccaaaagacccctgtttccagggattgatgacattgacgaaagcttaaaccctttaccggtagtcaatgaggaatatgttgtacccgatgatccagaaggcgaaactaagataactgcagatggtgatctgttgggaggtagagaatttttagtgcgtactttcacactaaccgaaaagggcaaccgtaagtttatgctagccacagaaccagctagaatagtgggatttagagattcatatttatttttccaaacccatcctaatctttacaagttcattttaaatcaaactcagaaaaacgacctaatagatcgtggcgtcttaccatattcatatagaaatagacaaattgctctagtcacggctaggggtgtgtttaaagagtttggtgccaaaattattcgcggaggtaaaaatataaccgatgattactatgcttccgaattaaggactaaggggaatgtaattgaagggacgcttgttggcgatcccgttgaaaaatctgctagagacctagagactatattgtatccggttttagaaaatggtataaatccggcaaaaaaccaagtggaattttttgaacacagacctcatggacatatgagtaattctaatattattgcgtcaggtagtaagttgagttcgacaaattggttatatcagcattctgcagcctgtagtaggtttaacagtgatctgttttatgatagagtgaaggttctccttgtagatcaacaaggtctaagagacgcatatacaaatacgttacatataccagaatccacacaatcgactactattctagggtggaagagatcgaagaacgttaacgctggcgacaccagcattacatatgaaaccatcatacacgatagtgatttgaataggcccaagaccggactatcggggattccaaaggagatctatgaagatgttgttgacgaagacgtactgaaggctatcggtgaacaacaggatttcgaaaagtccaataaataa

SEQ ID NO: 3199 - DNA, 1836 bp, Saccharomyces pastorianus
atgaaaagattctttctaccgtctttccctgttcgaagaatatatagaattaatatacccaccggtataatctttaagcaaaggcctttagttcttcagagtcgtggcgcaataagtcactattcaacacaaaggcataacgacaaagccaaggaaagtgatgaaagctactccgctacttccacccctctagaaacaccttggtatctaaaaattgttagtgatgaaaaagcatcgatagaaagtaaaaaaaatgcagacgatccagcccaaaagacggtcgaaataccagatgactccccacactcactaaaacaaattacagattttttatccagtaaactaggtttgactgattttctggtttttgatttacgaaacaatgacccaaatcatatctctgccgttaataaattgggaaacttcatgctcatatgcacagcaagatctaccaaacattgtcataagagtttcttagaactgaacaagtttttaaagcgggaattatctagtaatgcttacgttgaagggaactttaatgaacgacaagaaagcagaaggaaaagaaggctggcaaggaaatcaaacctgagtaaattgtggggtagaagctccgaaggctccccaaaagatgtaaatagtgaggcgtggtatatgattgactgccacgttgacggtgtcttcgtcaacattctgacacagaaaagacgtgatgaactaaacttggaagagttatatgcacctgaagacgagaaatgcaagtttcgaaaaaaagaacaaaatgacgtttcctttaactcgaggaaggacgaaagtttagaagacaacaatatactttcaggattgagaaggctagcccagcaaagaagaggttattcaacttgtagttcaagcgaatggcatgacttacggaaatccctacagaagcaagatttccaagaggccactaagataatcagcggcattcgtgccaacgaaaagcataacatacgcattttattgttcgttaaagattgttttaaagatgccttagcccaagagagggatgtagatgttactcaatggaaatcactatttgatgttcattccactttgccaaccgtaaatcaagcggccttatactggccaatacggttgaattttgccatacttttaaacaaagcaaatccacaaatttattctgatcgtgtatttctcaaagactatctacttctgaagaaatcactagggcaggaattaactaggaacgatcttattgcccttttaaaaatagttttaaaaaccaagcattcgaatcactcatattttaatcttgtaaagcagaatagggtgctaatgagtgggttggccttatttaaaggagtaaaatcagagacagatacttctgttgtgtatgatgaacaagtagtttctcttcttttggatactatggtaacagatgaacaagtgaaactaagatccttttatgaggcgatagatcacatttgtcagacttatggagacaatttaacaactagcatgattgtttcaatattacaggcgctagctaaaaccaaggattggataaaaatacttcaagtttgggaggctaagatacccgttgccgtgaacggtcgggatacaaggccgtggaatgaatttataaatattcttattcaaagtggcgacagtcatgttatatcaaagatcgtgaatgatggtcatctactgtggataagacgcctcaaggttgaaataactccggaattgcgtaattctattaaggagttattaaagactgctggattggagaattcttcgttagaagaatatttaatccgtgaaacaacgcactaa

SEQ ID NO: 3200 - DNA, 2535 bp, Saccharomyces pastorianus
atgagtatgacaaatatgccggaagttaaaacaagtacaagcaaggtgcgctctgagtttagtaactcctctaatgccaacggatctgaagaggagaggagatcgcatggtagcctagacgatcagtcttctaatgggttagatggttccagttcaaatgaaagtagaagtaaactcaaccttgaatactctgcagatattgaaccattgaagttcagaatgatgaaaacgaacaataccggtgacaagggtaataatgcggacaatggtacagattcctttatgaagctaaaagaacatttacaaagaggcaacactctaacttccaaccttagggctaatgacttttaccctttcaatgctattgacactgaacagtttgaaagctatttgagggagcctaaatatataaaaatgctaaagaggcgaaaaaacctcaaacagtttagaaggttatttctggcccaagaactaacggcatacgagggtgatacggccaccgccaccaccaaatcatcggaacccacttctaaagccatatggactacaaaattcagcctcgacgggaaattcatggccacgggcagtaaagacggtaaaatacgagtgtggaaagttattggctcgccggtggaaagagccgaattggactcaactgcagaatctaacaaagaagcacgagccaagtctatgcgtataaaacaacaggttagttcatttagcagtccaaaggaaaaacaattcctagatgctgctacggagaaatatgaagaaaaggaaaaactgctaaatctgtatgccccagttttccacccaacgccattccggctcttcaaagaacacacacaagatgttctggatttgaattggtccaaaaataattttatattgtcagcttcgatggacagaacggtaaagctctggcacccagacaggaaaagttcattgaagacgtttgttcatcctgattttgttacttgtgtagaatttcaccccacggacgatagattttttattagcggttgcttggatcataaatgtaggttgtggtccatcttggatgatgaggttagcttcgagtatgattgccaagatttaatcacctccgtcacattatccccggaggaggggaaatatacaatattagggacttttaacggatatgttcacattttattgacgaaaggtcttacgccgatttcttcattccatgtagcagatagacaaactcaggagcagaacgcacatgtcatgatcaccgagactgacccaaaagttcgccacggtccacgtgtaacaggtttgcagtcctttagatctcaactggatcattccttccgtttagtagccacatccaatgattccagaataagaatcttcaatttagaacagaggaaacttttagaagtactgaaggggttccacagtggctcctctcaacacaaggcacaattgtctatctggcatggtcagccgatcgttgtgaatagcagcgatgaccattgggtttacggctggaggttaaagtcttcagatagaggagccgaccaagacgaatccaagaagaaatcaaagggattggccaggtctggcagtttgagaagcatatttagtaaatccatgagtagatcgtccagtcagaacgccgaagaaaaaccacaccatttgcttcataataatcacttaaaacttagtaacctacttcccttgccgcaccacaacaatgataattgcatcaaaaatacagattacatttccttccatgctcataaggcacctatcacgtccgtcagcattgcacctccagaaacctcaaaaacattgtccttatctaatgatgttatctgtgaattgtctttagagttttttcagagttcggatagtttcgatgttctgagtctaactaacgatgattcttcaatctcggatacagaatcttctttgccttataactctaaaccaagctcggtgcctaataattcggtggctagcgcaatccctaacgtggttgatgcaattgggaccatactgatcagtaccgataacgtagggaacattcgtgtgtttagagcagatatgccatctgctataagaaagcgtgtgttgctcaaactacaagacttcaatagagaggtcaagaaacggttcaatagctccgattcgctacattcactaagtagaagcttcagttcaagaaccaaatctaacttaccgggccaatcttcgacagccacttacaacattggtgggaaagtctgtccaacaggccgtagctactctaatgtacgtccaaaaagtagtacttcattaaagaccctaggaagcagtctgcagccaaaaacaccaagacaaagcatgtcatctgttttctccaatggacacggacctactaccccgaaaagtgcgatgaatttagcaatacgttgcaatgtttgtaacggttcaagatttgaagcgttttctggtgctaatggtcagcaagatagaaactactattgtgtagattgcgggacagtggtcaacaacttcagataa

SEQ ID NO: 3201 - DNA, 2037 bp, Saccharomyces pastorianus
atgcatacgtggcgaatacctaaattcaaattggggaaatccaaagatgagagtgaaaacaatgtagatgaaaacaacgacaaatcgtggggtaatggtttatttcatttccatttgggggaaaagcatcacgacagtagttccatcagcaacgataatcaacaggaacacaacataagaaagactagtacaaatgaaacattgccaagtactttaaattctccaaagtttcgtgataatgcgtcctttaagaacttgtcgggagcagaaaccgtcaattcagcggctctagaaagtaaatcttgtcaatctaccgtagaaaaaaaagcatcacattcgggatctgggctgatgacagtgaaaatatattccggtaaggattttgctcttcccttcccaatcacttctaatgctgctattttgcaaaaattattgagctccggagtcttgagttcatcacctaatgacgactcggaagtagcggccatgatacaggaattgcctcgatacgaaacagtagagcaaggttcaatgggtgaaagtttgataaaggggacttgtgctaccaagtttataccttcaactatattgttaccaggatcagaaaatccaagcccactgctttattttacgcttgagtttgataattccattactactatcggacctgatatgggcacgatggaacaccctatatttaataaaatttccacatttgatataacaagaaagctgcaatttttgaaaatagacgtctttgccagaataccatctttacttttaccatccaaaaactggcagcaggagatcaatgaacaagacgaagcgttaagtgatattttgaagaagataaacacgaaccaggatattcttttggattccttccatttgccgttgaatttagaagttcattctgtacctcaagtaagactctataaccatcattggatttcgttggagaggggttttggtaaattgaatataaccgtagactaccagccttccaaaaacaacccactttctattgacgatttcgatctcttgaaagttattgggagaggttcatttggtaaagtgatgcaagtcaggaaaaaggatacgcagaagatatatgctttgaaggcattgagaaaggcatacattgtatcgaaatgtgaagtaacgcatacgcttgcagaaagaacagtcttggcaagagtagagtgcccctttattgttcctttgaagttttcgttccaatctccagagaaactgtatctagtgctagcattcattaatggtggcgaactattctaccacttacagcacgaaggacaatttagtctagctcgctcccgattctacattgcggaacttctgtgtgccctagattcattacataaacttgacgttatttatcgtgatttgaagccggaaaatatcctactggattaccagggtcatatcgcattgtgtgacttcggactttgtaaactgaatatgaaggataatgacaaaacggacactttctgtggtactccggaatatttagcgccggagattttattgggacagggctataacaaaacagtagattggtggacattgggcatattgttatacgagatgatgacgggattaccaccatactatgacgaaaacgttcccgtaatgtacaaaaaaatactacaacagccattacttttccctgacggattcgaccccgtagctaaagatctattaatcggtctcttgagcagggatcctaacagaagattaggcgtcaacggcaccagtgaaattcgcaatcaccctttcttcaaagacatttcctggaaaaaactactgatgaagggctacattccgccatacaagccgcacgtcaagagcgaaatagacacggcaaatttcgaccaagaatttaccagtgagaacccgatcgacagtgtagtggacgaatacttgagcgctagcattcaaaagcagtttggcggatggacgtatataggtgacgaacaattgggagactcgatttcacaacggaaaagctttcgttaa

SEQ ID NO: 3202 - DNA, 1605 bp, Saccharomyces pastorianus
atgtccaacactgattgcaaaattttgcgttacacggacctatctgaaatagatcaaaaaatccaagcctccaaggattgcttcttcgacaaacaactaaaactgtcccatgaaagtgacccaagaaagaaagatctacagtttaggcagctccaattgaaaaagctctattatgccgtgaaagaccacgaagaggaactgattgatgccatgtatcaagactttcaccggactaagctagaatcggttgcaaatgaaacaacaaaacttttgaacgatatacttcatctaatagaaattttgcctaaaatgatgaagcccagaaaggtgtctgactgttcgcctccattcatgttcggcaaaataattgtggaaaagatctcgaggggtagtgtcttggttattgctccatttaatttccctgtacttttagcgttatctcccttagctgctgctctttctgcaggtaatgccatcgttttgaaacccagtgaattaacaccacgcactgccattaccatggaaaaattgttaacaactgcaggttttccacgcggattaattgaggtagttcagggtggtaaagacgaaactacgaggttgctagattgtggaaaatttgacatgatcttttatacaggttctccccgtgtcggttcaatagtcgctgaaaaagctggaaaaagcttaactccttgtgtactcgaattgggcggtaaatcaccgacctttattaccgaaaatttcaaagccagtaacataaagactgctataaagaggattttctgcggtgcctttggaaattctgggcaaatttgcgtttccccagattatttgttagttcacaaatctatgtatctagaagtcgttaaggagtgcgagtctgtattgaatgaattctatccagatttcagtactgagacagatttcactcgcatgattcacaaagacgcttatgaaaatactatggagaaattgaactcaacaagaggaaccaagatttcaccagtgaaaagttctattggctcagatgccgcaagcttacatgttgtaccacctactgtagtttacgacattgattggaatgaccctttgatgaaacaggaaaattttgcacctgttctacctattatcgagtacgacaatcttgatgagacaattaacgagatattgaaaaagcatgacactccattagttcaatacatattctctgataatcaaacggaaatcaaccatatcttgacacgcttgaggtctggtggttgtgttatcggtgataccgtagttcatgtagctattactgacgctccgtttggtggaataggtaattccggttatggtaagtatggtggatttcatggatttgatgcttttagccacgaaagaacaatttttaaccagccatattggaatgactttactctctctatgagatatcctccaaacaatgaaagaaaagagaaattacttcgttttgccttggaaagaaaaccttggtttgatagaaatggtgacaacaaatgggggcttcgccaatatctctctctgtcagccctagtagtgctaattagtggcatttgcgcttgctgctcttcactattttga

SEQ ID NO: 3203 - DNA, 1401 bp, Saccharomyces pastorianus
atgcccgctcgagaatataattatgaagaaaattttggtggatatagctcattagatgaggatgattcagacagggactctgaacgtagacatcatgatccaaggcaccaggctgcagcaacaagtccagcaggtgcatcaagacatgctgtgctaaatagatacatggttccaggccgaaacatcaatccccttttcagaccgacaggccccgttcaaccttcagtaacacatacatcagcatcagcatcggcaacagattccacaactagatcagattctggaaggccgaaggagcctcctgaaaccaatttcaacgcatttcttatatcgcagctgaccaggatggaagagcagaattcgaacctaaaggaagaaatctgtttaatgaaaaaggaacaagagctttttttcctagaaaaccaaaaaaaattagaaaagggattcaaagacatcaacaagtatgtcgaggatgtttctgcgttgaaagaggtcttcaaagaggtagtggggattatgaccggggaaagaatacgatttatagatcacactggagaaaatgttactcctcaggaagctgctcgtattggaaatccgtcaactagcacgcaatctcatcaggctcactcaagactaacgaattggcaagaatacagcatgcacgcaagcatactggccggtgatcctcgtgtaaaacctgaaccaggactagctgactttgaagctggagaatacgatgaaggtcaaagtgatggtagcgttaatgatgagggcgttgctctcaataacccgagtatcatttataacaccaacgataacaacagtcaacaggaccatgacattgaaaacgggaatgaaggtaggaacagcgacagaaacgtcggaacgtcttatagactaaatcgtgcaattcaaaatgtcacagatgcagctcgtgaatatttcgaaggcttgcctggacaaccatcagtactttcccttgaaagaaggtacggttccacttggagacgatcagccaaagaaagaactctttttaccaagaggatgaccatcatcaaaagaataatagatataaaagaagatccaagcaaatatggtttgtcattgcctggtaataaaataaataggaaccaagctataaaagtggtagagaatattcgattaggcaataatacattcaagggtcaccattgtcgattatcgatgtctcaattatacgagtatttttccaaaagaatggacaaacttgaagattattcgttgactctaaaaagaagaggtaagccaagaaggatatttttattggaagaaagagaagctagactatcgctacaacaactaaacggagtaccaaataccagtactagtaccccagaaaacgaccatgtcactgaacgctaa

SEQ ID NO: 3204 - DNA, 1284 bp, Saccharomyces pastorianus
atggctatcgagttaggactttcccgtattaccaggctattagagcatttgggcaatcctcaaaagtcactgagagtgttgcacgtagcaggaacgaacggcaaagggtcggtttgtagttatctatcctctatattgcaacagaaaccgtaccaaattggaaaatttaccaccccgcacttggttcatgttactgattccattacgatcaataacaagccgatcccgctggatcaatatcgagatattaggctgcaactagaagctttaaacaatacacactctttgaaatgcacggaattcgaattgctaacgtgtaccgcattcaaatatttttatgatgtcaaatgtcaatggtgtgttatagaagtaggccttggcggtagactggatgcgaccaatgctattcctggttcaaataaagcatgctgtggtatcacaaaaatcggtttagaccatgagagctttttaggaaatacgttggctgaaatttccaaagaaaaggctggtataattacagagggagtgccctttactgtagttgatggaaccaatgataaaagtgtcataagtgtcgtggaagacaagtgtaaagttttggggtcgagactttacgttaccgatcccaaacttaatggaaatatcattgacacgaaggcatggggtgtcttcaacttatctgagctgcccctaaacggagaataccagatcttcaaccttagagtggctataggtatgttggattacttgcagataaacgggcttattgatattagtaaagacgaagtggctgcgagactaacggaagtggactggccaggtaggttacatcgtatggattactgttatgacccattgagtaagaagacattgcccatactaatggatggcgctcataacggctccgcagcaatagaattggccaaatacctaagaaaagaatacggagaccaagctttgacctttgtcatggctgtaaccgccggcaaaaacttagagccactgtgccagcctttgttgcgaccaatagatcgacttatccttacacagtttaataacgtggaaggcatgccctggattcatgccaccgaacctgacgagattaaagattttatcttgactaaaggatatacagagaacgtgacaattgaaggtaatttgcatcaggtactaccttctctggctcttacaacagaggatcaaagacgaccaattgttgtatgcgggtcattgtatttatgtggagaattgttacgtatccataaaaatcattcgaaagagtaa

SEQ ID NO: 3205 - DNA, 1503 bp, Saccharomyces pastorianus
atgcttctacgaaaaatgcatttgtcgcaaaggttaaacaagagacaattatttgccttgaacctttcagcgtggccaacgaaaccttctcatatacgcctcctacatgacataagaccgcaaacatcgaaattcaatgcgcaacagccggactcggtacctgggttcccagctggcacacctcctcgaccaccaataacaccccaatctagccccgccaagaataatcgtggcttgatgtattctttcattggcatttctatggtaggtttgatgctctggtacaaaagtaaatctaagaaacagaagataccgatcttagcgcaaagtgtctggaaagaagccatatggcaagaaagtgacagaatggactataactataatgaatcgttaaggcgatatatcgaaactttggaggcgtgtgatcgctttcatatggatccgttatcggacgattatacaagaatagagctaaagatcgctgaaatgtacgaaaagctaaatatccttgacgaggcacaaagcatatatcaagaattattaggccggtttttcgaagcactgaacgttcctggtaaaattgatgaaagtgagagaggcgaagttttaagaaaagacttgagaattttgatcaaatcgttagaaatcaataaggatatagaaagtggcaagaaaagattgctgcagcatttgctgttagctcaggaagagattctaagcaaatcccctgagctaaaggaattttttgagaaaaggaaaaagaagctctctatgataaaggatatcaatagagaccccaatgacgattttaaaacatatgtcagtgaagaaaacatcaagtttgatgaccaaggttatatgattttggacctggaaaagaatagcagcgcttgggaacccttcaaggaagaatttttcaccgctagagatttatacacagcttactgtttgtcatcaaaggacataactgcagctctaagttgtaagataacaagtgtggaatggatggttatggcagatatgccgccaggacaaatattactgtcgcaagcaaacttggggtcactattctatcttcaggcagaaaagctggaagctgatttaaatcatctagaacaaaagagaaagacagagcctgatcaggaattagatatgggaacatacatcaaagccttgcgatttgtacgcaaaaatcgggacttgtgtttagagagagcacataaatgttacgatagcgtcattagctttgctaaaagaaacaggaagattagattccacgtcaaggaccaactcgatccgtcggtcgcgcaatcaattgctttatctacctacggaatgggcgttttgagtttacatgaaggtgttttggctaaggcagaaaaactgtttaaagattcaatcacgatggccaaagaaactgattttaatgaactcttggctgaagcggaaagagagttacaaaagacaagcgtattgaaagcggccaagaaagaagaatcttaa

SEQ ID NO: 3206 - DNA, 1008 bp, Saccharomyces pastorianus
atgaaagaaaataagcttggcggagacaaaccgattcaactgacttcctggtcggaaaaaatggtgtcttcggaaaacagtggcagtgatgtacaggtcgttattcagaaagcttcgaagctaatccaacacttgaataatatcgggttgatgagtccaagagaagacgagcattcacagtctgcgtcttcgcaagagacactaagtattgataatgagcctcgtgaacaagacgattcgggtcttcttcaagcaaacaaaaatggcttaaaaaaaggagtcgacgtacattctggattagaggattccacgtatgttgaggaaaacatgttgaacgttttacagtcattagtttcgcacataaatcaagctatcaaccaaatacaacaattaaagttcaaaaatatgattcttgcttcgaatgagaataacctgcaatcaaggcatgaagtggaagataatcttcagaaacaacaatttgaaagaatgaagtgccaattcctattagaacataaaagcctgaaagatcaattacgaaagcgagacaataaaattgtcaaatacaaacagaaaatcattgagaaaaacaagaagctaaacaacctagctaaggtcctcaatcaacatgctatatcagacacatcgcaaatagatagttttagtagctcgataaagaaaacgccctcagtcacaaccacgccacaagaaatgaaaccggatatgttaaacactttaggaatattggccacacatgtcttgaaagacgaaatcgatgatgattctggaaatcaaacgattttacaactagcagcaggaagtataagtaatgattgtaacactacggaattggaaattacgtgcagccctgaggcgaggaaaactatcgtacacaatcggccaagtattaaagttgggctggttcaggattctcatgaaaataagactcttcgattgcctaagatgaaaagtttcagtaccattgatggtactataaaggatattaactga

SEQ ID NO: 3207 - DNA, 723 bp, Saccharomyces pastorianus
atgtctcacaaatcaacaattttaccatgcttgattaaattcatgcctatttccccactgcccctatccaaggatgatccttgttttaatgtctatgccttcgatttggatcatacgatcataaagccaaaatcgccaaattcaaagttcagcagaaatgcagatgattggcagtttatgagttttaattccaaaaaatcaaccctggactatctttttgacattattgaaaaagacccgatagctattatagtcgtattctcaaaccaaggtggtgtcgttgcggtcccaagaacctccaaaagttgtactaaatataccaataaaatttcactcgtgttaaaagctattaaatgcgacaaaaggggagattcactgttaagtagactgtggttatatgcggcacccaaaaggtcaaaggctctggtaacaaataagaataagtttacatttccaaggacaagtaaaaatgatatcgatgatcccaaaatttatgaaaaggttcgaaaaccaatgacaggaatggcagatttctttgaaagagatatacataatgcttacggagtttcagaatcaccgccaattactactaggctgaattggatatactactgtggtgatgccgccggtaggaaaaaagacttcagtgattcagataaaaagtttgctgagaatttaaacgtcgtatttaagtaccctgaagaagtgtttcaaggatgttga

SEQ ID NO: 3208 - DNA, 678 bp, Saccharomyces pastorianus
atgtctttcactgaggatcaagaaaaaattgcactagaaatattgtcaaaggacaagcatgagttttatcaaattttgagagtggataagaaggctacagatggcgaaattaaaaaggcatacagaaaattagccataaaactacatcctgacaagaatcctcatcctaaggcgagtgaagcattcaaaattattaatagagcgtttgaagtgctaagtaatgaggagaaacgtagtctttacgacaggataggaagagaccctgacgatagacaaatgccatcttctagaggcgccgcttcaggatttcagggaaacgctggtggttctccaatgggtggcggatttgaagacatgtttttcaattcacgtttcggtggccaaagagctggcccaccggaagacatatttgactttttgttcaacggaggtggcagtcccttcggtggttctccatttgggccttctgcttctactttttcatttggtggtccaggtggtttcagagtttatactaataatcgtggaggctcgccgttcatgcgccaacaacctcgctcaagacaacgtcaacagcaaacagaagaaaatgcggctaattcacagctgaagaatctgcttgttctttttattatcttcatcgttctccctatgattaaagattatttgtttggttga

SEQ ID NO: 3209 - DNA, 1548 bp, Saccharomyces pastorianus
atgctaagagtttgcgtgggaaggtcatgtgtaagagtcactcttccaagagtgtgtccagtgctgctgacaagaaaagcgatgattcatctaagcgccgggctaaatgtagagaccagtagtatagacaaaagtaactcaactaaaatacacgtcgatgtaaatgagctacaaaaacaagcagagattgaaaaagctgcaataaaggaattagaaaaaaatccccattaccaaaacctggccgaggcattcaatagccatgatcacgttcatttaagagaatcagagacagaacagaacgactctgtttcaatgggttcgatacgagactacaaaagcaaccataaagtggaacatgcatatgagccttcgccttcgccttcacatttgcattcacattcacattcccatggacatacacattcccatgctacgcataatccattattggtactcagcacagagcaaattagaaaaaacgcaggtgtaaggatcacatgggttggcttaggtgtaaacgttggtatcgctatagggaaatttctcggtggtattgtattccattcacaagcattgttcgcagacgctatccatgcaataagtgacatggtttctgatttattgactctactttcagtaggactagcagccaacaaaccaacctccgactatccatacgggtatgggaaaattgagaccgtaggttccttggcagtgtcgacaatattggccatggctggcatatcaattggttggagttctctgtgcgcgcttgttggacccgtaattccgcataccattattgaggccttaggaagcatgggtcatgcgcatacctattccgaagacattattgaagacgttactgatatcaacgctgcctggattgccgccgcctccattgcagctaaagaatggatattcagagccacaaggaaaattgccatcgatactaattcaaacgtacttatggcaaatgcctggcatcatcgtgttgattcattgacttctcttgttgctctggtggcaatcagcactggatatttagtcaatatacaatcattagacacaattggtggtttgattgtctcaggtttgattatcaaagctggtggtgagggtatgtgtattgcaatgaaggagttgattgatcaatcaatctcccatgatgatccacgttatttagagatagagacattagtcaaagacacgctgggcaaactgatctctaacaataattccaagaagccctacgggatgaaagaactgacattattatcctcggggcccaatctacgtggtcatttaactttggaagttcctttgcaaagatggggaaatactttaggtattaatgagtttgaaattgtatctcatcatttacgcgatgtattaactagtgatatatcaaatctaagaaggctagatattgaatacgtggaggaaaaggaaagtgaaggaaacgaagaaagcaagcaagttacaaaatcacaggattacagagaaatcattcttcccgaacataaccatgggcacactcatagttga

SEQ ID NO: 3210 - DNA, 825 bp, Saccharomyces pastorianus
atggctaaagtaaccgcggcttgtataattattggtgatgaagtgctgaacggaaaggttgttgatacaaactccacttttttcgctaaattctgctttgaccatggaatccaattgaaggagatagtaactataggtgacgatgaagctcaaattgtagatactgtgagaaggttagtcaactgtcatgactttattattagtacaggtggaattggccctactcatgatgatatcacttatgagtgcatggctagaagtttcaatctgccttgtgagttagatgaagaatgtaaagaacgaatgaggcgaaagtccgaccccgaagcaagattagatgctgatgctttgaaggcacattatcaaatggctaccatgccgaaggggcccaacgttcgaaactattatgtatgtgatgatttatgggtccccatctgttccatttcacacaaagtttacatactgcctggtatcccacaattgttttcaaaaatgcttaagggttttacgcccacgttgaagaaaatttataatctggaagaagatccacgtgaatatgtgcgttactttgttaaaacacggctaaccgagtcacaaatatctaaagagctaaaactgattcaagatgaatcaacggaagtctcggatgcaatcaaaatcggttcatacccgcattttggcatgggtttcaacacagttagtattttaggtgaaaagaaagacgatgcatacttaaagacagttgttagtagagttgtaaagaacctcgcgggggaagagatctctcctgaactagaggacaaattttccaatcaagagaggtga

SEQ ID NO: 3211 - DNA, 636 bp, Saccharomyces pastorianus
atgcgaggaaaacagccgaaaaggaagaaagaaaccacttctgccaatagaaactatagatgcatgggataccccgattgcaacatgagtttcaacagagccgagcatctggctaggcacatcagaaaacacacgggggaaaaacctttccaatgtaacatctgccttaaattttttagtagaattgacaacttaagacagcatcaatcttctgttcattcggacattgacctgatgtccctacgtagactgcagcaatcggcaatcaacattgcgaatgaacaaaactccacggcaagaatgttcccgcaactccgcccgtacggcatcgttgtccagcctgctacacatcctcacactattccaatagcgagccccgccagcgcacagaataccattgccctttacacttcaccgtacttcccgcatgccgttccctctgctccgatgacgttaccacaactccccccacccccaatatacggttacatccaaccactgttcctgaaccagctgccaatccagaaccgcaatatcgttgagctacccccagatatgagcgatacctcgacatctccgtcgagggtgcgaggtttcgatcatgtaaacgacgcttcgccagatgcaaagagctaa

SEQ ID NO: 3212 - DNA, 714 bp, Saccharomyces pastorianus
atggcccgtcaaaactttttaggcctggtcgtctcccaaggtaagatgcaaaagacggttaaagtgcgtgtagagacaaaagtgtttaataaaaaaattaataaagaattgttccatagaagagactacttggttcacgatgagggcgggatatcaagggaaggtgacctggtaagaatagaagcgaccagaccactttcaaagaggaagttctttgccattgctgagattatcagaaataaaggtcaacagtttgcgctatatgaatctgaagctcaattaagtgttgctaaggaggaaacacagaaggcaaaagaatttttggacaaaagatcagcaagggagagcaaatcggatgagaaaaccactctattacaagacattaaaataattcaagatgcgttatccaagggatctacgccgaaagagttatcagaaattaaagaaaggtacggtatcaaagagttttccccggaaaccgtaagagagctcctaaagctggatatatctgaactagaggtcaatctggagaaacaaaggggtgtgattgattctattcaatctcaaacgtctgagctattatcggatgatctgaaatgtaatcagtttctaaaagatcacggtgttgacgatcctttatcactaaagaagaatataaagaagaacctgctaagaaagcatgtcatgttggatctacaacaatcaagcctataa

SEQ ID NO: 3213 - DNA, 1758 bp, Saccharomyces pastorianus
atggctcccgtaccaatatatgtgaagggtggtgtatggacgaatgtggaggaccagattttgaaagcagctgtgcaaaaatatgggactcatcagtggagtaaagtagcatcccttttacagaaaaagactgccagacaaagtgaattaagatggaacgagtttttaaacccgaatttaaactttgctgagttttccaagcaggaggatgccaaacttttggaccttgcgagggaattacctaaccagtggaggaccattgctgatatgatgggcaggcctgcgcaagtatgcatcgaaaggtataatcgactcctggaaggtgcagacagtgatttgttgggatccacggacttgaaagtcggggacattaatcccaatgcggagacgcaaatggcccgtccagatattggtgacttagaggatgaggagaaggagatgcttgctgaagcaagggctcgtctgttgaatacacaaggtaagaaggctacgaggaaaatccgtgagcgcatgctcgaagaatcgaaacggattgctgagctgcagaaaagaagagaattgaagcaggctggcataaatgttgccataaagaaaccaaagaggaaatatggcacggacatcgattacaacgaggacatagtgtatgagcagtcccccataccggggatgtacgacacctccaacgaagaccgtcagatagagaagaaatttgagcagtttgaaaggaaggtcaaccggaggggtttgaatgacgatgaaggcaaatctaagaagaagtccaaggacaagaaaagaaaacgcgacgagagcgaatacctcgagaaggcggcacttaacgagtccaatatcttgactgacgagtacaagaaacccaagcttgtactgtctgcgccggggacaaaacaagggaagctgacgtacaagaacgaactggaaagcaaaagacagaaactcatccactcacaggcaacaggtactgtgctggtaccgaaggcacaatcccaccgcgagcctattcaagaagacgatgggaggagcaacataaaaagagaaaagcaggcgagatcccgtataagaaagttcctggtgcaaatgtttgcgtccttacccacaccaaagaacgatttcgagatcgtgttgagcgaggacgaggaagatgaggataaagagttagctgactaccaaaaggaaatggaaagcgagggggatatgaatgaacccaacacggccctagaacaaatgccagaggagcacatacagcccgtgtcactggtcgcggtagcattgtccggcacggcgctgcccataccagaatttaagagcacgccgcactcagcgatcgacgagaagtataatttgctggtggcgaacgccataaataaggagccacacatggaaccacaatctacagccgatttcctgaaccaggtggaatcacgcatgcagcaggtacctctggtacggtcgctccctcaaacacgtcggacgctgacgatgcctccaggtgagaccgtcctggcatcgatccagtccaaagtggagtccatcgaacaactacagcgcaggttagatcgtgtgcagcccctagcgctccagaacaacgagttgtgcgagcgcctctgccaccacgacctgccagccttggctgaggcgcaacgccagtactacaccgactactacgtctaccagcaggaactgcgtaccctcgaggcccgtagcaaacgtctccaggacacgtcggaccgtgtttccgtatag

SEQ ID NO: 3214 - DNA, 672 bp, Saccharomyces pastorianus
atggcgaaaaaatttttgatgctacatgggcttgcccagtctggggcctattttgcctctaagacgaaggggttccgaacagaaatggaaaggttgggttatgaactatactacccaacggcaccaaacgaattccctccagcagatgttcctgattttttaggcgaagtgattgctgatgcgcccactgatggcgacaacaatggagtgcttgcatggctagaggacgatcctgccaccgatggctattttataccacaaacaacaatcgactatctgcatgactacgtgttggagaaaggacccttcgcaggcattgtgggttttagccaaggcgccggtgttgctgggtatttagcaacagactttaatggcttgttggggcttaccgcggaggagcaacctcccctagagttcttcatggctttcagtggcttcagattccggccacaacagtaccaggagcagtacgacaggcatccaatatctgtcccgtctctacatgtacagggtgaactcgacactatcacagagccgataaaagtgcaaggcttgtaccaatcatgctcggaggactctcggactttactaatgcattctggaggccacttcgtgcctaacacgagaggtttcctgaagaaagttggccaatggcttcaggatgtggcctga

SEQ ID NO: 3215 - DNA, 3093 bp, Saccharomyces pastorianus
atgtccttaagctcttggaggcaatttcaactctttgagaatatccctattaaggatcctaattttggcggaaattctctattatactcagatccaaccctttgtgcagctgcaatagtggatcctcaaaccttgatcatagctgtaaactcaaacgttataaaagttgttaaactagaccagtcgcaggtaatacacgcgtttcaagcatttcctcatgagttccaaattactttccttaaagttgttaacggtgaattcttagtcgcattaggtgaatccatcggcaaaccttccttaataagaatatacaagttagacaaattgccgatcaaggaacaggcatatcattcgcaagtggaactgaaaaatggtaataacacataccctatctctgtcgtttccatatccaatgacctttcgtgcataatggtgggattcattaatggaaagatcattcttattaggggtgacatctctagagatagaggatctcaacaaagaattatttatgaggacccgagcaaagaaccagtaacagctctattccttaataacgattcgacggcctgttttgtagctacgacttcaagaattcttttattcaacacaactggtagaaatagaggtcgcccaagtttagttttgaactccaaaaacggattggatttgaactgtggagcctttaattcagctgccgacgaatttatttgctgcttgagcagcttcattgaatttttcagtgctactgggaagaagcatcaatttgcatttgatttatcatcgagaaagaaaatattttgtgtagacaaagaccacattttagttgtcactgaggaaacagccggtccatctacatcaattaatgttaatgaactatctcccacaataataaaccgagtatttatcattgatactaaaaataaaataatttcgctcaattttgttgtttctagtgcaattattgacatcttctctgcagcccaaagtggcaaaaacatcacatatctattgacatctgaaggagtgatgcacagaataactttaaagcctttagaaaatcagattggtattatcattcaaaaagagctctatccgtttgctttgcaactagcgaaacaatattcgctgccatcgttggacgttcaaaaaattcacaaaaaatacggtgattacctattcaaaaagggccttaaaaaggaggcaacggatcaatatatccagtgcttggatgttgtggaaaccagcgaagtcatatcaaaatttggtgtaaaagaagttcccgatccagagagtatgaaaaatttggccgattatctgtggtctttaatcaaaaactctatttctcaatgcgatcacataactttgttgcttattgtcttaataaaactgaaagatgtagaaggaattgaaacattcattcagcattttgatagaaatggcaattggaatgaagagattgtaaaagacgatatggatgatgtaacgtttttttattcggataacgagttttttgatttggatttgatattagaacttctaaaggagtccgatttcaaacgcctttcttatcaacttgcaaagaggtattcaaaggattcattgattatagtggatatcttattgaatttgttaaataatcctctaaaggccataaaatatattaaaagtttacccattgatgaaactcttagatgcctcgtgatatattcgaaaaaattattagaggagtcgcctaatgaaaccaatgctttactaatcaaagtgtttactggtaagtttagaccaacgaattttgaagtagaactagaccgtagagacaccacaagtgatttttctgaaaacatcaggacagtattttacagttacaagacctttttcaattatatgaactctaatggaaaatccgacgtgatgagcgagtcttcagacacatcaaacgaaaatgaagagcctacctaccatccaccaaaaccatccattgttttcagctcatttgtttccaagccttttgaatttgttgtgtttttagaagcctgcttggcatgttaccagcagtatgaggggtttgatgaagatagacaagtcattttaactactctatacgacttgtatttaaatttggcacaagaggatgttcctgaacgtattaatgattggcgttcaagagccactggtgttttaaacgaaagtaacaaattggtgaatttcagtattgcttcgactggaaaaaatgtcgataactcgctaatgttactgatttctcacatggataaaagtagctcttcatcaaaaaacaatactaatgacattaatatagcatcgtgtgctcatgataactccgagatggatttactaagtacatttagggctatgacactaaatgacgaaccaaatacgtgcctaaattttcttcaaagatacggagcggaagaaccgaagatcctacaagtggcgttgaattactttgtttctaataagtatatcttcaaggaaatgggtggtaacgaagcactgaaggaaaatgtcttgagacctattatagaaggagaattgatgtcattgcttgatataattaaagtactttctcgtacaagtgtggctcacttcgggctgatacaagatgtcattattaactatgtaaaaaacgaggacgtagaaattaagagaaatgaaaaattgattgattcttatgacaaggagctaaacgagaaaaaggagaaactaaagagtttgatcaactcagatcaacctatccacgtacccctgaagaaccaaacatgtttcatgtgcaatttgacattagatattcctgttgtctttttcaaatgtggacacacctaccatcaacattgtctcaatgaagaagaagacactttagagggcgaaagaaagctgttcaaatgtcctaaatgcttagtagaattggaaacgtccaacaaactttatgaagctcaacacgaagtaatccagaagaacgatcttttggactttgccttgaacagtgaagaaggaagtaaagaccgcttcaaagttgtaacagaatttttggggagaggtgccatcagctattctgacatcactatcgaatga

SEQ ID NO: 3216 - DNA, 474 bp, Saccharomyces pastorianus
atgaatagtggaggtaagaccgttatgaacaagaactcggcaggctcggtatctgaaactggcgcgggcccagcacaggaagacacccctagagacgtgcgtcttctgcatttactgctagcatcgcagtcgatccatcaatatgaagaccaggtgccgctgcaactgatggactttgcacataggtacacacagggcgtgctcaaggacgccctggtctacaatgattacgccggcagcggcaattctgctggtagcagcctaggtgtggaggacatacggctggccattgctgccaggacccagtaccagttcaagcccacagcacccaaggagctcatgctgcagttggcagccgagaggaacaagaaagccctaccgcaggtcatgggcacatggggtgttaggctgcctccagagaagtactgtctcacagcgaaggagtgggacatcgaggacccgaagtctgcataa

SEQ ID NO: 3217 - DNA, 1041 bp, Saccharomyces pastorianus
atgatgttttgcaaattactgacaccttactcggtgctatcgattttgaatgccggcgtgctcaaggcgacgacagcggcgccatcgcccggcatccaaatgacggaaaatggagacgaaaatcatcatgagcacgtcaagcgtggcggaacatgtgattttccaaactacgacgggatggtcgcagtgcagaaaggcggcagcaatgccgggtgggccataagtcccgaccaagagtgttcgcacgggacatggtgcccctacgcgtgccaaccgggccaactaatgggacagtgggacccatcggccaccacatacgcttatccgaagtgccaaaacggcggactatactgcgattccaacgggaacctgcaaaagcccaacagcggcaacgactactgctatgacgggaaggggaccgtggtggcgaagaacaccgccggcggcggagacgtggcgttttgccagaccgtgctgcccggcaacgaagccatgctgatcccgacgctggtcgggtccggctcacagcagacgctggccgtgcccgggacggactactgggcctccaccgcatcgcactactacataaacgcgcccggcgtgagcgtggcggacgggtgccagtgggggagctcttccagcccgcagggcaactgggctccgtacgtggcgggcgccaatatggacgagaaccaaaacacgttcgtcaagatcgggtggaacccggtgtacctggagtcgtcgtgccccttcaaggacgtgaagccgtcgttcggaatcaagattacgtgcgacgacgagtcgcagtgcgaggggctgccctgctcgattgacccgagctctaacggcgtcaacgaggtgtcgagctctggcggcggtaacttctgtgtcgtgacggccaagaacggcgccaaggccaacatcgaagtgttcgacagcggctcgtcgtcgtccaagaagaagagagaggtgggcgcgcccaacgtcagcaccacaacggtcacccagatcgagtacagaaccgttacggttattgcctag

SEQ ID NO: 3218 - DNA, 1104 bp, Saccharomyces pastorianus
atgccaggtaaatcgctttgtaataaaaagggcgagttcaagggactaccatcaatcttccgagagacgatttctcttgaacacccgatctacaagcccgctaaggggagatattggttatacgtggcgctcacatgtccctgggcgcacagaactttgatcacaagagccttgaaagggctgacttctgtgatcgggtgcagcgtcctgcactggcatctggatgacagaggctggaggttcgttgaagcgggagatggaaagaaaaccgatgagaggaactggttcgacgtcgcaggcggtatcacctcaacgggactaaacaatatcacgcccgcagcgggcgtctccaatggcgcgcacaggctcttgacggacggcacggacgaacctcactacgggtacaagaggctaagcgacctgtacttcaagagcaagccggactacgatgcgaggttcagcgtgcccgttctgtgggacctgaaaacacgcacgatcgtcaacaacgaaagcagcgatatcatcaggatcctgaactcgtctgcgtttgacgagttcgtcgaagacgaaccccgtcacctcaacctgctgccccagtccctacagccacagatcgaagagttcaactcatgggtgtacgaaaatatcaacaccggcgtctacaaggccgggttcgcagagagcgcagaggcctacgaaaaggaagtggccaaccttttccattaccttgacaaactggaaaccctgcttcgcgagaaatacgcacgactagaggcggagtacggccaaagcaacaaggacaagatcctggctcggtatttcgtcgtcggtgaccgcctaaccgaggcggacgtgcggttgtacccaacgatagtaagattcgacgtggtctaccaccagcacttcaagtgcaatttcgccaccatcagaggcgggtatccccatatccataagtggctcagaaacatgtactggcgccacactgccttccaacgcaccacggactttaaccacataaagctcggatatacccggtcgcagctacggattaacccactaggcatcaccccgctaggacccaagcctgacatcatacctctataa

SEQ ID NO: 3219 - DNA, 612 bp, Saccharomyces pastorianus
atggagaattcgaaattgcttatcactttggttctagtgtttggaggtatatttctcaggaaattcttccaaagtaatcagcatccctcagcgcaacgtttatcctctacgggagtaaacgcacatgggcgcactcaaggccctacccatggtgctctgagaagggcggggaggactaatggtggccaccccgtgaccactcagatggttgaaacagtgcagaacctcgcacctaacttacaccccgagcaaattagatatagtttggaaaatacgggttcggtggaggaaacagtggaaaagtacctgcatggcgacgagttcagcttcccacccgggtttgagccttctagggcgccaatgggcgctgccggtggtaataacaataacggtactggtggcggcgaattcaacgacccaagaaagaagaatatgatctgtgctgagaatctactggacaaattccatgtggaccccaatgaagacatgggccaggtgagtttcaaagacctggatatcgaagagagaaagaagttgctggtttggcaggccagaaaaaatatggaaacgaaactgcaaaacgacaaagatttgcagagcttgttgaattga

SEQ ID NO: 3220 - DNA, 1098 bp, Saccharomyces pastorianus
atgagtgattccgacgaagaaggtcaaattgaaactcagatcgatgttccgatcgaagatatcatagagggttctgaaattgctatcacgacagctgataaggagactttaaaaatggcaaacgaactactggactctttagagcactcacatagagtcgatctttccttgcatttatactctgcgtaccttttgaaaagactattatacagggcaaatgagagaaagcacttttacgaagtaaaccaatttgtgaagacccaaattaaggataattggacaagttggcccaatcccaacacgatcattgaccctcacgtggataaattgtacgaagatataccggaaggtattgaaaacgtaaacatacagcctggagaggtttcagacagagctttggttcatgcttctgatatgatgagagtggaattggatgctcagtggcaaaaatgtctttccaaatcagctttcgagcatggtgtaacggtagatgtagatgaactgaacataccgaacgaaatatcccgaaatattctagttaaactggatagtctattcgagggactgcatgataaaatagcaaaggagaacgaatttgacgtaaggcaggacatgcaatctaacaatataaggatatgtcagatagacgacgagcccatccaggccaatcgacgaatcaaattcacataccacgacataatatcgagaggttgcgaaatgaatgaagatatgacagatatatatatgaaatcgttggaattatacaacgatattccagaaaagttcaaaaaaggaaagtttaaattacctaagcagacgttaaaaaagtataaccagcccaagaagactaattcatgtttgaaagagttgttaagcaagacaagagaaaactacatacctgtggaaaagttgctaaaggacaaaaggttgacatcaaaagataaatccaaactacaacaattaaatcgtaaagaaactgaagatgctttaaacaagaggacctttttccaagtcaaaggctattcaatggatgaggatgagctctctgattacgacttggatgactgtctcataaaactgcccaatgacaaagcctga

SEQ ID NO: 3221 - DNA, 2931 bp, Saccharomyces pastorianus
atggttaaggattctaatgagcccgggttttcgccgaaaaagaggcctctgttgcgtcctcaacggtcggattccacttcaaacactacggcaactggaaattccggtgcaggcacaagaggtcgtggcaggcagaaacagaacgctgtcaaaggtagttcgaggtcaccatcgctgcattctccaaaatcgtggatcagaagcgcgtctgcgacggggattctcggattgagacgtccggagctggcgcactcgcactcgcactcgcaggctaatcctgctgctgctactgttggtatgaaccattctccgctgagaagggctactgcgaacgcgacgcccgttgacactgggaggtcctggacggatggagacattaacaacgtcgtggacgttcttccctcctttgagatgtacaacgccttgcatagacacatcccgcaggggaacgtcgacccggacagacacgacttcccgccttcataccaggaggccagcaatacgcctacaactggcggtgcggcctcgagcactgatctctcgcatcaactgttgtccactaacgcattgggtgccacgccttcatcatccacatcgaatttggaaaacttggttcccctccgaacagaacatcacagcatcgcggcacagcagcccactatcgttgatgaagatctgttggacgcggctcccatactcgacgatctgaatgaggcagacagcattttcatcgataaactgtacactttaccgaagatgtccacgcctatcgaaatctgcataaagacgacgaagcatgcgcctatgccgcacgtgaagccggaagaagaatcgatcttgaaagagtatacgtcaggcgatttgattcacggtttcatcaccattgaaaacaagtcgcaaacgagcttgaagttcgagatgttctatgtcactttggagtcatacatttccatcattgacaaggtcaaggggaaaagaaccatcaagagatttttacgtatggtcgacctgagtgcttcttggtcatactcaaagatcgcgttggggtccggtgtagacttcattccggcagacgtagactacgatgattccgtgtttggcctaaacaatagtcgggtcttggaaccaggagtcaaatacaagaaattctttatcttcaaactaccactgcaactactagatgtcacttgtaaacaggagcatttctcccattgtttgttgcctcccagcttcggtattgataaatatagaaataattgtaagtactctggggtcaaggtcaatggtgtcctcgggtgtgggcatttgggtaccaagggctccccaatcttgactaacgatatgtctgacgataatctttccatcaactacactatcgatgcaaggatcgtcggcaaggaccaaaagacctctaaactatacatcatgaaggagagagaatacaatctaagggtcattccctttgggtttgacggtaatgtcgtcggggaaagaaccaccatgaatcagttgaacgatctcactaggctggtgcaagagagattggacgccctgaaaaaagtatttgaaaggttagagaagaaggaacctataacaaaccatgatatacacggtgcagatttgagtggcagcattgatgaatttatagaattaaattctcaagaaatattgcaaaggaaattggaccaactgcatattaagaatagaaatgactacttggtcaattacaacaatttgaaactaggccacagcgccgaaaataaccgtactggaaatagtagctatccctctgatccttccagaaattgggtttcctttgttgaaagtgaactgaagtataaactgaaaaacaaatccaactccacatcgtttttaaatttctcacattttttgaatggcagttccagctcaaattccacttcttcgagtactacaaagaataaacatgacctgacaagtaacaacgaaaggacggggttgatactggtaaaggccaaggttcctagacaaggtttgccatactggtcaccttcgctacttagaaagacgaatgtttttgaatccaaaagtaagcaagaccaagaaaactgggaaagattgtccgagttgatccctgatgatgttaaaaaaccactggagaagattgatttacaactaacttgtatcgaatctgataatagtttacctcacgacccaccggaaattcattcaatcaccacagaactgatatgcataacagccaaatctgataattctattccgatcaaatttaactctgaattattgatgaacaaagaaaaactcgctgggatcaaagcgctgtatgacgatttccattcaaaaatttgtgaatatgaaaccaaattcaataaaaattttcttaaattaaacgagttatacaacacggaaagagggaaccgcaggctcaaggaattgaaatttaccgattttgttacgtcacagctgcttaatgatattgaaagtatttgtaacttgaatgttaacgttcataatttatcaaatattttcaaaaaacaaattaacactttgaagcaacatccgaaacgcgtatcatctgaggactcaatatcgcatacaggtaacggtaattcgtcgtcacccaattcagcatctttaactccggtaacgtcttcatctaagagtagtttattcttgccaagcggcaactcgtccacttctttgaaatttaccgaccaaatcatccataggtgggtcaaaattgctcctttgcaatataaaagagacattaatgtaaacctggaatttaataaagatatcaaagaaactttaattccaagttttgagagctgcttatgctgtaggttctattgtgttcgagtaatgattaaatttgaaaatcatcttggtgtagccgtgattgatattcctatttctgttaggcaagtgtga

SEQ ID NO: 3222 - DNA, 2199 bp, Saccharomyces pastorianus
atgaccacgcagataaggtctcccgaaggcttgccgtatcctattcagatcgataaactcatccctagcgtaggctcatttcttcaagaaggggacagattgctcgtttacaagttttggtatctggtcgaaaggccctctgataccagcgatgatgataacgaccacgactcttctcctggcggcggcggcggtggtagtgtgtctccgccaaccaaacaactacgtgaatcgatagagttcttcgaaagcccctacgagggcgatttgataagttggaacgtagacgtgggcgacgaaatagccactgctaaccaagttatctgtgaaatcaaaagaccttgcaaccacgatatcgtatatggtggtctgtgcactcaatgtgggaaagaagtctccgcggatgcgttcgacggtatgccattggacgtcgtgggggacatggacttacagattagcgaaaccgaggccatcagaacagggagagccttaaaggagcatttacgacgggacaggaagttgatcttggtcgtggatctagatcaaaccatcatccactgtggtgtagatcccaccatcgcagagtggaaaaacgaccctaataatccaaattttgaaacgttaagggacgtcaagagttttactttggacgaggaactggtattaccactcatgtacatgaccgaagacggctctgtacccaaaccacctccagtaagaaaatgttggtactatgtcaaagtaaggcctggtttgaaagaatttttcaccaaagtggcccctcttttcgaaatgcatatctacacaatggctacacgggcttatgccttacaaattgccaagatcgtggaccccacgggtgaactgttcggtgatagaattctatcgcgtgacgaaaatgggtcgctaaccacaaaatctttagctaaactgttccctaccgaccagtcaatggtagtggttattgatgacagaggtgatgtctggaattggtgtccgaacctgattaaagttgtcccttataatttcttcgttggtgtgggtgatatcaattctaatttcttacccaagcagtccgctggaatgttgcaactaggaaggaaaacgagacaaaagagtcaagaatctcaggaattgataacagacattatggataacgaaaaacaattacaagaaaaaatagataaagaagtcaaacgccaagaagaacaactgaaccatcaattggctactgcagaggaaccttctgcaaatgaatccaaggaagaattgaccaagaaactagaatactcagcatccttagaagtccaacaacaaaaccgacccctggctaaactacaaaaacatttgcatgaccaaaaactactagtcgacgacgatgacgaactacactacctgatgagtacattatcaaacattcacaacacgtactatcaaatgttatcacaaccaagtgaaccagagccaaacctaatggaaatcataccaagtttaaagcaaaaagtctttcaaaattgctattttgtcttttcaggtttaatacccctaggaaccgacatacaaaggtcggatatcgtgatatggacaagcacgtttggcgcgacttccacctctgatttaaattacctaacaacacatttgatcactaagaatcccggtacttacaaggcacgtctggcgaaaaaattcaacccagatatcaaagttgtccatccagattggatattcgaatgtctggtgaactggaagaaagtggatgaaaagccttacaccttaatcgtggatagccccatttctgacgaagaattacaaagtttccaaaaacaattacaaaagagacaagaatatctggatcagcatcaagaacagcagcatatgttaatgccgcaagaaaatacaaatttattcgctaccggtacatcgtggctgaacgacgacgacgacgaagatattccggatacagccagcgatgacgacgacgataatgaccacaacagtgaaactgatgatgaaaaggactcaggagacattgacagaaagagaggtatcgaggacggtcttgatgaagcaccacagaagaagaccaaggcagaacattcacaggaagacggtcctgcacaacatgaagaagagggagaaaataatgaagatagcgactcacagttggaggaagagttaatggatatgctggatggctag

SEQ ID NO: 3223 - DNA, 4245 bp, Saccharomyces pastorianus
atggcaaatagttctgatcggcagggcttggagcccaggattattagaactctgggttcacaaacgctaggtggccccaatgctcctcataaatcctcaaatacagaggcaaatcctacgttttccgaaaattcaaatgaagcgttgatcaagacaacttccccgacccctttatccacacctatttataggatagcccaagcttgtgataggtgtcgatctaaaaagacaagatgtgacggaaaaaggccacagtgttcacaatgtgctgctgtcgggtttgaatgcagaataagcgacaaactgctaaggaaggcgtatccaaaaggatatacagaaagtctagaagaaagagtgcgtgaactagaggcagaaaataagagattgttagcaatatgtgatatcaaagaacagcaaataaacctcgtttcacagtcacggccaccaacatctttggataatactgttaacgataattttaagcaagagttgaaagacgcgccattgaatttgtcttctgcaaacatttatctattaaaccagactgctaataagcaactccaaaatggtaaagttgacaataatcgtagtgattcgactatgggtttactggcaacgtctcctccactgtcacacaaagaccatgtttgtgatggtgtttcatgtacaaacaatctgcatgctaagcctacttccacgagtttgaacgatccaaccgtcatttcattcgaacagaatgaagctccaggcctccccgctgtaaaggctttaaaatctatgacaactcaccaacgtagcactcagttggcaactttggtttctttatccattccaagatcaactgaagagattttattcattccccaactcctaaccagaatcaggcaaatctttggcttcaactcaaagcaatgcctatatacggtatcgttgttgtcttcattaaagaataggttgccagcgccaaaacttttgttgtcctcaacttcaacaaaactaaaagaaaacgatgattcagcatttttgaataccttcgaaacaacaagtcttgctgagtttgatgatttaaaggagtttttaatctctttgaagtttgacattaattcattttcaaaccaacaaccaggaacactgaatggcaatcccaataatgacttactttcgttgaacgagatcaaagagcttctacatctgtttttcaagttttggtcaaaccaagtaccaattttaaacaatgaccatttcctattatatttcaataattttgttgaagttatcaaagatttacctttggaaattaaaaaagctaatagcggcactaacactcacgcaaccaccaaccatcaaatatttgccttgaagctcatagtaatgttacaaatggggttgctaatcaagattaaaaaagagaaaataaaagataccgtgccaaggaacctgaatgcaaagtttgccaaattattagtgtattatcatgagatctcctcaatcattccaaaaaatccgtacttcttaaacatgtccacaacttcccttccatctttacaattgttatccttgacgtcgttttatttcctaaacgttggtgatattccggcaatttacggattgagaggccgtatagtttctatgtcacaacaattaaggctccacaggtgtcccagtgcagtattaagtgtacattctaatccagttctacaaaaatttgaacaaagtgaaagaagattactattttgggcggtttattatattgacgtttttgcatctttacaattgggtgttcctcgtttacttaaggattttgatattgaatgtgcgttaccaatatctgatgttgaatttgaggaccagttagcctcggaaaatgaaaaaacaaagaacaaaactaagaagattcaattgcaaggtcaggtttcgagtttttcgttgcagataattagatttgctaaaattttggggaacattctggattcaatctttaagaggggtatgatggatgaacgcgtcacctctgaaatagcattagtacacgaaaatgcactggataattggagaaatcaattacctgaaatgtattatttccaaataaccgtaaatggaactgtgaatttagacgatataagagcaaacaactcaagaaacaccgaaacaaaatttgacaggaaggacataatttgttttgagaaaaaagtattattattgttttatttcttagcgaaatccatgattcatttgcctgttatcgcaactaagcctttgcccaaaaatgttgacaactcaaccaaaaagaagcactcgatgttcaataatgataataaaagtattaatagccaagatcactcagtagtggatgtcgatatgacatcccctgccataagaacatcatcttcatacatcattttgcaacaagcgacaaatgcgacgcttacacttttccaatccattaattcaacttacttaccgctacctttgaacgtttcgagaactttgattagattctcgttattatgtgctagaggatctttagaatatactaaaggtggcgcgttatttttggataacaagaacctccttttggatactattaaagacattgaaaatgacaggcttcttggtttgcccggagtcgcctcttggcatacactgaagttgtttgacatgaccatcaatttacttctaaaagcacctaatgtaaaagtggaaagattagataagtttctggaaaagaaactaaattactataatagattgatgggattgccgccaactacaactacatcgtcggaaccacttttctgctctcaatctaagaatagtccagatagtggatcaagaaactctatcgtgaaaagagaaaatcctgaaaatgagtatctctatggggatgacacagacatggataagccatcaacggagaatgcacacaacgtgaacaagaggctaaagcatgaaaaagttattagccaaaccataggtgatgacaatatgtctaaaaaccaaaccgtatcaaagtttcagcaggatagcaagaaaaatatgtctactagcaatttgtttcctttttcatttagtaataccgaccttactgcattgtttacaaatcccgaggggttgaattttgcggacactaatgattatgacagaaatgatggtagtaaaacttctatggatgcggtagataccaatattggaaacttgagttttttgaatatggctccgtttttacaagcaggcaacgcaaaccaaaacgtagatgataacaaggtcgcggacaaaaatgcaatatttagctttccaagtaacttggatctaatgaaagatagcttggactctaaactagaaatttcaagttccactactaaacaaaattctgagtttctagacaatgatcagctaccaccgacaggtagagatgttagtatggaaaagagcaatccgattttcaataacaaaagcaattatagtctgacaaagttgatgagactgctaaacaatgataattccttttccaatattagtatcaacaactttctttatcaaaatgagtcttcaaggaatgatccagctaacaaagcagccaccaaagttagttcaaacttcaacccagcttctactgctagcaatacgagtcgaagcagtatcacaggaaacaaaaaaaatggcatggataattgtgatatcaacgattttggcaacttcaataatttcatgacaaatgttaattattctggggtggactatgattacatagtagacgcatcacttgggctggctcctttactagtggatacgccggatatttcaaatactaacacaacatctacaacatcaaatcggagtaaaaacagcataatattggatccaacgtttaaagatgacccggatcgattgcgttcaaatgcaagggaagtattgaaccccacagattcaattttaagccaaggaattatgtcttcaataagccccagaaccaccagcaaccagagatccctatcatctggtaattattcaaaaagcaatggtaattctcggaagaattcaaagaatgcgaagagtgaccaatcagatacaccttccacgcttttcaaaatgaaaagaacgtcgtcaagctcttccacatcccaccgtggcccaagacgccctccgaagcatcgttacggtacagatcaatcaaaaagtcccagtgacgtaggtcccagtgcggataatctaccagacttattccaatggcaaaacgccaggtag

SEQ ID NO: 3224 - DNA, 909 bp, Saccharomyces pastorianus
atgtcgaggcgtgtaaaagtatgtttctcaaagctgcttttcaaaatcaccaaattagcaatagttttaaccgtactatacatttattttacgcccaaaattctttcccggaatacagattcgttgcagcatatttttccccacaggagtagcaactctcaaatcaacttggtcatagcacaccctgatgacgaagtaatgtttttctcacccgttatctctcagctacatgcgtacttcccggacaccgtcccatttaacatactgtgcttgtctaagggtgacgctgagggtcttggggacacaagagcaaaggagttaaacgattcggccgttttgttgctacgaaatgaaagacctgtctcggtacaagtcatgaattttgaagacggtatggacgaagaatgggatatcgattctataacctctactctttcgagaactatagaggtaaacaacgaggagctgtaccaaattatcgtgacttttgattcatatggtgtatccaaccatatcaatcataaaagttgccatatcgcggttgagacattcatgaatgattacgttcggtccaaggctaaggaaaatggaaaaaacgctcatatcgcagcgctatacttgagaagctacaagaacaatatctttttgaagtacaactcttttatttgggaaatcttgaaaatgctttacagcacagtttccccatttggtaaatccattcagccgctcccgccctcaacggcaaccgaaaaagatagtctattgctgatgaatacacattcacagtatattttggcgtatgcagccatgttgaatgcccataaatctcaggttgtttggtttaggtatggatggtggattttatcaagattcgtttttgttaatgaatttgacgtttttacatattaa

SEQ ID NO: 3225 - DNA, 261 bp, Saccharomyces pastorianus
atggtgttttacaaaatcacattaagcaggtcactcattggcatgccgcatacgacaaagagcgttgtcaaaagtttaggtctgggtaagaggggatcaatagtatataaaacagtgaacccagccatagcgggatcattagctaaagtgaaagagttggtcacagtagaggttacagagcataaactaacaccacatcaacaacgagagttgagaaagtccaaccccgggtttgtggtagagaaaagagccattatttaa

SEQ ID NO: 3226 - DNA, 1755 bp, Saccharomyces pastorianus
atgactaccagcgcttctgcctcccagttacaaaagcgtctgccagaagaaaaaccttggccccaactaagcggctgcaacgaagatgctcaagccttcaaatgcaaatacgtcaccaaccataactccttgggtgatgggaatttcagtgtcgtcaaggagtgtatgaacgttcaaacaaaggatttgtatgcgatgaaactgattaagaagcaaaccgttagaaacaaaatccagcttatccaaagggaatttgacctgttaaggtcgataagcgaaaaaatcagagatatggagaagaaaaacgagcactccctggacatttttgaaggacaccaccatatattacagcttttcgactactttgaaacagcggataacatcgtactgattacccagctgtgtcagaagggcgacctgtatgaaaaaattgtcgaaaaccaagctctagacctccagactcaggtcacgtcatactgtgcctgtatagtaagcattttggagtttttgcattcgcaaggtattgttcacagagacttgaaagcggaaaatgttttatttagattaagagtaaacgaaaacgaaaaaaacctgcagggtgaacatcatggggactttaagtacgatcttttggcccatgacctggtccttgccgatttcggccttgctgctgaatacaacaccacaaagatcaactcgctgaaggagtttgtcggtacaatctcgtacattgctccggaaatcgttaaatgcaaaggtgtcggtgatatgtctactgaccaagtgggtgaactagagaaatatggctgtcccgttgacatatgggccctcggtgtcttgacatacttcatggctttcggctacactcccttcgactgcactacagatgatgagacattggagtgtatttccaaatgcgattattacgtcgacgagcaaacgatgcacgaccccaaatatgaacagttttggaacttcgttcaatgttgtttcaccgtcgatcccgccgttaggcgctccgccacaaacttaaaacaccatcctttcatcaaggattattttgctacttcaaactctttacacaagaaggataccacgaatttcgtattcaacccgacgataagaagagtatcttctacggcgtccatgcacactttaagatcgccatcgaaatcgagaaaaaccaccacactggcttatttaaacatggacggcgggtcctcagaaacttccactgcttttaacagcaagatggacttgcctgacctttacgttgatagaaccatcaattcccgtgaacgatcactaaacagaattagagacactttgaagaagacattatccatgacttctttgaagcccgctgcgacccatgaatttctccacgctaacaagagtggcacttcatcctcatcaaagtctgggctcgtgaaaaagaattctacgtttgttctggaccctaagccaccaaaaaatagcttgatgaacggctgttttagtaccacaccggaatcccgttcaaacttcaatacccccaaaagcttatctagacaaggctcatcaaccagtgtgaagaagtttgttaatgaaatggatctgcttttgaccccacgtaccgcttcgatgagcagccacgataccacagctataaacgataatgattttataaacgataagaattcttcaagaaaacacgcagcctcattccaggtgaatgttgatgactctgacggtgatgaaactatgttaatatag

SEQ ID NO: 3227 - DNA, 1242 bp, Saccharomyces pastorianus
atggtgaattttgatctgggccaggttggagaagtattccgtaggaaggacaaggggcctgcgatttctggtgacaacccagaagaagaagatgtcgatgcctctgaatttgaagaggatgaaattaagcctgtgcagacaaagaacagaaggcccaaagaggatgcgtttacacaacagagactggctgctttcaacccggtgttgacgccgagaacggtcctgcctgtttacttgttcattgctgtgatatttgttattgtaggagggtgcatattagcgcaaaactccaaagtggacgaggtaaaaatatactaccaggattgcatgaacaacgcaacctcttcgtggagcgacatgccttctgatcaatgggaattgaccttccataaaaacaaaacatataatgtagcaccacaatggaagtttgtggatgatgaatcggacgatttcacggaacaaagaggtacctgtcaaatcaggttccatacaccgagtgacattaagaagaatgtatatttgaattacattttggagaagtttgctgctaaccataggagatacgtactatcttttagtgaagaccaaatacgtggagaagatgcctcttacgagacggtgcatgatgccacaggtataaattgtaagccgctatccaagagtcctgacgggaaaatatattatccgtgtggactgatcgcgaactcgatgttcaatgatacgttccccttgcagcttatcaatgtagacgatgcctcgaagaattactcactaacaaataagggaatcaactgggggtctgataagaaacggttcaagaagaccaagtacaattacacccaaattacgccgcctccatactggaagaatttgtaccctgatgggtataacgagacaaatgttccggacattcaggagtgggaagaattccagaactggatgaggccaggtgcgtttcataagatcaccaaactaatcagaatcaacaagaacgagagtcttccagcgggccaataccagttggacattgggctacattggcctgtactggagttcaacggtaagaaagggatctatttgacccacggctctcaccttggcggtagaaatccatttttaggtataatctatttgatcggtggctgtgtttgcgctgccatggcgctcatattgctaacattttggttatttggcggtagaaagattgctgatgcatcgagtctttcatggaatatgaattaa

SEQ ID NO: 3228 - DNA, 1818 bp, Saccharomyces pastorianus
atgccaagaaagaagtccgccaccaagagagctagagaacaagaaaagaaggaatccggtgtaactggctccgatgctgccatcgtaaagagttctgaacacactaccgctgtggccaaagccgctgttgagccaaaagagccatatgtttccagtgaagacgaggaagaggatgaggaggatgaggaagaagaagacgactacggtgaactgatcaccgacgaagtggaaaaaggtattaaccaagtcttggatgctattaagaataataagactgataagttactagatcccaaagttaaatttttcgaagatcctgaatctgctgcctccaaactagcaaaccgtgagggaaaacacaaacctatctatttaaaggattatcatcgtatgaatatactttccggtgatgctttaaaggacgatgaagaagacaatgaacagggaactgttgatgggaaacaatcgtttgtgtcgaaacaacgcgaagaaaaatcgcagctcttggacgaaatcaagaatgcgtttagcgacgaggacaatgaaaacgacgatgtaaatgaagatgaagatgacggatttttaaagagaaagacaccttctaccaagaaagaggaaagaaatttacccgatcctactgtcaatgaagaaaatttcttagaagagtttgtcagccaacaagcctggattcctaaaaagggcgataaggtcatttccctagatttaaacaatgacgaagaggaggatgaagaattcgaagatgccgtggaaaaatttgaaaatgcttataattttagatacgaggatccaaacgcagcagaaattgtatcatatgcacgtactcaagccacactgagaagatctgataacacctctcgtaggagaaagagagatgatgaaaagaagactaaagagcacgtaaaagcagaaaaagaaacagctattcagaagaagaaaactaaaaaattaaataaattaactgacatcttggagcaattaactaaggaatacggtgctgaaatcaatgccgatatggtgaagaagatcaccgataatttgatgaaaaatgactttaaagaagaagaatgggataatgtggtagcagaattatttaatgaagaattttatgagcaggaggggaaacctacctgggatgaaaacgatgaaataatgggcgagttctatgccgatggcgatgccaaggaccaagtagaagaagaagataaagaggaagacaagggacaagaagaaccagaagaaccaaaagaagagaaagaagagaaggaagaagaaggccctaaaaaaaagaaaagcaaaaaagaggaaaaattgcaaaagaaaagagaaaagagaaagcttaacgaactagtagaaaatgctctagaacaaaacaaattagctctgatagaagaagttgagaaagaagaagaagaaagaaggagtagaagtcacacgaaggaggaacaagatttaaaattccgctaccgtgaagtttctcctgaaagttttggtctaaccacgagagaaatctttgccgcagatgacacagatctaaatgaatttattggcctgaagaagtttgctccttaccgtgctaaggaattaagagccaaggataagaggaaggtgacaaaggcaaggagattaagagattggagaaagaagactttcaaaaacgaaaacgggttagccccagttaatggtggacaagacgccaatggaaaagaagacgacgctattttgatacctgtagagaaggaccacaagggcaaacacaagcaaaaacacaatcacaaacataaaagtcaccacaagtag

SEQ ID NO: 3229 - DNA, 2808 bp, Saccharomyces pastorianus
atgtctgcacatacgtacaaaaagttcgaaaactcgagctctggcgatttgccggataaaatgaccatttatcaggattgtatgaacacgtttaatgaatcacctgtaaattctaagagatgtcgtttgctgatttcacgtttactaagactgttggctcaaggcgaaaccttcccccaaaatgaagctaccgcactgtttttctccatctccaaattgtttcaacaccaaaacgattctttgaggcaagctgtttacttggcaattaaggaattgagtggaatttcagaggacgttttgatggccacttcttcgatcatgaaggacgttcagaatggttcggatttgatcaaacctgatgctatcagatcattgacttatgtcttggatgagtctaccgctttttcagccgaaagattactgaaaagtgccgtggttagtagacacccttcaatttcttcggcagcactatgtacttcttaccatctgttaccgatttcagaagtcactgtcaagagatttacgaacgaaactcaagaagctgtcctggatttgaagcagttcccaaatcaacatgctggcaacgaatattacccaaactctacttatatctcccagtatcatgcccttgggttactttaccaattgaagaaaactgataagatggcattactgaaattggttagacacttctctgaaaacaactccatgaagaatcagctggccaaagtagaactagtcaagattgttaacgatttgatttgtagagatcctcaattattcaatcaatttagaccactgttatctgactggctctccaacaaattcgaatctgttcagttggaaacagcaaaatcaatcacctcatttgctatccgcaattcgcgcttagtcgctccagaactatatgcagctgccatcactgctttgcaatctttattgtctgtccctcgcgtctcttctagatttgctgcattgagagttttaaatagaatctctatggtttcacctgaaaagattgtcgtttgtaaccctgaattagaatctttaatcaacgatcctaatagaaacatttcgacctatgcaattaccactttattgaaaacgggtacttccaagaatatatcttctttgatttccaccattactaatttcattcacgatgttagtgatgactttaagatcattatcattgacgctgttcgcaccttatcgctaaacttcccacaagaatggaaatctgtcttaaatttcttaatcgacgttttaaaaaatagtgaaggtggattcaaattcaaaaacagtatcgttgaagcattgattgatattgtttcatttgttccacaatctaaagaagttgccttagaaaacttgtgtgacttcattgaagattgtgagttcaacgaaatacttgtaagaatattacatctattgggtaaagaaggtccatcagctccaaatccatcgttatatgttagacatatttataacagagtagtattggagaattctatcattagatccgctgctgtggtagctttatccaaatttgctctaacaaagaacgatcctactttatatgaatcaatcataagtttattgaagagaatcgctaatgataaagatgatgaagttagggacagagctactattgctctcgaattcatcgattctgctagaaataaacaagatgttgtggcacaaaatctaattgaatccaaatattattacgatattccatcattagaaaacaaactgaacgcttatatttcctccaataatgattcgtttgctactgcgtttgacgttaagcaagttcgtaagtttaccgaggacgaaatgaaggcaataaatttgaaaagaaagcaagaacaaatcttcaaccaaaaatcagaaacaacctcggatgatataccagaagccgacggtgctgcttcggaaaaaagagcagatgccaagtccttcactggtccaaacttggatgaccaccaggaagatttattagctacgaagtatgctgacgaattgttatccattgaacaaattaaaccattcggtcaattagtaaatagttccagggctatctcattgactgagccagaagctgaattcgtggtaagtggtatcaaacacctattcaaagataacgttgttttccaattcaatatcaaaaacactttaacagatattgccctggataatgttgctgtggtttgctctccagaaaattctgatgaagctgtactagaagaattatttactttacaagtagacaggctactaccatccgaagaagcagcatgctacgttgcatttaataaatctgatgaaattgtaatggagggtttcctaaacaacctaacattcacaacgaaggaaataaattctgatactaatgaaccatttgaaggtgatgaaggtttccaggatgagtacgaaatcgattctattttcttgagtgctggtgattatgttaagagttctttcacaggtaatttctctgctacatttgatgaattaccggctgaagaaattgctgtttttaatatccaagaagacttgtccatacaagaagttgttgacaagattatcctaaacagtagctgcttgccagtggaaagtactcaatttgctccaagcgactcaaattcccatgtcttaaaattatatggtaagagtgctttaactggctccaaagtggcactacaaatcaagatgattaagagctcgaaaggccttgctttgaaagttcatggtaagggtgaagacagcttgttgtgttctgatctagtaaatagcttgatgtag

SEQ ID NO: 3230 - DNA, 3273 bp, Saccharomyces pastorianus
atgaaacgaatcttttccggcgatagcaaggcaacagattcgccaactaccaacccaggcttaatgagcccatcgaactttggtgcgagctttggttcgcatttaaaagtgaatacgactgtaaaaaagaaacttagcgactcctcaccatcttctcctattgagaactcacccgtatcaccagagttagtgccgatcctaacactgctgaacgcgcattcacatagaaggtatcatgaaggtgtatttttgattttacaagatttgaaaaacgatgggactcacgcagccaggaaatggaaagacgtatacggggtgttgttgggtactcaacttgctctttgggatgctaaggaactggctgagttcaccgacccatccagtcctgtatctgaaaggaaactgaaagaagttgcctctaaaccgacttatataaatttgacagatgctacgttaagaactttggatagctctgataatattgtcatggaaagtggaaaaagtctcaccaatgcattagtcgtttccaccacactgaagaatcgatacttcttgcagttcggtaacaaagaatccttccataaatggaatgctaccatacggttgtgtttgtatgaatgctcctctttacaaggggcttatacaggcgcgtttatttcaagtagaggggcgaagctaggtgatatcaggattctgcttacaaacagaaagtatgattacaaggactgggttagtgttagatttggagcaggcatgccttggaagcgttgctatgcggtaatctcacaatccaacagtaggaaaaagaataattttggcgaaataaatctttacgaaaatgataagaaagtaaaaaaaaatcatgcgatggctaccattgtagaggcaaaggcgcttagtgctgtctatccatcttccccaaaactaatagactcctccacaataatcaaaattgaaggttcagtaaaatttgaaaaaaaggaagctgctcaggagaaggatgtttttatcatgcctgagaagcaccaagccgttccaagttacgacaccataattagatttctaatccctgccatggatacgttcaaattatatggtagacccgagaaactactatcaagcaagaatgatccacattcgttgttgtttgggttgccggttttaccacatatatattatcttgaagtggaagatttgttcccactaactaattccatgtcaagtttgcactggtccaaaaacgaatggagagaacacatcagcgatattttacaaaaaaagttaagtcaaggttattctggatgtggttctgtttctagcataacctccccactaccttccccattccttggttctgctgagttgttcgaaagaactgatggggtgttgtcacctaaagtatcctacgggtctaaatcttcttcaaataatagctcaaagaatagatcaaagaatagtttaccgaagagagaacgtggcaggatgccttcttcggctgatcgtgacttcgatagtcctgattttccgattatgaaaaataacagtccatcttccacgatgtctggaagtccacaaaagaccaccacacccactgctgcatcttctagaacgagggtaatagaagcttcaccatatgggaagccaagacaacccaaaccattcatgtcatctaaaaacgattcaccatcggacagggctaaatcaaggacgcatccctatgttgataatggaatggataaaactgcttatgagccagccgagagtagaggcatggcttcgaacggtgcttttgacgacaacgatgttgattcaagtttgaaaaaagttcggaatatgaaactggatatccccgagtctaattttgacaagtttaaaaccgataagaatttgttatccgtggattctaatctttccaacgaaaagaaactttccgtggcatcggatttatcatcgatctatgaaaaatattctaatggtccctttggtcacaccgaagcacccaagggttcttctgacgaggcttacttacgtttccaacgggcatcagtacatccggaggaggcctatgactcgagagactctttttcaaaaagcgatttctccaataatgatgaagatgatcacgccgttttacaagaattgaacagtttaacccaaagaatcaacgagcttggtatggaaagcataaactcgaactcagattccgacaagatgaacggatcttactcgcaaatggaattaggaaactataacaacgaagatgatacgaacttatttgatcctgactttatggcccaagatcaactacacgctgaagaaagagactataataaggatgacgatagatctcccttagtcactacgcctgcggacatcgaaccagctgggctgggcatagttcccaataataacatcgaaagacaacacataagggaacaaagaccaccgcgtgaggttcaaagacggtctcccgagaaagctttcaacccaccgcaaatggacaacccatacgccaagcccggtgcaacggtgaggacgagccctgttagaaccaatcgtaggagcccacaaaagaatcaaccaatgatgccagcccagcaaacttcgtattacccccagccaaccgctaacaacgaccccaatggaatgtacgctacaaacaatcaaccgatggtttcgcctaggaacgggaagccgagagtaccagcaggtccacacaatcaaggctggaacaaccgcccttccccttcaaatccttatcagcatccttcccctgccccgcaaccacagccacaacgtcctcttggaaacccgtacgcaacagccaacaacagaccaaatatgcccatgcaatatcctcctcaaatgactgcccagtatcctccaccgaacacgaactttacaccggcaccacaacatatgcatctacctattcttccaccccagcagaccaaccgctcgcatcagccttatgcgatgaatacacatatgggctctcctagcggatacaatggagcagcgccactatcaccccttcaagcaggaaatatctacagcaacaatagatctcagccgccatggccgactcccaactcgccctacaacaaccatcgcccaccgcccaatatgaaccagcgccaaggaaacggcaatgctggtccttattatcctccagcaccacagtcgaaccatcatcgagcccgcccacaagaaaaggagggattctcacaattcatgccatccgctactacaaagaacccgtacgctcagtag

SEQ ID NO: 3231 - DNA, 1728 bp, Saccharomyces pastorianus
atgtctgaggagaactcacagttcaccattagtggcaattcaacgaccttcagggccaatgcgcatacgtgcaaaggaacgaatggtgctgtagacacggaatcatctctatcagaaagtaggagcgatgaagagaacccagagaaaacacctcgacgccgatttgcgaagctgggcattggtatatggcttgatttgaaagataggataccgttttacaagtcagactgggtagatgcctttgattacagagtcataccttctgtcgtggacacatactttaataacttactacctgcgatcgcttttgcacaggatatgtttgatagaacggataactcgtatggtgtgaacgaggtgcttttatccagtgccatggctggtatagtgtttggtgttctggctgggcaacccttgtgtatcgtaggtgtcactggtcccatctctatctttaactatacagtctatgaaatcatcaagcctctaaataccaattattttgggttcatgttctggatttgtatgtggtctatgatattccacttctttttggcattcacaaatgccgtctgtctcttacagtacgtgactacgttcccctgtgatatatttgggttatttattaacgtggtctacattcaaaagggaattcagatcttaacaagacagttccatactgaatcgggagaaaaatctatacaagatgggtttgctagtattgtagtggcgttggttatgaccgtttttggacttttcttcaaattattccagaactaccccttatttactcatcaaattagaactttcatatcagattattcaaccgcactttcagtgttattctggtcatccttcactcattttggtggttatttacaagacgtgcacttcaaaaaattaccaataacgaaatcttttttccccacatctaaaatcaatagacctcaagacacctggttagcttacgaaccgattcccgtcaaagacgtatttattgctttaccttttggcataatactgactattttattttattttgatcacaacgtgtcatcattgatggcgcagagacatcaatatagattgaaaaaaccttcctcgtttcattatgattttgctttattggggattactacttgcatcagtggagttctggggattcctgcgcccaatggcctcatcccccaggcaccattgcataccgagacactgttagtccatggttcaaaccaagaagtgatcaggtgtgtagaacaaaggttcacaaatactatccagggtcttatgatcctagggacgatgacaagaccattattggtatgtttgggagaaatacctcaggcagtgctttccggattgtttttcatcatgggaattaatggcttaatgacgaatgttataatacgtcgactgattttcctattctcagatcccaagaggagggataatgactcgcccttagtgaacgtatccaaaagatcaaccgcgatatttctttgcttcagtatagcagggtttgcaggggagtttgccattacgaatacaatagcggccattggtttcccactggtgttacttctaagcgtactagtgtgtttctcgttcactcatatcttccccagtgacgaattaaagattcttgataccaatgtggcacaaaaatttactattaaaaacttattactggaaaacatacgcgatgcaaatttcagggacacgcacatgtaa

SEQ ID NO: 3232 - DNA, 3771 bp, Saccharomyces pastorianus
atgtcggcggttttgcaatacggcgccacaaatggtacggatttctctttgacggtgcttaaagcaagaattgctttattagcaactgccatcggcggacctgattatacttccgagatcgagccgcctccttataagcttggcgatgactgtttagcatgcctgaaagatttaaaaaggtggtttaaactggtggatgatcaacagaaacgatgggatgtggcaatggcagtggccgaatatcgcatcttaacagatgacctgttgcccatcctgatagactgggaaaacaaatgttctctcgccagcaaactagccaagaataatccagagcatgaggagtttagaaacaaggcttactacgacaagattgccatgaattgtctgcaactgttagtccttatgacatggcccttaatcattacggaacaatcatcatcgaatcaaatcactctttacagtgaagtgaaaaagcatcaactgatatataaaaaagcaattttgtccatggaaaatgggaaagtactgagagccgccattcgcctggcactgggcgtcatcaagatcgaccgactatctagaactcccagggataatatggttctcaaattggttctgaactttttcagaaacgtcatcgctatagaaccaggtgaatttacaataaataccaagagaagcattcctagcaagggtatcagttccattgacactttaccgccaaatgtcttcatggatgatatttctttaaatacagtcaccttttccttccataaaaacaaagtattcggcctactcttgacgctggctaattcattgtccaaagagttcgaccaggactttattaatattccgctgctagaaatcatgttttttcttaccaaagatgttaatcaatcattgttattccctcaacggcctgggcgtaaaccccatccaggtcaagcaaatgctaacggaaatatctccactaataatgttgtgactagtgcagggtttgaactatccaaactgctacaaaaggagcaccaaatgaaaaaaaacgttattaaacatacctcggcaagacattcaagatttggtggtcttttatccatacaaactccagacaaaaataggctaactgtttctggaagtcaagctcttgtagatgaaaatatagcattgcagaaattggatgacagtaaaaaatggaataaaagaataactcaaaaacgtgaatcagtcgcaaccgagggcttaccaaatagtttattgaactctcaaactggtaaagctatctttttcactgaatcaaatggtaaacattttaaaacattcattaacaattttattgattctggttttaacattctattacatagtgtaacaaactcttttacaacagagcaagatagaatggttactctagagcaagtagaatatttacttttcttcgcatggttcatcaactatcaattgttgaggtgcaaaatggactcctctacaaaattaaaccaagtttcagaagcattaagggaggtttcattcattttagtatcttctctattaagaaatgcatatgatctgaaaaattggatagtgacccacgcaggcatgattgcatttaacgaattattaaatctagtcacctacacaaaaggaagcgaagaagactctgatgatatagaatttattgtaagcaggcttttcagcgacgaaagaatacaattactatccaacttgccaaaaattggttccaagcattcacttcaatttatgaaaagctgtattgaactaacacattcggtgttgaaagtattggaacagtattctgatgacaagacgctggtggtagaagggaaatcaagacgccgaaagaatattaatatttctgaagatgatatttctaaattgatagaagaggaaaatgtcgacagagatgaagcactggatatcctgacctctaattttagaggtgtagaggtcaattttcagaaagtacagagtaactacatgacagaacttgtggtggaaacttacatcaattttcttaaaagattccgtgagcttgacgacgattcaattaaaaaggtgttttctttttttcacagagtattcgttcaggttaaagagcagtcattattatttaggtttgatttaataatattattgagagaaatgctttcatctgatggattaagtaggatgtctcgttcaagaaaatatgtgagtcagttttcagattattttcttaccaggttgaagaaaagactgaaaaaatcaccagcttggtttgttggactactttttccaccactacacaatagtgaggttggcttttatcaaaaatatggtgaatacaatgtgctcaataatgaatcactttatgcctcatcaatatcacaatttaaaccaattcctgacgaagaggcattaccaccttcgattttacaggatatgaaatatggtatcctagtatctacactattggacgatggaaaagtcgagttactagaccaattactcaaacacattgctcacactttggatattttcaagtcatggctgagtatcaatgtaaatactggtagagaaacaacgaatccgccgaacgaatttttcacattgacaggaacgctcagtaatgatcctctatttagagataaagactatagagctttgctgtctttggtaggttacaccatccctgataaaatcaaccaaccttgctttttgggaggggctattgaaatacctgacttgactacgtcatatgagttgataaagaagtatttgtcaacaccttttgaaacaccaaacgggctgccttcttcttcatatcttgtcaggattcgttcaagaaaggaaaaccttttgaatggtgagcaagatggatgggaaggaaatgataattatgactatactgatccccacattattcccgatgatcaaaatgtatcagaaggcgatgaaacatacttcaaggacttggacaataatgtttcagaaaagctaaaaggcgtcaagctcagtaaaggtattgcaagatctaaaaagaaggaaaaaaagagagggaagaagcgagcatataggaacaacttgtcgactttcgataatgaagatggccaacaaccacattccactaaagagcgccatagtgtatttagtaaagaattcattagtgactcagaagatgatgaagatttgatgaaccctatcttctttgagaatgaaacgtacatgaggtggctattagataaaaataatggccaattgaccgaagataggtatgcacaatttgcaaaatttgctgcagaaagaatggccaatggaggtgttacgacgggagactatacgaacttgttcggtggatctgtaccaagcattagtgatataagagcagcagaaaccagttcttttgcaccagataaaagtcttatttccttggcaagccatgttgcatctgaaatgtatgctgctgatgctgaaaataatactgagctctctgatgatgatatcaacacagaaccaaaggacactttgggctcaccacaattatccgattcaaccaatgacccccaatctgatgacgataacagaaaagttctaaaaaggcgcaagctagaagaaagtgaggttgacaaagaggatgaagacgaagatgaagacgaaggtgaagacgaagatgaagacgaagatgaagacgaagatgaagacgaagaggctttcctttttcccgtcaagaaatccaaagttattttaggcgaaagtgatggtgacgatgaatag

SEQ ID NO: 3233 - DNA, 1056 bp, Saccharomyces pastorianus
atgggtcttttctcaagaaaacgagaccatacacctgctgtgcccaaggagaaacttattccatgcgataaaatattcttagaccctcccgcaaagtacggtagtgcaactccattggagccaatttccgaggatcaaaatgaaaaatatagagctgttttactgcatttccaagacgacaatttaaaattgccggaaaatattaacgagcttgacaacgggatccacaccaatgcaagacccttgagtgattgggaaaaattttggctttctagagaatgcttcttgagatatttaagagccaataaatgggataccgcaaacgctataaagggggtgaccaagactttggtctggaggagagaaatcggtcttacacatggtaaagaggataaagatcctttaaatgcagaaaaggttgccattgagaatgaaacaggtaaggaagttcttttaggtttcgataatgccaagagaccgctatattacatgagaaatggtcgtcaaaacacagagtcttcgtttagacaagtccaacaactgatttacatgatggaatcggcagtcaccgtagctcctcaaggcgtagagaagatcacagtcttagtagattttaagagttataaagaaccaggtattatcacagataaagcgcccccaatttctattgctagaatgtgtctgaacgttatgcaagaccactatcctgagagattagccaaatgtgtcttgattaatattccgtggtttgcatgggcttttctgaaaatgatgtatccatttctggaccctgccactaaatcgaaggctatattcgatgaaccattcgaaaaccatatagagccttctcaattggatgcactctacaatggtctattagattttaaatacaaacatgaggtttattggcccgacatggtcaagaaagttgacgatttacgattgaagcgttttgaaagatttgtgaagttcggcggcgttattggactaagtgaatatgataccaagggccaacatgacgagttgaaatatcctgttgacatggtcatttcataa

SEQ ID NO: 3234 - DNA, 6663 bp, Saccharomyces pastorianus
atgtttggcaaggccaagaacagaggcggattttccactgcaagatactcatccaacaataaatacaactcgctatcgaacaactatgcgcttagcgcgcaacaactgctaagagccagtaagatcgatgagatcgactcgatgatgggttttgagaggtacgtgccgccccaatataacgggaagtttgacgttaaggacatagatcagattcctgggcgcgtagggtggctgacgaacatgcatgcgacgctggtgtcgcaagaaacgctatccggtggcggcaataccggcggcaatacaaaggatggagaacacgcaacctctaatcagggtgtttccggagttgatttctactttttagacgaggaaggtgggagtttcaagtcgacggttatatacgatccgtacttcttcattgcatgtaacgatgaatcaagagttaacgatgtggaagaactggtgaaaaagtatttagaatcatgtctcaagagcttacaaatcattaggaaagaagacctttctttggataatcatcttttagggctgcagaaaaccctcatcaagttatcgttcgtcaattccaaccaattattcgaggcgagaaagctgctaaggcctatattgcaagataactcccataataaagtgcaaagaaatatatacagcgcagccacgaatacagagaaaatcgaggccaagcatttgattgaagacatcagagaatacgatgtgccttaccatgtccgagtatccatagataaagacatcagggtcggtaaatggtacaaagtcactcaacaagggttcattgaagataccaaaaaaattgcatttgccgacccagtggtcatggcattcgatattgagaccacgaagccgcctttgaagttcccagattccgcggtagatcagatcatgatgatttcttatatgattgatggggaagggtttctaataacaaatagagagatcatttctgaagatattgaagatttcgagtatacaccaaagccagaatatcccgggtgcttcaccatattcaacgagaacgacgaagtagcgctgttacagagattttttaaacatatcagagacgtacgacccaccgttatctccacatttaacggtgatttcttcgattggcccttcatacacaatagatgtaaaattcacggcttggacatgtacgatgaaattggatttgccccggatgcggaaggtgagtacaagtcatcatactgttctcatatggattgttttcgttgggtaaagcgtgactcttatttgcctcaaggttctcaaggtttaaaagccgttactcaagctaaattgggttacaatccgattgaattagatcccgaattaatgactccatatgcatttgaaaaaccgcaacatctctctgaatattccgtttctgatgctgttgctacttactatctttacatgaaatatgtccatccttttatcttttccctttgtacgattattcctttgaacccagatgaaactttaagaaagggtactggtactttatgtgaaatgttgttaatggttcaggcttatcaacataacattcttctcccgaataagcatacagatccgatcgaaaggttttatgatggtcatcttttagaatcagagacttatgtcggtggtcatgtggaatccttagaagctggtgtctttagaagtgacttaaaaaatgaattcaaaatcgatcctactgccattgatgaactattacaagaattaccacaagcattgaagttcagcatcgaagtcgaaaataaatccagtattgataaagtgacaaattttgatgaaattaaagaacagataacgcaaaaactattagagttaaaggagaacaatataagaaatgaattacctttgatttaccatgttgacgtcgcttccatgtatccaaatatcatgactactaatagattgcaaccagacagtatcaaaacggaacgtgattgtgctagttgtgacttcaataggcctggtaaatcttgtgcaaggaatctgaaatgggcctggaggggtgaattcttcccagccaagatggatgagtataatatgattaagcgtgccttacaaaatgaaactttccccaataaaaacaagttttctaaaaagaaggtcctcacatttgatgaattgagttatacagatcaggttgttcatataaagcaacgtcttaccgagtattcaagaaaggtttatcataaggttaaagtttctgaaattgttgaaagagaagccattgtttgtcaaagagaaaatccattttatgtcaacaccgtcatgtcttttcgtgatcgacgttatgagttcaaaggtttagcgaaaacctggaaaggaaatttatccaaacttgattcatctgataagcacgcgagagatgaagctaaaaaaatgattattctatatgattctttgcaattagcgcacaaagttattttaaattcgttttatgggtacgttatgagaaaaggttcacgatggtattctatggaaatggcaggcatcacatgtctaactggtgctacgattattcaaatggcgagagccttggttgagagagtaggaagacctttggaattggataccgatggtatctggtgtattttgccgaagtctttcccagaaacatatttctttactttagacaatggcaaaaaactctacttgtcctacccatgttctatgttgaattacagagttcaccaaaaattcactaataatcaatatcaagaattaaaggacccactcaactacatctacgagactcataacgaaaacacaattttttttgaagtcgatggtccatataaagcaatgattttgccaagctccaaggaagaaggaaagggtatcaagaaaagatacgccgttttcaacgaagatggttcgcttgcggaattgaagggtttcgaactgaaaagacgtggtgaattacagttaatcaaaaattttcagagtgatattttcaaagtatttttagaaggtgatacattagaagattgttatggagctgtagcaaaagtgtgcaatcgttggctagacgttctcgattcacacggtctcatgctggaggacgaagatttagtcagtttgatttgtgaaaatagaagtatgtcgaaagcattaaaggaatacgaagggcaaaaatctacctccattacaacggctaaaagattaggtgactttttgggtgaagacatggttaaagacaaaggtttacaatgtaaatatattatcagttcaaaaccttttaatgctcccgttaccgaacgtgctattccagttgcaatcttttcagcagaggtttcaatcaagaggtctttcttgagaaggtggactttagacccatctttggaagatcttgatatcaggaccattatcgattggggctattatagagagaggcttggatctgctattcaaaagatcatcaccattccagcagctttacaaggtgtttccaaccccgttcccagagtagaacacccagattggttgaagaaaaaaattgcaactagtgaggataagttcaagcaaacctcattgagtaaatttttttccaagactaaagatgtacctaaaatgggtaagataaaagacatcgaggatttatttaaaacaacttcagaagaccaaagtacaataattaaggttgcaagatccactaaaaagaaaggcgggtctaaaagaaggagaaaccaacaggaaaatgaggaagaatcactggttttgccctcagagattccttcaatggaggaagattatgtgagatggttaaattaccaaaaaattaaatggaagattcaagcaagggataaaaagcgcagagatcagttatttggcaacacaaacagtgcacacgaaagaagtgcactaggtagtatgattagaaagcaagcggaatcgtatgccaactctacttgggaggttctacaatataaagagtctgttgagccaggtgatttggatgtctttgtagccattaatgggaaagtgcaaaatataacattccacataccgaaaactatttatataaagttcaaaagccacacaataccattacagaagattaaaaactgcctggttgaaaggtcttctgcattaataccaaacaatcccaaaatttctaatcctacgactggtcagctatttaaagtgacactaccagaatctgtctttctcgaagagaaacaaaattgtacaagcatcttaaatgatgcaaatgctcttggcacatttgaaagcacaataacgcctcatcaaagagcaattatggatttgggtgcgtcagtgacatttcgctcaaaagcaatgggagcgttaggtaaggggattcaacaaggttttgaaatgaaggatctttcaatgactgagaacgagaggtacttgagtggattcttgatggatgttagttatttgttacattttccaacatcaattggatatgaatttttttcgttattcaaatcttggaaggacacaatcactgtattggttttgaaaccatccagctcggcgcaagaaataaacttctcctctttagaacagatatacacacaaatatttgagaaaaagaaaagtaaagtagaaaagttttcttacttggttgatattaaagaaaaggtcaatttcgagtttgcatattttacagatatctcaaagctgtatagaagactttctcaagaaactactaaactaaaagaagaaaaaggtttgcaattcttattgttattacaatctccattcatcacgaagcttctaagcgcaatacgtctcttaaaccaaataccagttgtcaagctttctctcaatgaaatttctcttccacagttgaattggcagtcaacgctattgaaaaaattggttaatcacattatatcgagtggctcttggatttttcatttaattaaattatcccagtacagtaatattccgatttgtaatttgagactggacaatatggattatgttatcgatgttctttatgcgagaaggctaaggcatgagaacatcgtgctttggtggaatgagaaaaacccattgccggatcatggtggtactcagaatgatttcgacttgaatacatcgtggattatgaacgacttggaattccctgaaattaataatccagacatctatgataatgtagtactagatgttagtgttgataatctaacagtaaacacaatattggcatctgcattgatcaatgacgcggagggtagtgatttggttaatagtagtatgggtatggacgataaaaattccaacagcaactctacgcctgattttgtgcaggatgccttttccaatgatgctttaaatgttctaaggagtatgctaaaggaatggtgggatgaagctttgaaggataatgcaactgcggatttattggtcaactctctagcaagttgggttcaaaatcctaatgcaaaattatttgatggtttgttgagatatcatgtccataacttaaccaaaaagtcattacttcaattagtgaatgaatttagcactcttggctcaactatcgtctatgcagataggaaccaaattttaatcaaaacaaacaagtactcacccgaaaattgttatgcttacagtcaatatatgatgaaagcggttaggacaaatccaatgtttagttatttggatttgaatattaaacgttattgggatctgttaatatggatggataaattcaactttagtggtttagcttgtgggaagatagaggaaaaggaaaagcaagattataacgcattttcggaatggcaattaaagaaatttctgtcgcctatatatcaacccgaatttgaggattggatgatgatcatcttagacagtatgcttaaaaccaagcagaactatttacaatcaaattcaggcacacaaagacctactcaaatactgaacacgaagaaacaagacaaagaagatggcattgacaactcactgaatgggttctcgcacattttctctaagccgttaatgaaaagaactaaaaagcttctaagaaatcagcaagaatttatattagatccacaatacgaaggagactacgctatacctatacttcctgggtctcatttgaatataaagaatcctcttttagaactcgtcaaatcactctgccatgtgatgctgctatcgcacagtacaactttggaaataaggactttgagaaaagaattgctgaagatatttgagatacgtgagtttgctaaggtagcagaattcaagaatccaagtacaagcttagtggctccagattttctctgtgaacactgtttctttatctctgacattgacttttgtaagacagatcctgattctattttctcttgtgccaggtgtcataagggttttaacagagtgttgttacaagagcacttaattcaaaagctgcgttccgatattgaatcttatttgattcaagatctgagatgctctagatgtcataaagtgaaacgtgactatatgagtgcacactgtccctgtgcgggggcttgggagggaaccgtacctagggactctattgtccacaaacttcacatatttaagcaagtggccaagttctacgactttgatctactattcaactccatatctgatctgagtatttga

SEQ ID NO: 3235 - DNA, 2304 bp, Saccharomyces pastorianus
atgaatatcttcaccagacctctgagaagatacgcagcgatgtctacacccaaggttgtccaacccaaatggaacgttcctgcgccacaagctgagaaagctgtgttgaaattgtacaacagtttaacaagatccaaagtagaatttattcctcaatcaggtaacagaggggtcacttggtactcctgtggacctactgtttatgacgcctcgcatatgggacatgccagaaattacgtttccattgatatcaacagaaggatcattcaagattacttcggttacaatgtgcaatttgtgcaaaatgttactgatattgatgacaagatcattttgagggcaagacaaaactatctattcgacaacttcgtcagagaaaacaacaccgagttgaacgctgaggttgttgataaggtcaaaacagcacttttccaatacattagtaaaaacttcaccattgaaggtagtgaaatcaaaaccattgaagaatttcaagtgtggctatcgaaggctgatactgaaactttgaaatcagaaaatcctaagttccctatgcacgttactgcagtccaaaatgccattgaagcaatcactaagggtgattccatgggcccaaaacttgcctttgaaaaagtcaaagatgtcacagttcctttactagacgaagaattgggctctacactcagcgatccagagattttccgtcaacttccagcctactgggagcaaaaattcaacgatgacatgttatcattgaacgtgcttcctcccactgttactactcgtgtttctgaatatgtcccggagattattgaatttgtacaaaaaatcattgacaatggatacgcatatgccacttccgacggttccgtctattttgatactttgaagtttgacagatcaccaaaccatgactatgccaagtgccaaccatggaataaaggccaactagacttgattaatgatgctgaaggctctttgagtaacttcgccgataacggcaaaaaatcaaacaacgattttgccctatggaaagcttctaaggctggtgaaccagaatgggaatcaccttggggtaaaggtagaccagggtggcacattgaatgttctgtcatggccagtgatattttgggccctaacattgatattcattctggtggtgtcgacttagccttccctcaccatgataacgagttggctcaatctgaagcatgttttgacaataagcaatggattaactacttcttgcatacgggccatttacatattgaaggccaaaagatgtctaagtccttaaaaaatttcatcaccattcaggaagctttggaaaaattctctccacgccaattgagactagcctttgcctcggtgcaatggaacaatcaattagatttcaaagaatctttgattcatgaagtgaagtcatttgaaaactcaatgaataatttttttaagaccgttagagcgttgagaaacgatgcaacctcttcaggtcacattcctaaaaaattcggttctttggagaaggaattattggccgactttaccgaaaatgagtccaaagtccatttggcattctgcgataatttgtccacacccgtagttttaaagactctgagtgagttggtgaccaagtcaaacacatatatttccaccgctggatctgcgttaaaaattgagcctttgattgctatttgtaattacgtcacgaggatcttgagaataattgggttcccatcccgttctgataatttaggttggattgcacaatcagactctaatgagcaatcatctggttcattggaggacactgtgatgccatatgtcaagtgtctgtccacctttagagatgaagtacgttctttagctatcaagaaagctgaaccaaaggaatttcttcaactaacagacaagattagaaatgaagacctattgaatctaaacattgcattagacgatagaaatggacaatctgcattgatcaagttcttaactaacgatgaaaaattagaaatcgttaaactaaatgaagagaaactggccaatgaagaggccaaaagacaaaaaaaattggaacagcagaagttgagagagcagaaggaaaacgaaaggaagcttaaggcccaaaccaagccacaagacatgtttaaagatgttggtttgtacagtgcctgggatgaacaaggccttccaacaaaggataaagatggtaacgacgttaccaaaagtatgacaaagaagttgaagaagcaatgggaacaacagaggaagctacatgaagagtattttggtaaaaaaaactaa

SEQ ID NO: 3236 - DNA, 4764 bp, Saccharomyces pastorianus
atggcattttggttacctcaaaatatacaaaagcggctgttgctatatgtcctccagcaaatatcgctattttccaatatagatctatccaacctggatgtctctataggctccaagtctcatttctctttccatgatgtgaatctctcactcgatgatctaaatatcccgaatgtgcaaataaacgagggcatagttgacgagcttgtactaaagctaactgtctctggcggagtggaaatcgatgggtctggtttgagatttgtcataacacctttatattccacaggttcgcaagaactcccttctgactttttagctaaaagcattcatgatcttacaaattccatgctacagtttaccgatcccttgagctcgcaaaataacaggtataatgaagatgacattagttcttcagatagtagtggtgatcttggttctactacagaaacgtcgaagacgagtggaaatagttcttattcacttcaaaatatgcgaaataaagcccttaatgttgccctagctaaattgaaaatagcattgaaggatatcacgatatgttttataatgaatgaaacggatccctctcaaagtattgttgaagttcatctagaaagcatacaactcacgacaacgaatggaaacttacggcatataaatatcggaaacttaacagtttcattggtacagaaacaaaccgtatctagcgcttcctctcactcttccaataatgatgatctctcacaaagtgtttgttactctaagacggaggcaacgtcactctatatgagtgccatggaagagcaattaaatgacgacgacgaatctgaaaccacacagacacaacaaaatgatgataagtccaaggaaaccctaatggaaataaacgatttaaatatagcatttaagggtctatcttctatcaatgatctcaaaatgtatgacatcgctatagacatacaggatgtccatctaacgatatataaaatcattaaaacaaacaaccccattttgaaaagtatcatggagatcattgtcactcatttggataatagtgatgaagaacccacagaagatttacatgaagtgcaaaaaacttcttttctctcctctgtggaagtcaaatgcatacacttgaacgtttctgagggtatcacagcaatcttgaaaacttttgaaatggaacaaaaactaaatagcgttctagccatttctctaggctctttttattccaattcagcttcattgacaattaaccataaaaccaagccattattcaccggtgaactaactcctctaaatgtcagcttaaatattgccgatgaattagagattgccattgacaagactggcatgactaaactactcgacattcatcagtttttttcacaatgcatgaccatttatcaaagtaaatcaaaaaagctggcgcctaaaataacctcaaatattgcaagaaatacaaaattaactttcaaagcactgaatttctcgattaaattcccatactcttcattatgtttccaggcctcaccttttacttacgattctgaaacgtgtgaattccacatcgaactggtagaagtatacaagaatttcccttctcgatctccaaaagtgttaacaatgtcaaatattacaatttccaatccgcaatcccgtttgcagctgggatcatatgacgatacgttaaaagaggcactaatatatagttctattcatgccagcatcgaagaggtaacagcacaagatgaatatttgggaatagtgcaattagtgacagatatctctgagattgcagaactttttacggatttaagtactgaccactcaagcaggtcaaaaagtaaaagaggctcgtatttgcaaaggagcgttagggtattgaattcttctaggttcgtttacaaacagagcacatccgccattttttcatttcaaataaattccataagattgaaactattggatattatagaaccgcagtttggttctatagatgcattgctatcaaacaacttctttgcaattacagaggattctcagatagtctatttctcaaagaacctgctgatagaaagaaaatcaacatcactggaggaaccacaagaaattgtgtcaatgatcttaaataaaaccgttcacgagcccgttctatatcttcatagaagggcaaacggaaagattagaataattcttaacaagatgcgtatccattattatgcaagatggttagagattttgaaaaagaacattaactcggataatctcggttcaaaagatgcatcagtatctcaaaagcctagtaaaaatcaatcagactctggatttccctgggaattgaaatgtctagactgtgcactaattctacatcctttcagattaaaaagcgtgatggttattgtactcgataacttgacatctagtgggagttcgtatattccgcaagtgaaacttctttcaaaagtgaatacgttatttttgatagacgactactcaaattttaaaatccaaaaggataagaattggctcaatttaataagtttctatgccaatcaaggcttctcggcaattggaaaaatagacactttgaattttatgataaataaatccgatgaaacgctcttgttagactgtaaaatagggcaagttggtctttcattgtgcgcagattcctttcaaactttttgtcagctttgcgtcgatttgaagtatccacaaacgttccctgatgagaagaaatttaaaacagagttgagaagtcccattgatgtattcaaagatattgattgtgatctcttcaactctgctttcatactagagaatgatggcctccaaaatgattatgaatcggtgcatttagtggatagtttccttgataaggctcaggaatttaacagcggtgccaggagtaaactttcatctcaaggctcgcacgagccggattcttcttctggtactggaacggatgccattcttctccctcatgagagttatttggactttgcacaatcaaaggatgatgatattccaaaaatggcctcggaagagcaagaaagaaatgtagatataagaggtagtattgacatagagaaagttatcgtaaagctgtttgatgggtacgattggaaatacacccggaaatttatcacgaataccgttgataaattggatagagaactcaatgaagtagaagaaaagggaccgaaatcgaatattcaatcagaggcaaacatttttgactctatatatatatctgctaataagaataatgtttccgatttgaagaaaaacttggatggtgagatccagggagttcaaaattcctttattgacgtatccaaagttaatttgcgaccttccaagcattacaaagccttgattcagttgaacaaattgcaggtgaatttgaagacttatcgagtagatgaaccaaaggaatcggaatcagataattccacggatattttgaacaaatgtgtgatttcggtttacgagttcgaagttatagataatgttcctacatcgacatggaataagtttgtaactttgctgaagcatgaaccatggccccacaattcgccaatgtttctcatgaatcttgaacttatccgtccaattgactttttgcaagcggtggaattagtgatgcaactgaaaattgcacctttacggctgcatgtggatcaggatactttagaattcctaataagatttgggggttttaaagataagaggtttgaattgattgacgagtatccggacgttgtatttgttcaaaaattttgcactaattcaattaagctaagactagattataaaccaaagaaagtcgactatgcgggtttgagatcaggacaaacttcagaactaatgaactttttcacgcttgatgggtccaaaattgttttgaaaagcgtcgtgctatatggattgaatggatttgatgaattaaatgataaattgaagggtatctggacaccggatattactaacaagcagttacctggtgttttggagggtttggctcccgttaggtcgttcatggcgattggatcgggtgtaaagacgctagttacagtactaatgtcagaatataagcaagaaggccatttgggtaaaagcttgaagaaaagtggtaacgtctttgtgaaaactacgactggagactttattaaattgggggtcaaattaacgtcgggcactcaagcaattttagagaacaccgaggaattatttggtggtgtcggttccaatggtaggatgtacgatgcgtcgaaggcggggtccagtggtgatggtgacgatgatgctgctgctgtattagatttggacgcgatattggaagaggaccagttggtcggtagtaaatattccagaattagagaccatgaacccacagtggtagtcatcgacgtgtcttcgtcgggaaacccgaatggggagcccaagatagtgagtctatatgcggaccagccgttggacgtgcccacgggcttgaaagaggcgtatagttcattagagaagcacatgcacattgcttacgacgcggtgtggagggccaagggacagatgaaggacgatagacgaggcggacccagtgccgcagcggtttatgttgcgagggcggcgcctgtggcgataattcggcccttgattggggccaccgaggctgtttccaagactttgcaagggattgctaatcaagtggataagacacacaatgagcaaatcaacgacaagtataagtccaaccggatttga

SEQ ID NO: 3237 - DNA, 2928 bp, Saccharomyces pastorianus
atgacggtattaggagagcatctagtgagctggtccaagactggaattatcgcttacagtgactcacaatcgcaggatgccaatatctgcttgacatttttagaatccattaatgggattaattggcgatttcatactccacaaagatacgtcttacacccacaattacacgaagttccataccttgaaaatggcagtgcttcaagtgggcactcgacaactgcttctgtgaacggatcaactacagccggtgtaggaagtactccgactgttggaagcagcagcaataaatccactccacagtttttctataacatatcatccattcactggaacaactggtttagtttaccaggagatatgttagctgtttgtgatgaattaggtaatatgactatgttaattactgggcaacgacctgatcgtgccaccacatatgaaaaactaacaatggtattccaggataatgtatataagatttacaatcatgttatgccattgaaacccgttgacaagctaaaacctatgaacattgaaagaaagcaaacaagaaaggaatacaatacatccatccttgagttccactggctgacatcctctaaatccgtaattgtttcccaattttgtgcatttgatagtagttccaacacatacagaagtagagcccagcaagttcctccatacggtgtatttcatcccccatttataaaatatgcatgcttggcaattagaaaaaatggtcaaatcgatttttggtaccaattctcaaactcaaaggatcataaaaagataacgttacaattgttgaacgcattaaatgaaagatctaaggatcttcagtggcttgaacatgctaaaataacgcctatgaatgacgatcaatgtatgttgataactacatactcaaaactgtcaaagaatgtttctttctacaagctacatgttaactggaaccttaccactgccaaaccaaacgtcttgaacgatccatctttaaagatacagtacattttgagtactactctagatccaacggatggtgaaggtcatgtgttgaagttaacaaacttgcatatcgtgtctaaatcctcgatcgaaaaagatccatcgccagaaattcttattttgtacaatgtgtgcgaaacatcaaaaccattagtgaaaagataccgattggcccaaacacaacttccggccgaatatttagcaatattgaaaccagacttaaacatcgatcgaaacaattctacaagccaaatatttcaatcacgccgttataatcttcgtcagcacactgatatagtccttgacaaaaaggttatcttaataacttctgaaatgtttgatggattcgtttcgatttattttgaagatggcaccattgaatcctataatcaaaatgattggaaattggaaactgaacgacttataaatcaaaaccaattgggaaaattcaagaatattattgcatctccattaagcgccgggtttaattatgaaaagcttcctttaccaccctcactcgagtggatgaaagtttcaccctctatgtgtggggttattatcaaacaatacaacaaaaaacggcctgaattttatgctgcagctcaaagcaattatacagatcctgagaaggattccataaacgcgacatcgttggcatttggatatgtaaagagtttacacaaacaaatatctgccgaagatttaacaattgctgcaaaaacacatatactcaagatttcatttctggacaagaacagggccaaggaatttatcacaacattattaaagagcttgtacgcttttttcaacatttctcctgatgcgccaaaggaagttatggataaaattattacaagtagaccactacaaaaaattatgctattgcagctagaacttggaagttgcttttcgcacgataacattgaacaaatggcaagagttatcctctatttgaaaaatgttttgttcgcatttaacggtgtagcgaggaattttcattttgccattgaacaaataagcaataactctaaccaacaacaaaacccgaaattatttcaaaccatattttcaaaacaggacctcatccattcgttgattcccgttgcgaaatggttcgtaaagttcgttacttatctgatccaaggaattttaattttaattaacgatcccacaaatgaagactatactcttgtccatggaatatttggggctaagatgtcgagaacactgatactatccatccttaacgaaattaagaaagtcacccaaatagttgcaaagtttccagaaaattcatacccgattctaaacgaatcatctactttcttaaaacttgttttatcagagtcaccggtggatttcgaaaaatttgaaacatttctagtcgatgtaaacaacaaatttattgccctgtctgaacagcaaccatcacaggaaagagagttttcacttttagtaaaagccgaaatcccccctgaatttgccaaagtgggagatttccttttgcagtacgcaaataatgcagtcatttctcacgccaatgcggctgcagtgtattttgcagataccagtggtttaaagatatccaatacagagtttttcaatcctgaaatattccatcttttgcaacccttggagaagggactgattattgatactgatgaactacctaaaaactgtagaagctctagatctttcagcaaactactgtatgacgacgtaacctgcgaccaattgagtacgtcagaaataaatgacggaaagctgaagagatgtagcaggtgcgggtccgtgacaagggcaggtaatgtaatatcgggtgacaagacaattgtcccaaccagcatacagaccaaaagatggccaaccatgtacacaaggttgtgcatatgttcaggaatgctattcgagatggaggcctga

SEQ ID NO: 3238 - DNA, 1035 bp, Saccharomyces pastorianus
atgaataacaacggtaaccaagtatccaatctatccaatgctctccgccaagtaaatatagggaatagaaacagtaataccactactgaccagagcaatataaatttcgagttccctgccggtgtaaatagtaatagtagcgttcaaaataacaacaatggccgtaatggtacccaaaataataacaacgagaacaatatcaaagatactctagaacagcatcgacaacagcagcaggcattctcggatatgagtcatgtggagtattcaagaattacaaagttttttcaagagcaacctctagaaggatatacccttttctctcacagatctgcccctaatgggtttaaagtcgctatagtattgagtgaactcgggtttcattataacacgatttttctagatttcaatttgggggaacacagggctcctgaatttgtctctgtaaatccaaatgccagggttccagccttgatcgatcacaacatggacaacttatccatttgggagtcgggcgcaatcttgctacatctagtaaacaaatattacaaggagaccggtaatccactactttggtctgatgatttagcagaacagtctcaaatcaacgcatggctgttctttcagacttctggtcatgcaccaatgattggacaggctttacattttagatacttccactcccaaaaaattgcaagtgctgtggaaagatacacggatgaagtcagaagagtttacggtgtggtagaaatggcattagccgaacgtagagaagcattagtgatggaattggacacagataatgcggcagcatattctgctgggacaacacccatgtcacaaagtcggttttttgactatcctgtatggcttgtaggagacaaattgactatagcagatttagcctttgttccatggaataacgttgtggataggatcggcattaatgtcaaaattgaatttcccgaagtttacaagtggaccaagcatatgatgagaaggcctgctgtaattaaagcattacgtggtgagtag

SEQ ID NO: 3239 - DNA, 1803 bp, Saccharomyces pastorianus
atgaagacttgctattacgaacttttgggagtcgaatcgcatgcttctgatcttgaattgaaaaaagcgtatcgtaaaaaagctttacaatatcacccagataaaaacccggataatgttgaagaggccacagaaaattttgctattattcgagctgcttatgaagtgctgtctgactctcaggaaagggcatggtacgattcacacaaggaacaaattttaaatgatactccaccggatgctgatggatactgcgattatgaagtggacgctgctgtcacaggtgtcactgctgatgagttgcttttgttcttcaattctgccctatatacaaaggtagacaactcggctgcagggatctatcaaattgcaggaaagatatttgctaaattagccaaagatgaagtattgaatggtaaacgtctgggaagattcaacgagtatcaagacgatgtctttgagcaagatgtaaataacactgggtatttaaaggcgtgtgataagtacatgaataaaaccgatatgcttctatatcctttattcgggtattcatctacaaactatgactacttaaagaacttttataaaatttggtcgaccttcaatacattgaaaagcttcagttggaaagacgaatacatgtattccaaaagttatgacagaagaactaagagggaagttaatagaagaaacgagaaagcaagacaacaggcccgaaatgagtacaataaaacagtcaaaaggtttgtcgtttttatcaagaagcttgacaaaagaatgaaagaaggcgcaaaatttgcagaagaacaacgtaaactaaaagaacaacagaggaaaaatgaattaaagaattcgaggaataaagagaaatctagtagtctgaacgacaacgaatgtaaagccagtttcaatctacagagttggcaaactgtaaaagaagaaaactgggatgaactggaaaaagtctatgataattttggggaatttgaaaactctaaggatgataaagaagatgaggtattgatctacgagtgtcttatctgtaataaaacattcaagtctgaaaaacaattgaaaaatcacacgaacactaaattgcacaagaaaaatatggccgagattcgaaaagaaatgaaagaggaaaacataacccttgggctagacaatctttcggatcttgaaaattttgattcagcggatgaggttgttgaagagaaagataatattgatttggaagcattacaagctgaacttgctgagattgagagaaaactagcagaaagttcatctgaagatgaaaccgaggacgatagtgtaaaagtggaaatggaaatagaggtggaagacgtcagttctgatgaagatgtgcaagtacgcacgaaaggtaataataagaagaagaagaagaagaagaaaaacaagaagaaagacaatgcagagacagaaattgacgaaacagattcatctgacgacgatatggataaaagaggcgacgaattgaacgatcttctagcgtcgttgaatggcaacggcttccaaagcgacgacgatgaagattggtctacaaaagcgaagaagaaaaagggtaaaccaccaaaaaaaaactccaaatctgcgcgaagcaccccatctctaactactccattaccttcagcatctccatttgccgtgatcgaaaaatgcggtacctgtggagaatcatttgatagtcgaaacaagctatttacgcatgtgaagatagcggggcatgcctcggtgaaaagccaggcaaagagtaggaaagtcaaggtaaacaagaaatag

SEQ ID NO: 3240 - DNA, 1761 bp, Saccharomyces pastorianus
atgaataataaaaagacatcagtagaacagctcatctcatgccctatctgctccaaaagggtattcttttctcaaatcaattcacatcttgatacatgtggcaaagaaaagtcaaaatctgccagtaggccacaaactgtgtcaagtcttttggcaggtccgaaaaagaggaaacaaagctgtaccgagaaagttatagatcttgataaggacgatgatgaagctgtagctgttgtaaagaatgagtacgagagcattgagaatgttgaaagcgaaaacaaaagattcaagacagcacaatctacagaactagggacgacaatagtgagtccaacccttaataaaaatcaacagtatcataacgactatgaaatcagatggctgcaaaaaataagccatttaccattgagtgaaaaactaaggccgaaagagttacgagaatacgttggacagcagcatattctctctcatgagaatggtacgctatacaaatacataaaacaaggtacgattccatctatgatactctggggtcctccgggtgttggaaagacatcgttagctagactactgacgaagaccgcaacaactagtaatagtgaatcgaaagctggttccaaatattttatgattgaaacaagtgctacaaaagcaaacacgcaagaattaagaggtatatttgaaaaatcgaaaaaggaatttcaattgactaagagaagaactgtactctttattgatgaaattcatagattcaataaagttcaacaggacttattattgccacatgtagagaacggtgatattgttttgattggtgcaacgacagaaaatccgagttttcagttaaataatgcactgattagtagatgcttgatttttgtcttggaaaagttgaatgtcaatgagctttgtattgtcctatcgaggggtattgcgttattgaataaatgcaggaaacagatttggaacgttgaccgtcctttaaaactatctagaagcatatcggaatatgtggtagatttgtctgtgggtgatacaagaagggcactaaacatgttagaaatgatcgaagtttctacaagggaacgtaaatcggacaatgaagaattatccatcgatgatatacgagacataatcaagaataacagcagcaatgggttgaatacctattatgatccaaagggcgataaccactatgatacgatctcggcgtttcataaagccatcagaggaggggatgaaaacgcttctttatattatttagcaagaatgctgcaaggcggagaagatccattgtatattgccagaaggatgattcgaatagcttctgaagatatcggaccacgggataactcattattgcctttggctgtcgcagcgcatgatgcagtgatgaaagttggtttacctgaagcagaccttgctctagcacagtgttgtgttgctttggccagagcacccaagtcagtggaactctacagggcttggaaaaagctcaaggccatgatgaacgaaaacatgtatagtttggcgagcagtgaaataccgatgcacattaggaatgcgccaactaaattgatggaggagttaggatatcataaaggttacaaatacaatcccgattacatcagtggcatagtccagcaagaatactttcctgacgaagtccttgagaaatgtccaaataaggatgatttgaagtttctggatggtaaacacttgggagataaaaaagacccagatttgaaagagaccaaatag

SEQ ID NO: 3241 - DNA, 591 bp, Saccharomyces pastorianus
atgaaaggatatcctgggcacattgattggccttccaatgcaaacatcaaaaggatggagaagataaacccgactttgaagactattaagaccttactatacaatggaggattaatttatgcgttcttgtactctgttgtcgtcatgttcgtcgaaccgatactgcaaaagcagtatttgcaaagacacgatttatctttatcgactttattgcatttgaggagatgcatcgcacaactacaaaaaaagctaacgaagactccggtatctgcgctagggtacaatgaacatgataaatatatggagaggtccacgcagacgtcagatgataatattatacaggaggataatagccattggccagaaataaatgttcaattgcaaagcgtgaagcaggaattacaatactttaacaaattttcaggccaaacatctgaaaccatagaagattttgtattccaaactaaaatggtgactgatcaagttcaagtaacggataattctcaaattttctcaaataagtcaagagatattattcagggtattcgggagatgaaaggttggtttgttaatggtcaagtgccaaggtaa

SEQ ID NO: 3242 - DNA, 255 bp, Saccharomyces pastorianus
atgcctcccagaagtttagaagaatggttttactataaactgttgagtagtccaggtttccacaggtttgtacgaaaggtatataggaaagtgaatggtattaaggaagatcccttcaccgatcagccaaccgcttctcaatatctttacaagccgacacaaacacagaaatttaaagctcttcgtcttctattttgggatgaaatgagatctaccttcggattcagaaggaaactaagcgaccgctttaaatga

SEQ ID NO: 3243 - DNA, 879 bp, Saccharomyces pastorianus
atgaatacaggaaatactctggatagtaagtttgtgaccgaaggttcgtggaggcctgagttatttaagggtaaagtggcatttgtcactggcggtgctggaaccatatgccgagtgcaaacagaagcattggttcttctcggttgcaaagctgctattgttggaagagaccaggaaaggacacagaaagctgcaaaagagatttcaggattggtgaaaaacgatgatgcagttttgcccatcgcaaacgttgacgttcgtaattttaaacagatggaggatgccgttttgaagaccgtaaagaaatttggtaggatagattttgttattgccggcgctgctggcaattttgtctgcgatttcgcaaacctctctccaaatgccttcaaatctgttattgacatagatttattagggagtttcaacacggcaaaggcatgcctaaaggaacttaaaaattcaaaaggttctattcttttcgtctctgctactttccattattacggtgtacctttccaaggacatgtcggagccgccaaagctggcattgatgccttggctaagaacctagcggttgaattaggccctctaggaatacgctccaattgcattgctccaggtgctatagataacacagaaggtatgaaaagattggccggagccaagtataaagaaaaggccctggcaaagatccccttacaaaggcttggatctacaagagacatagccgaatcaaccgtctatattttttcgcctgctgcgtcttacgtcactggtactgtcttgattgtcgatggtggtatgtggcatttaggaacttattttggacacgaactatacccagaaaccctagtcaagagtatggcatcaaaactgtaa

SEQ ID NO: 3244 - DNA, 1689 bp, Saccharomyces pastorianus
atggggcctccgagaaattttaagcattccagtaagggcaagaaacacaagaatgaacagaagccattgatcacgcaagaagacttttacttggccgcgatcgactgcgaagagcaggccgaccggtggttgctctcggacatcaagaaatgtttgcggttctatctgaaggccctggagtactacgagaacgggcttggtgctctagattccacgccggagggtaaatacaacatttactacaacgagacacggctgtttctacagatttatacggactatctggccaacaacggctatatcaatatcatgcagtatgtgaaaatggacgacatgcctgatctttccagtctggtgttgtctttgccgcagatcactcaacggtttgaaatcgtttacgaaactttcccgcagcaaagaacgtgggatcttcagttcaatctcttgacgtgctacctgactctgttagagtccatggacgacgtctctcaacccaccgtgtctttcgaaggttatgacatcttgaacatgacgaacaagtatattgaaattttccaacatctggttggctatctgcttcaagaactacagaactggggcgattctccgccgcaggaagccagtgatgcggatatcgacttgcaaagagacaccttggatgaggacgcagagcgcattacaagggacggaaccgggatacgaaccaacggccaatcggaaccacaggcggagacgatggaagtgtccgaacaagtaaccccgtcctcccttactgatgtactggttaactccttgaagttcaatcacattctggtggaactgctcgttgagtcgaaaatacctaccgataagtgtccggaaaaggaactcttgaaccctgtccaagccaatttcttggaagacacaaccaacaagtttttctcacaattaaccgatatcatagactctatttccactacaattccattggatctgaaggagatcggtttggtcaagactttgattcgaggttcacaaattgtgggctctggtgatctcgaatccttgcaatgtttcgttctggaagccgcctcccttaccgacttgctagatgacaatgacgtacagggcaagatcgatctttcgttgatcagggtagatatcgttgaatttgccatttcgtgtctaaaggaatgttcatcagagactggttggaaactttccggcctgttggataaagcccttacagagactagatcactactgacaaatcagagaaaccacatcatatttgtgaaaaaccagagattgaacgagcaactcagccatgtggtcttccaactctgcgatgtcttggtgaattcttcggataacgaattaagaaggtacgctatcaagcgtgctagtgaatcgcagcaaactcccgacgaagcacgtactttagaaatactgatgaagaatgctaatgttttcttgagcaatgcggttgctatctcatcgaaaccttgtggcttacaagaaacgatcatcgataaactgaaaagaaactatattcataatcaagctaaagagagactgcttttcctacaacacttagaacagaagtcaaatgttggtggtgatagcgctgttatgtcatcgtcctcttcctttttcacgcttaagtttgatgtgccacccgatcaccccttttatagccactatttttag

SEQ ID NO: 3245 - DNA, 1677 bp, Saccharomyces pastorianus
atggatgaagaagtcgtttttacaactaatacctcggggacaatatcctctgtgcactcattcgaacaagtaaatttgagacaatgttctacccaatctagaaatagttgtgtccaagtgggcagcaagtacttattcgttgctcaagcacaaaaggcattgatcaatgtttacaacatgtcaggttcattcaagagagagtctgtagaacagcgcctaccattacctgaagttttaaaatgtctagaagtggttcaaaataccggtgtacagtacgaccgtatccatggtgtaaaccacaacttgccagagttcaatcttccgtacctgttgcttggttccaccgaatcgggtaaactgtacatatgggagttgaattcggggattttattgaatgtgaagccgatggcacactatcaaagtatcaccaagattaagtcgattttaaacgggaagtatattgtcacttcaggtaacgattcgagagttattatatggcaaacagtcgatttggtatcggcatcgaatgacgagcctaagcctatctgcattcttcatgatcatactttacctgttacagacttccaagtttctaccagtcagggaaaatttttatcttgtgctggtacaaaactattcacggtatctcaagatgctaccatgagatgctacgatttgagtctaataggttctaaaaagaagcaaaaaaagcaagaagaagacggtaatgaagttagtatcggcaaagcgcctagattgctcgctacatttacattaccttttgccattaaatctatatccctcgatcctgctgatagggcatgttatattgggactgccgatggctgttttgcactaaatttgttctataagttaaaggggaacaccattgttaatctgttacaatctacaggaatgaacactattcaaaaaggtagagttttttcattggtacaacgcagtttagtaactggtggcgaaaatcaagatttggattcattatattcaataggtcagctggtttgcgataagcttttggattctaacgtgtcgtgtctcgaaatatcaatggatggtacgttacttatgatcggtgacactgaggggaaagtttccattgcggaaatatactcgaaacagatcattagaaccattcaaaccttgaccacgtcacaggcttctgtcggggaagtgactaatattctagtaaatccttacagaactgaaagtggcgaccaactgtttgaaggggcaactacaggaaaacataccagcggtagtaatggcaataactctctaaagataccaaatctacaaagggttatatttgataatcaaaacaaaagcctctcgcacgatatttggtatcagataggagagccagaaaccgaggcagatcctagtttagcgttaccattgaacgactttaatggctatttggaacatatcaagtcccaagaatccatgttcgcacatatgggcaggatttcaagtgacgtgaaagtggttggtacagaaacggacgctgtctcatcttttgacgatcaaaccgctaaagatgaagagattactgaactcaaagctaacgtggaggcactaactcacgcctacaaagaattacgtggtatgcacgaaaagctatacgaggagcatcaacacgtactcgacaagctttag

SEQ ID NO: 3246 - DNA, 5223 bp, Saccharomyces pastorianus
atgacttctacaccgtgtattgggaatgattgtttgccaagggtatctggcgataatgcttctgattggcagctgcaagataatataacaaacaagccagggggtatagacggagaggtttggctgtcgagggacggtctgcgcgtgaagtggtgtattgaagatcaatgcatacgtcagtttgcttataaccagaagatcatcaaagccggctatatcgacttcgaaaagacgtcggactgtttcgtggtggtgctatctgatattgcgcatgtatatttcctacccaagggcaatgccacgacggtgtgcttcccatttttgatcggaaatgcgttttggtacgctaatggagtgatcttggagagagacacttctgctttcttcatggattgctctactgattgtaagcccatggacttcgatttgaagcataaatacatcactttaacggatccaatgactccttttggccttatttccatctcaaatacttacaagggtggtataaatagcgcttctggtaataaaagcgatggtttacaggacttgcaacttgtgctcttccccagcgacaaggaaaaatacatagcagtatttttagaccggaattctaaaattttacggttttattatagcagagttttatcatcagatcagtcacgaaaaggagagctaacgacctcttcgacaaagaagagcggtttggacaccgcaagtaatagccataagactaacggaattactaagaacctacgcaaattctcacttctgacgcgtaggacagcatccataaactccagttcacacgattgcaatgcaactgaaagggtccttagcggcactctaggcaacgccccaaacaggacagatattttcgctcttccgtcttcatcttcaagaagaagcctatcggcaaccctagatagaatggggaacaatatcgccatgaataatagagctactccttcaccctttttcgatttctccacaaacgctggggctcattcaaatatcaccccagtatcacaacctatgcaacagcaacagcaggaatatttaaatcaaacagcatcttcctcgaaggatatcgttttaacagaaatatcatctatgaaactaccggatgatattatattcacttcccaaagcttgagctctatattgagcaccttgaagtttttgtctttgagatttggaagtcaagaagcgcttttaatatttcatgagcccactcatttttgcaaaatctggttaattgatcttttaccagatgtattggattctattccatttaaaatatacgggaactcgccgcaaaacatgattaggctagaaaatctaaaactcaaagacccatcaagaataaagactataaatatacataagcgtcttaacgggtgcctgattatagtattacaagaaccgaatgggggagaatacgagtcatttttacacaatccatttattaaaatatcatcgcctttattaactgtttccaaagagcttactgaaaaaaatctggtcccttgcttacagcaatcgttcccatatcctgagactagcttcactaagctttgtttcgaagctctcaagtatatcaccccccctgcatttaacatctcattcatatttatatggcaatttgcatattcactgctaccttcaaggattagtagtgaagttggaagcttaaaactagagcatgacgctttttcattagtcctttccttattgattctgcaggtacctggttcttccactcaggaatataaagattataaagaaatatacgaacacgagctgtttcggcaattaaagcgggatccggaaacaaccaactctgttctaccgaagattgttatcggattgcatttgatacgagaggaatactccttgaatatcctgtgtcgcactgagtatgcattgttggggcaatttcttagctttgctaccgccgttatgggctggcctgatctatggcaaaggtattacttaccaaatacggatctagaatcgaaaagccaactactcccaagcgaacgaaactcagcttttgttcatccgctagatgaaccgccctcgattacaaaatcattatacagtataacggaaaacagttcaataccgttatgtccattcattagtttctcgaggcttgcagcaacagacactcaagttgaattgcgcatcactccgagaagtttcaaaattttggggctatatgaactagtgcactccgctaattttttaccggactatattttaggtattctttccagtttgaaaatagaagaaaacgaattccaaacttatcctttaggcattttggttccactacaaaatatcttgaaaatattggaagataagctatctcaagttcaggacaatttagagttgcttgatagggcagatttacaaagatgcagtgcaataatcaaaggcataaaaaatgattctcaggaaattattaaaagaggccaaaaagatggttctatatcgtacaagctaccggtcaccaggaatagaggctctttacgtaagaaacccaatgatatatttacagtattatccgagattgtgaaatgtgcaagtcaagttccactggatggatctgctatgaggatgtcaaacatcgaggacgatgaggatatcgatgaggggcgttcgctcaaactaaatgcagggctgatattttcagaagataaaagatttagccatgttgtatcattattagcctattataggcctacgcagacgcaatttttcaccactaagacagagtatgcccaagtgctatcccaaaagaaatattttgctaaaataatggcgttaagaacttgtacgaatggtataggttggggtgctgtggcatacgctacagaaaaaccaatatccacccaaaaatgggtggtccagcctctcaatatgatttcagtgtttcctgatgacacaaaaatagctgtaaaggtcccagaagatattggtcatgatattgctaagtgggggcagtttcatgccggggttagttctggtctccgtatatctaagaaggcaagtggtatcacaggaagttggattgcgtttaataaaccgaaagaactagatgcataccatggtggtttcctttttggtttgggacttagtggacacttgaagaatttagaagaatggcacatatacaattaccttagtcccagaaatactcatataagtattggattacttctcgggatgagttcaagtatgaaaggcagtatggattcgaaactaataaaggttatcagtgtgcatctggttgcatttctgcctagcgggtctagcgatctaaatatagatctaaaattacaaaccgctggtattataggaatgggtatgttatatctcaactcaagacacaagagaatgagcgattcaatttttgcacaacttgtgtcactacttaatgtcaacgatgaactggtcgctgatgaagagtataggttagcagcaggcatatcattgggtcttattaatttgggagctgggcaaaggaaatcaaataagtgggattcatctttactgaggttgggaaattatctttcggaagatatttatgactcaaatgatgttgagcaaaatgaaatgtatgaagaacttactacaaagttattggatattatcaccagtacatatgatgtggaaaaggattggataccagaaagttcacaaattggtgcggtgattgcgattatgtttttgttcttaaagacaaacaattttgagattgccgatatactgaaagttgacttaaatgccacttcaaaattaaacgtcagttcccgtccggaattattaatgtatcgagaatgggcatccaatatgattttatgggaccatataggtgatgacctgtttttcatcatgaaagatatcgacatcggtgaaaaatatggtgaacttaatacggatttacttcctttctactatactatggcaggaagaattttagctgtgggtattagatttgcttctacgggaaatttgaaaatccgcaatgttcttctatcccttgttgataaatttctgcccttttatcagtatcctgggagacagaatcttgactttaggttgacgatttctgttattaatgttttagtaaatgtcattattgtgtctttgagtatggttatgtgtgccagtggtgatttggacgtcttgagaagagttaaatatctgcatgaagttgtatctgggccacattctgacttatttcgagcgattcccacttctaaaagtggcggagacgcatctcaggtaaactcaaatgttaacacaccaggaaataatgactctgatgagagaaatgatgaaacaaggacttctttggatgatgaaagatcagtgaatggtagtgacattagtgacccgacagcctttttagaagataaaaaggatatggatgaccattatggtaaatttatttctacagatctagcattaggttttctttttcttgggtctggacagtacgctctcaacacttctactttagaatctatcgccttcttaagtatgtcagttttacccacatatacaactccgcatcccttgcaagagctgaagcatttctggagcatggctgtagagcctcgttgtcttgttatcaaggatatttctactggcgatccggtgaataacgttcctattcagttggtggttgaaaaagacattgaaaaggatgaagtggtaaaggagatgtcaacaccatgcctacttcccgacttttctaagatcaaatctatcagggtaaaaaagcatgattactttccaatggaaattaacttcactaaagacttgtcagcttctgatttttttagtaatggaaccattatttatatacaaaaaaaatcacaaagtgctttcgaggataggacttcatataagaacgcagaggacattcatgttgcgctcaagaaaaaggcaacagaagctaaaagttcgaagcttactcccaaaaggaggcatgggagttccttttcctcacaactcatagaaagtttgggtattcaagatttgacaatggtggaacttgatagcatttttaatgcagaaaataatacagcattgacggattctgaatcatataatctaggtttgctttgttcggataaaaacagtggtgacgttttggattgtcagctcaaactgtggaacaaaagttttgggccgcatgctgattaa

SEQ ID NO: 3247 - DNA, 603 bp, Saccharomyces pastorianus
atgcagcttgcgcgaacccagcttggacaatggctttttgtatttattctatttagcattggatttgtgcacgctaatacagaatcaatcctgtttcaagtcccgcacaatttcccactctcagacgtaagagacaggtttgtttccagcagcgatgtcgacaccgttccttttatatctctattaggcgaaacgatggcccaggtcaccgtcaaggttaataccaccaatgcgcagctaggtagcgctacgtatatcgaattgaaggacctgcaacgagacgaaacataccagataaaagtatgttggtcggctatacatccagtatccatcgatgacctacagactatcataataccgcgttccactgaattccaaggaaccacatcggaccacgcgagaatagtagtggcgtttcagatgatgtccgactcataccccagcgagaacgccatggtcccaattcaagtctcgttgattactaccaagttgggcatcccggtggatatctatcctatcctggtcgttatagtattattaatagcaggtcttgttgttacccgggcaccacacgtgctgaacgatcttttgttgaagttttag

SEQ ID NO: 3248 - DNA, 1221 bp, Saccharomyces pastorianus
atgtctgaagaagtgtggagtggaaatcaaggtacgctgtctgtatatgtgagcaaagccagagacctgcccaatctgaataagctggacaagcaaaatgtgatgcttaggttacgaatagctcatatgacaagagcaagtaacactttacatcgggcaggtcaaaatcctgttttccgttacttggaaaaattcgatattacccccgaaattaagcctttgatgtacgtggaggtctactgcgatagaagaaagaaatctccccttcccattgggagatgtgaaatagatctgttaaatgctattagggcagacccgaaggaaggttattgcacctggtatgaactgaagagaagcggggacgaatttgctggtaccatatttattgagttgacatttactccaaaagtacctcgtctaaacagagatgaccttaacaaagaaacggataggttggattcctcaatggcaatgagacccatgccgccattaccaaccgagttagaatacgactatgtccacggctctacaatgcgacaggtcactccacaattgagcgctacaactactaagattagatccgagggacaatcatatagaaatgcgaatatgttttcaatgtcatccaaatccgacacagcagtcttagctaacgataccgatccgaccgttttgccaccaacttttgcatcttccatggggacaacgtctaccctagagactaatgacactgttatatcgaacacttcggatactaagttccattttgccaatctgagaaaattaaaggaaaagataaatattttcaagaatccagatagttcgacaaataattgccaaaatgaagctaataaagtggacattgaggctcttcaaaaggccattggtgtaacctccttgtcttacgatgatgacgatgaggaaatacaggaagggttctattcttcaagtcatagggtttcgcataacttaaaccaaccaccattacctcctataccaactagagacgatacatctacttattcgagatcacgcaataggtctcctataccgaaaggtagagaggctcgccagcaatcggttcctttcaactcgcatattccttcttcagttttgaattctccaaaactaccaccactaccgacaggttcaaattccaatttcagttcaaggaaaaattccatgtctcccacaaggagaagaccaccgccaaggttttag

SEQ ID NO: 3249 - DNA, 1131 bp, Saccharomyces pastorianus
atgtcagcctctattccagaaaccatgaaagccgtcatcattgaagatggcaaagctgttgtcaagcaggatattcccattcctgaattggaagaaggattcgttctggttaagaccgttgttgttgctggtaaccccaccgattggaagcacattgactacaaaattgggcctcaaggttccctcctaggctgtgacgttgccggccaaattgttaaattgggtccaggcgtcgattccaagcactttgccattggcgattacatttacgggtttgttcacggtgcctccgtgagattcccctccaatggtgcctttgccgaatattcagccatctcatccgagattgcttatagaccagccagggaatggagattgtctgggaaggacagtctacctgaaggtcccgttaagtccttggaaggtgctgttacccttccagtgtctttgagcactgctggtatgatcctaacccataattttggtctggacttgaagtgggaacccgccaccccacaaagggaccaccccattttattatggggtggtgccaccgccgtgggtcaaccactgatccagttggccaaaaaactgaacggttttaccaagatcatcgtcgtcgcttcccggaaacacgagaagcaattgaaagaatacggtgccgatgaacttttcgattaccatgatgctgatgttatcgaacaaattaagaggaagtacaacaatatcccctacttggtggactgtgtctctgatctaggcacgctgcaacaggtgtaccaatgtgccgctgatgaactggatgccaccgtcattgaattgacaagtttaactgacaagaacgttaaagaggaaaacaggagacaaaacgtcagtgtcgacgggaccatgttgtacctgatagccggcaacgacgttccattcggaaacgtgactttaccggccgacccgcaatacaagacagccggcatcaagttcatcaaattcatcaatgcaaaggtcaatgacggcgaaatccaccacatccctgtcaaggtctacaagaaggggctggacgatatcccacaactccttgacgacatcaggcggggcaagaactctggtgagaaactggttgcagttttgaactag

SEQ ID NO: 3250 - DNA, 522 bp, Saccharomyces pastorianus
atgtcatctgcggccaataatacgagtaacaatacaggaggcaagaaaccgttgaaatttgtatcggaaggagtaagcaacatagaaacccagaagatacgagaacaagtggagcagaagaaatatgaatcagagtacaagaggaaaactaggaaatccctgcgagaccagctgaggtcaaatgcaatcagtaaacaaaagcaatacaatggattggtgagagaccgcgaaagctttaccaggctgagcaaagacgaattagcattctaccagaacagtaagaatgaggcgctgaaaaaggaaaaggaactgaatgagtacttgaatgccaaggcaactagctttgaaagaaagaaaaaagctttgctcaagggcactaacgctacggctaatccagaaggggacgtaaaagtcaaaacaagcctggatagcaacatacaaatcaaaggtataaagcctctaaattcgaggccaaagattaaaatatccataaaaaaactgaataagaaactagacaagtga

SEQ ID NO: 3251 - DNA, 1203 bp, Saccharomyces pastorianus
atggacgagtacgccagtgaagaccaaagagaaaacaaagctatagctagcgtgatcatatcgttcctaaagtatgaggaatatgccttaagagagtttcacggtttaagagtaaagaaatgggaatcaatctcggatcgccagaaatcgatgatcccaaactacacgaaatatctagcagatttgaaagttgcaatagaagtgaatggcaagtttttcagaagcgtggctgaatgggccatgcaatccataagcattggaccagaagagatggtacagcccgatgatacggatatgaacaagacctgctctttacttattcaggtatatagggaatggtccacagaggctgtctccgaacgtcgttgtttacactcaaggctcataccggttttgaaagcgttggaaccatcccaaactaatattcttataccaggtagcgggacaggacgccttcttgtggaccttagtcgaatggggtataattgtgagggcaatgaatgttcatatcacatgctgcttgtatctcaatatcttctaaatgcagggctaacccaaggatcaactatcatctatccattcttgcattctttttcccattggaagggcaacgaggatcaattgactcccatcgggatccctgatatcgaggcggggtcttcaaagagagttatggggcctatgtccatatgtgctggctcgtttgtcgattgttatggtcgaaatcagggcacaaagatttcttctcactatacattttcacaaaggatgcaaatgagcagagcaaaggcagaaaactcgaaagatatcgtaataacaaacttttttatagacacagggcccaatatcttggattacctggatacaatagtacacgttctaaagcccggtggaatctggtgcaatttcggcccattgttgtaccatttcgaaaatgaccgtggagtcgagaccacttacgaagtcaacccgtactccgggttccaggacaaggtcaatgattccacacccttgatggggttagagttgtctggcgacgctatcatagagatcgctacaaaatgcctggacttcgagctaatgcaaagagaatcaggaattctcagcggatatgggcgccacgtaggtctagaaagttgcgcaatgcccgggtacatgtgtcatttctgggtcttgaagtggagccctgctggcaaagtgtga

SEQ ID NO: 3252 - DNA, 309 bp, Saccharomyces pastorianus
atggaaggcgacagcatgagcggcgacggcagtgccgtccatccagtcgaactgtcggtatactcagtactttctgctgacctagacggcttgtaccagtccatcaatgaactacgggagtcgcaagcgttactcattcttatgctacggagggttcgtgataaacttcgaagagagggacaagttctttacgacccggaacctttcaagcccacgatggataaattggccaacctgacgactcgcgtgaacacgcttacaaagacgtatgagcagcttcagggcagcgtcaaatctctcgccaaatag

SEQ ID NO: 3253 - DNA, 1362 bp, Saccharomyces pastorianus
atgtgtgtgtacaagtcgaactcgaacaagagtaacccttccttcatttttgaaagaaccgtgcaagacgtaaactctaacaatttgttctttgcacccccggtttccgcttcgaatacagctcgtagttcgaggtccaacacagctcgtagttcaagatccaacagcttttacaacctacagactgtttctcctatacccatctcaggcggcaggacgaagagctcgtcatcgaggaagaactccaacaatgttttgtctcccctagataacgtgatgcccaactccaggtcggcgtcgaactccaccaccagctcgctggcacatcaagagtacgtcttgaacccgatctctgatatgcatcaccatcacagtcgtcgtcgtactttggagaactcggtggccccagctttggacgcaagttgctcgatagtgaacgatgaaaataccgacctgaccgatgtcgacatggtatattcgagaaggccttcttccaccatcggcttaaatctggctttattggctagaacaaatagcgccaccctcccatcggtctcttcgcccgtttctccagatctcaagctttcaagatcttattctcattcagcaggtgctcgcccagctctaaataatgttaacaacactggaatgacaacagcaagcggcgaaccgaaatccagaatcctgaggttttactcttatgtcgatatgttaagcgatgaaaaactcacacaaacaaataatgccccctcaaatagaccatctttaaaatgtcagccaaattcatgcccttttattctcaaacagcctcaacctcaaccttctttttcatcatcagcaacaacaacattttccaatccttttaccaaaagtactgaatttccatccggttctccttacgtgtctccacagcagaatgcaagacgttactctaccaatgcctccaaatcacctccgaatcagtcgtcgtcaatactgctacaaagaaaacccgctttatcaaacacagaacctactacaaatatcgggagaaaccctagatttgaaatagagtcaagtgacagcgaagaggaggaagatttagcaatggacatgttagaaccctcatttcgcccagcttcatccttacgttcaagtgcaacttgtttagcgagtaatccagaaatagcaaatcaggtgtctttgtcgtcatcgtcgtcatttgcaacaatgcctaaatctacgtccttatcgaacgatccttcattcgtatcgtcatctaatactttagcctcagataacgaattacgaactgaaaaagttagcgaggtgctaaagaaaaaagtctcaaacagtggattttcatccgatataaacaattaa

SEQ ID NO: 3254 - DNA, 954 bp, Saccharomyces pastorianus
atggtcaggaaaaatttcataccatctgtctcacttgtcggaagagacattcccaaactaaccagcactacggctagttcaactaccgtgtcagcctctgcatcagaaatagcgtcccacacgacttccaagtccttgccgtcattgaacaccgcgctttccagttcgaagacatcgtcgtcatcgctaattgctccgacgataacaccgccttctactttggggaacccgtttatactgaacgctgcccataagactaatggaaccgtgtatattgctgtaggcgctatcataggcgccatttttgttagcatctttatatggtggttatactccagctatttggcccgtcgttccgcgataaatgtttcctatccaaatgatagcaagagtttttacaagggacatcataaacacacttcttctttgcaaaacaatccgttcgacattaatgatgaaaagtctttcatgcaggatgactgggattcgataagtcaattggaatctaatgaggaaaatgtttctccattcaacccaattcaagacccattcgcggataatagaaggaacttattcatatcgcctactttgcaagtatcacagcatgaaaaaggccatagtcgtcatcaatcaagggacaccattagcagtttcattgatgataaatccttgtacataggcaactacatggaaaatcaagaagacgaagaagatgaagaagagagaaagctgaatctgaatagaccacaaagggcagcatcacccgaaaggaaggaaaagaaaaccaattcaatgaaaggttaccataaaaaaaacaaatcctcattgggtcttataccggtagcttctgccacttccaataccagctcacccaaaaaggctcataagaggcaggcgccatcaatgtttttggatgatatcttgaatggcaaagaaaaaatagagactatatag

SEQ ID NO: 3255 - DNA, 1650 bp, Saccharomyces pastorianus
atgatgtctggtacttgggcaggttacaattttaaagagatcaaatcgcattttgggttcaagaaatatgccgtgtcgtgcttgatcattctgtatggactaataaaggtttcgacgtggatcttccgtcaatgggtgtattccagtttaaatccattctccaaaagaaactttctgcttaagagagctacagcctcctgtggcgagaagaacgtcaaggtttttggttttttccatccgtattgtaatgctggtggtggtggtgaaaaagttttgtggaaagccgtggatatcactctgaggaaagatcctaagaacatcattatgatctattccggtgatttcttggatggcggggatgtcactccggagagcatcttgaatgatgtgaagacgaagttcgattatgacttagattctgatagaatatttttcatttcattgaaattaagatatttagtggactcttcgacatggaaacattttactttgattgggcaggctattggatcgatgatgctggcattcgaatccattattaagtgtccgcctgatatatggattgattcgatggggtaccccttcagttatcccattgtggctagatttctgaagagaattcccattgtcacatatactcattatccgataatgtcaaaggacatgctaaataaattatttgcaatgcccaagaagagtttcaaggtttacggtaaaatattatactggaagatctttatgttaatttaccaatccattggttctaaaattgacatcgtcattaccaactcgacgtggacaaacaaccatataagacagatttggtcatccaatacatgtaagatcatatatccaccatgttccaccgaaaaactagtcgattggaaacagaaatttggtggtgctagggtccagaggctaaaccaagcaatcgtgttggcacaatttcgtcctgagaaacgtcataaactgatcgttgaatcttacgcaaacttcttggaaaatttacccgattctataccgccatttaaattaataatggtgggttctaccagatccaagcaagacgaagaatacgttaagagtttacaagactggtccgaaaatgacttgaagattcccaaaggtttgatatcattcgagaagaatttgtcctttgataagattgaaatcttgttaaacaaatctacatttggtatcaacgccatgtggaatgaacattttggtattgctattgtagagtatatggcttccgggttaatccccatagtccatgcatcagcaggccccttattggatatagtaatgccatggagctctaactcgaatacaaaaaatgaccgctcacaatgggaacttcaaaaggaatatttttccgattttaatgatgacggtgagacgactggatttttcttcaaagaggaaagtgatccggatttcaacccaaccaaggatcccctcaggtaccccaatttgtccgaattgttcttacaaatgatgaaattggacgacgactgcgtaagcgcaatgagtgcaagaaaccaacagtattcattatttaaattctctgatttgaaatttgatagggattgggaaaatttcgtattgaatccgatcgaccagctattagaagaggaggaaaggggctga

SEQ ID NO: 3256 - DNA, 1767 bp, Saccharomyces pastorianus
atgagtagtattgttaataaaagtggcacacgttttgcgcccaaaatcaggcaacgtagaatagctactagtggaacgccgacaccaaaaccaagaacgcctcagctgttcatgcctgagagtaaagaaatcgacattgacaatagtgataatgacaaagctactgataccaagaaggcttcagaagtagaagagcactttttagaaggctctacattagctaccagtgccagaaatgacgatgagttagaagagaatgaagggcctattgatgcttccacccaaaagcctacatcgaacattatagaagagagcgagaaactgcaactagcacctacccaaacacaacgtgaacaaaagagatcgaggtcgagtaggttagcctcattgagtaaagatagcgaaagtcgcccaagtttcaagccatcgttcttggattcttcaggtaataataatggtcctgctcgacgtctatccacaatatccagtaaggttccgaagaaaataaggctaggaagtattacagaaaatgatttaaacttgaaaactttcaaaaggcatagagtattgggaaaaccatcgtcgactaaaaaatcggcaagtgcacacaggattagtattgtctccaaaattgcaccacctaccgcaatgaatgattctgtagacaagagtgaatcttcacccgaaagtattcttttggcaggagccaatgaaaatgaaaactacgtaatcagtaaagttaaagatattcctaaaaaagtaagggacggagagtctgccaaatatcttattgacgaagagaattttacgatggctgagttatgcaaaccatctttccctattggccaagtatcagagaactttgagaaatctaaaatggctaaaaaagctaaattagagaaaagaaaacatcttagggagttaaggatgcgtgcacgtcaagaattcaaacctttgcaatcgttgacaaaagaagaacagcaagaagaagaggagaaaagaaaggaagagagaaataaagtattcaatgcagacattcctgagtcggaccgcaaagcccatacggcaattcaattgaagcttaatgctgatggtactatggctattgatgaagagaccatggttgttgacaggcacaaaaatgctagtattgaaaatgattataaggaaaaagttgatgagaatccattcgccaacctttataattatggttcatatggtaggaattcttatacagacccttggactgtggaagagatgataaaattctataaatcactatctatgtgggggacagatttcaatttaatatcgcaattatatccttataggtcaagaagacaagtaaaggctaagtttgttaacgaagagaaaaaacatcctatactgattgaattagctcttcggtctaaattacctccaaatttcgacgagtattgttacgaaacaaaaagggacattgacacggtagcaaatttcaacgagaaattagttgaattacagaatgaacatgaacaacatatgaaggaaatcgaagaagccaaaaatacagcaaagcaggaagatcaaactacacaaaggctaaacgacgccaatttgaacaagaaagggtccggtggtattatgacgaatgacttgaaagtttatagaaagacagaagttgttttgggtacaattgatgacttgaaaagaaagaagcgtcaagaaaaagatgcaaatggaaacgaggataatgaagggagtggagcagaatctgaagtcgattag

SEQ ID NO: 3257 - DNA, 1776 bp, Saccharomyces pastorianus
atgtccacgccgttccaagactttaagacgttctgcaataaagtgggcttggacttccaatgggctaatacacagtcccccaaacctactcccgaaactaacccttctgaaatcccttcagccgtcaatgaaacaagacaagaaaggcccaaagattctgtcaactgcgtatttactgatatcaagaacgcacagctttggaacgtcttcaaaaaggttggcgtaaatactctttccactgagccggctcgatcaaacatgtctgagacaaatgctagtaaaaccgattgtgctattcataatgatttcgccatgatggatgcatcaccgccaacaccatccgctgtgggccagaacgaaaacagtggcccctcttcaacgcatggcagtgacgcaactgccccatctacagcggcctcggtatccaccaaccatgagccagtgccctcattggcctcctcggttagcacttcctcttcagtttactcgtcatgggacccccctcatcctccatcttcatcatctttccctgctgctgctgctgccgccgctgctattaccccatacaaccattccaaggactgcaggtcaaaacagacaaacgaatacactgttctatttgacatttcctgcctgagcacagttgacactgtcagccaccatgaaggttcccaagattgtcgccgtcgctttcctgacatgacatctccagctgacgacgcccgctcatcagctctagtcacaccctctcctacgccgcgccatcaagatgtgaaccgcagtggttgctccacagccgcctgcactgcttcgaactccaccgccgccaccaccacgactccctcatacatggaaaagtacctcaacaagccacgaaactggtttgaaaagaccatgggcaaatactgtcctttgttccttagaagcaccaagaacattgactacgactctactgagttcatgtttgaacgaaaaatgatagccgtccaattcctgcttctagacgaacactcggagcccaggctgtactacaaccctaccaatggagccgttccgttctggaaaaggccatttaactacgacatgatgcccagctacgaccaactcttggacgaggccgagcgctctttcgatacttatcagtacaggtatgtggggttccaaagaatagagccgtactccattttctgtccctggaagaacacccaaagagaaatagacctggtgcttgaccacatccatttctccttcaatgttggcaggaaaaagtctctccaacggaagggaaacatcacgctcgatacgctggacagcgacatcgaccgcgatattagaatcgagccttaccggccctttccttccgaaaatcttgtgtacgagggcctcacacaccctgccgaacagtctttcgttgctgggagcccggacgcatcgcttatcgagaaggggtaccaggcactagtcgatatctgtagggagtctcgcccaccatccaatgacttcccttcccgcagtctcgttagcgctccacagatcgcagctccacagatcgcagctccacctaatacttgccgcctagttcttgttcgtgaatgtcgcacggcttccgagtcggagctcaataaggccttctggtttaattcaaagagaaaggacgtcacggtaaccgtaccagcacctccctctcctgcttctctctctcccccctctcctcccttttgcacaacaaaaggcctcccacgaaagtggttcttccctcttgtccgccgccagtga

SEQ ID NO: 3258 - DNA, 1473 bp, Saccharomyces pastorianus
atgaatttctacagggacgcaacatgggtgctagaggatattgagaaggaggctgcgaaggtgagaatttctggttctatgcagacgctagtgctgaagagctgtaaaagatacaagttgaaaagtaatcctaaacacatttatgctgtgctcgattcgtgctggaaatataagccatatttggaaaaagtgatgaaaaaagcacgcatactggaggaaatccctaagaaaaagggcaaacctctcttttcaagactaacattattattactgtgccatgatttgttactctctaaacaaaaaagaattcagatgggtaagcatcccatcaaagaatacgtattgaagttcaagagcccattacatagcgaaatggtcaaattaaagctgaagttgaaggtaagagacttatctgagttggttctaagtgaagacattgtcaatgatcttccacctgttagatggattaggatcaacccattgaagtgccatccagatgggaatacagaacctgtattggctgaactgaaaaagaaatttactcagaaggtggacaattggtctgagttagtacccggttccatctattatgatgaatatatacctaatttgtttggtattcatccaacagacaaaattacagcacacgaattgtataagcatgggaagattattattcaagatcgagcttcttgtttcccagctcacattttgcatccggggagtaatgatattgtcatagatgcgtgctctgctccaggtaataagacaactcatacagcctcctatatattctccgaaccaccaaaggacaagaacattcaaatatatgcttttgaaaaggatcccgaaagagcaaaaattttacagaaaatgataaagatagctggctgttcttctaacatcgatgtcaacgtgggtgatttcacaaaattggctactccagaaaaatgcaagggtgtcactggatttattatagatccaagttgctctggtagtggtatctttggtcgtaagtttttcgattcgcttaatagaaggaaaattgatgaaaaggatgatgaagatgatgttgtaccagatgaacaggaggagtttatggcgaaagaagaattgcagacaagactagcaaaactgagctcgtttcagttccagatggtgaaacacgcaatgagtttcccaagtgctaaaaaaatagtatacagcacatgttccattcatgcggaagaaaatgaacgtgttgtgatagaccttctactagataaggccgttcaagaatggggttgggaggtagaatcaagaactgaagttgttccttcttggcctagacgaggcaaagtagaagaattcgaagaggtcttcagggacggaagcgcccatgacccgcaacaactcgctgaaggctgcattagagctctaccgaaagaagatggtggtattggcttctttactgtctgctttgtgaggaaataa

SEQ ID NO: 3259 - DNA, 1410 bp, Saccharomyces pastorianus
atgtctgaaaataacgaagaacaacaccaacaacaacaacaacaggagcccgttgctgttgaaacccctttagtaactgaagttccaacttcagcagacccatccgctgagcagaacgtctctagtgaaggaaactctgaacaagttgacgatgaacaaggtgaaaacgatccttctgtagttcctgctaatgctatcactggtggtagagaaacttctgacagagtcttgtatgtcggtaacttagacaaagctattaccgaagacattttaaagcaatatttccaagtcggtggtccaattgccaatattaagattatgattgataagaacaataagaatgtcaattacgcctttgttgaataccaccaatctcatgacgctaatattgccttgcaaacgttaaatgggaaacaaattgaaaacaatgttgtcaagatcaactgggctttccaatcccagcaaagctcctccgatgatacatttaacttattcgttggtgatttgaacgttaatgtcgatgatgaaactttaagaaacgccttcaaagatttcccatcttatttgagtggccatgttatgtgggatatgcaaactggtagttcaagaggttacggttttgtttccttcacttctcaagatgatgctcaaactgccatggacagtatgcaaggtcaagatttgaacggtagaccactaagaatcaactgggctgctaagcgtgataacaacaacagcaacaacaacaacaacaacaataacaacaacaatactaataactacccgcaacgtcgtaactacggcaataacaaccgtggtggcttccgtcaatataacaacaacaacaacaataacaacatgaacatggggatgaacatggggatgaacatgaacatgaacagcaacagaggtatgccaccaagttcaatgggcatgccaatgggcgctatgccattgccatctcaaggccaacctcaacaatcccagaccattggtttaccacctcaagtaaatccacaagcggtcgaccatatcatcagaagtgctccaccaagagtcaccactgcttatatcggtaacattccacactttgccactgaggctgatttaattccattgttccaaaacttcggtttcattctagatttcaagcactacccagaaaagggatgttgtttcataaaatatgacacccacgaacaagctgctgtttgtattgttgccttggccaacttcccattccaaggtagaaacttgagaactggttggggtaaggaaagatcaaacttcatgccacaacaacaacagcaacaaggtggtcaaccactgataatgaatgaccaacaacaaccagttatgcctgaccaacaacagcaacagcagcaacagcaacaacagcaacaacaataa

SEQ ID NO: 3260 - DNA, 3135 bp, Saccharomyces pastorianus
atgaccgattcgcaacaatctataactgtattggaagagctttttcgacagttggaagttgcaactcctgaaactagagatggcatttcttctgaactttcctcgtttttgaacgggaatattattgagcatgacgttccagaggttttcttcgatgaatttcaaaaggcaattcagaataaacaaaaggcactaaacactctgggggccatcgcttacatagccaacgaaactaacttgtctccatctgttgagccttatatcgtggccacggttccttccgtatgcactaaaacaggcagtaaagataatgacatcgaggtcgtggccacgaaggcgctgaaggccattgctagcgctgtcaatccggtcgccttgaaggcatttttgcctcatttgattcattctctgggaactaccaacaagtggaaagaaaaagttgctatacttgaagtgatttcgacgttggtagatgccgctaaagagcaggtagccctaagaatgccagagctgatcccggttctttccgagtcgatgtgggacacgaagaaagaggtcaaagacgccgctacggcaaccatcacaaaggcaactgagactgttgataataaagatatcgaaagattcattcctaaactgattgaatgtattgcaaatcccaatgaagtgcccgaaactgttcaccttttgggtgcaacaacttttgttgccgaagtcactcccgcgactttgtctatcatggttcccttattaggtagaggtttagctgagagagaaacttccataaaacgtaaagctgccgtgatcattgataatatgtgcaaattggttgaggatccccaagttgttgccccattcctgggtaaactgttaccagggttaaagaataattttgctactattgccgatcctgaagcacgtgaagttacactaagggctttgaaaactttgagacgtgtcggtaatgttagtgaagatgatgtgttaccagaaatatcgcacgctggtgatgtggccacaacattgggcgtcattatggaattgctcaagtctgaaaaggttgctcccagattcaagatcgtcgttgagtatatagccgccatcgctgcaaatttgatcgatgagagaattattgaccaacaaacttggtttactcacgtcacaccttatatgactatatttttacacgagaatacagcaaaagagatactggatgatttcaggaaaagggccgtggataatattcccgtcggaccaaatttccaagatgaggaagacgaaggtgaagatttatgtaactgtgagttttctttggcatatggtgccaagatcttgctaaacaaaactcaactaaggttgaaaaggggtagaaggtatggtctatgtgggcctaatggtgctgggaaatccactctaatgcgttcggttgccaatggtcaagttgacggcttccccactcaagatgaatgtcgcaccgtttatgtggaacacgacatcgataatacacattctgaagtttccgttttagagtttgtttatgctggtaatgtagggtccaaggacgttattactgcgaaattaaaagagtttggctttagtaatgacatgataaatatgccaattgcttctttatctggaggttggaaaatgaaattggctttagcaagggctgtgctgaaaaatgcggatattttgctattagacgaaccaacgaatcatctggacactgtcaatgtacaatggttggtaaattacttgaatacttgtggcgttacatcagtgattgtttctcatgattctggtttcctagataatgtttgccagtatatcattcattatgaaggtctcaaattaagaaagtacaaaggaaatttgtcagagtttgttcaaaaatgtcccacagcacagtcgtattatgaattgagtgcctctgacttagaatttcaatttccaacccctggttatttagaaggtgtcaagacaaagcagaaggctattgtcaaagtgaccaatatgacttttcagtacccagggacaactaaaccgcaggtttctgatgtcactttccaatgttcattatcctcgagaattgcagttattgggcccaacggggctggtaagtccactttaattaacgttctcactggtgaacttctaccaacaagtggtgaggtatatactcacgaaaattgtcgtatcgcctacatcaagcaacatgcgtttgctcatattgaatcacacttggacaaaactccatctgaatatatccagtggaggttccaaaccggtgaagatagagaaaccatggatagagctaataggcaaataaatgaaaatgatgcggaagccatgaacaaaatcttcaaaatcgaaggaactccacgaaggattgcaggagttcactcaagaagaaaattcaagaacacatacgaatacgagtgctctttcttcttaggcgaaaacattggcatgaagtccgagagatgggtcccgatgatgtctgttgataacgcttggctaccaagaggcgaactaattgaatcgcacactaaactcgttgcagaagttgatatgagggaagcacttgcctccggtcaatttagagccttaactagaaaagagattgagtctcattgtgccatgttaggtttggatgccgaattagtttcacattcaagaatcagaggtttatcaggtggacaaaaggttaagctggtcctcgctgcctgcacctggcaaaggccacatttgattgttttggatgaaccaaccaattatctggatagagattccttgggtgctctttcaaaagctttaacggcttttgaaggcggtgtcattatcatcacacattcggcagaatttaccaagaatttaactgatgaagtttgggcagttaaggacggtaagatgacgccatctggccataattgggcggcaggacaaggtgtcggcccaagaattgagaaaaaagaggacgaaggtgataaattcgatgcaatggggaataaaattagtagtgggaagaaaaaaagtaagctttcttcagcagaattgagaaagaaaaagaaagaaagaatgaagaagaagaaagaaatgggtgacgaatacgtctcatcggatgaagatgtttag

SEQ ID NO: 3261 - DNA, 855 bp, Saccharomyces pastorianus
atgaacactttctttctatccttgcttagtggcgccgctgctggcacctctacggacttggtttttttccctatagatacaatcaaaaccaggcttcaagctaaaggagggttctttgctaatggagggtacaaaggcatataccgtggcctaggaagtgctgttgtagcatcagcaccaggtgcctcacttttttttgttagttatgactatatgaaagtgaaatcaaagccatatgtcagtaaactatattcaccaggatctgagcaattggttgatacaaccacacacatgctttcctcctctatcggtgaaatctgtgcatgtcttgttcgtgtcccagcggaagttgtcaagcaaaggacgcaaattcactccacaaattcttcctggcagacattacaatcaattctccggaacgacaataaagaaggtttgagaaagaatctttatagaggctggtctaccaccattatgagggaaataccgtttacctgcatacaatttcccttatacgagtacttgaagaagacatgggctaaagcgaacgatcaagcccaagcggagccatggaagggggctgtttgtggttcaattgcgggtggaattgcggcagcaacaacaacgccattagatttcttaaaaacaagactaatgcttaacaagagaactacctcacttgggaacgtaatcgttaaaatttatagagaagaaggtgctgctgtatttttcagtggagtggggccacggacaatgtggatcagtgctggtggtgccattttcctaggaatgtatgaaaccgttcattctttgctatcgaataaatttccgacaagtgaagaaatgaaaccgtaa

SEQ ID NO: 3262 - DNA, 1152 bp, Saccharomyces pastorianus
atgaaggttattagtcttaagaaggattcagttaccaagggaggagccgttattacattattaccagaagacaaggaagatttgttcaccatttatcagattatagataaagacgatgagttaatatttaaaaaaaagttcacctctaaacttgatgaaactggcaagaaaaaaagtaccgatttgattaaactaaaaattaaagtaatatccaatgaattcgatatgaaaggagagtatctgaaatacaaaggtattactgtaacagatgaaacaggagacaataaacctgttggtaaatatttagggtttaccctagattacgtatatcctttcaccattataaagcataactttaataaattcatgcagaaacttctgaatgacgcctgtaatgttgaacaaaaatcagatactgcagcaatagttttgcaggaaggaattgcgcatgtttgtttagtgacggcctcatctaccattttaaagcaaaaaattgagtatagtatgccaaagaaaaagagggctactgatgttgtaaaatttgacgaaaaaactgaaaagttttataaggctatttacaatgcaatgaaaaaagaccttgatcttgaaaagctaaaaaccataattctctgctcgcccggtttttatgccaaaatattaatggacaaaatagttcagtatgccgaagaagaacacaataagaaaatcctagacaacagaggtatgttttttattgctcattcctctacgggctatttgcagggtattaacgaagttttgaaaaaccctttgtatgcttcgaagctgcaagataccaaatattctaaagaaaatttaataatggatgaatttctactgcacctaaataaggatgatgataaggcttggtatggggaaaaggaaatcacgaaagctgcagagtatggagcgataaattatttattattgacagataaagttttgcactcagatgatattgctcagagaggaaaatatctaaagctaatggactctgttgaaagtaatggagggaaagcgttagtatttagtactttgcattctcttggagaagagcttgaccaactaacaggtattgcctgtatcctcaagtacccactgcccgatctggacgaagataataatgaagtatga

SEQ ID NO: 3263 - DNA, 2670 bp, Saccharomyces pastorianus
atgtcaaactctatatcaggtactggtaagcgaagagtgaagagaacctatgaagttaccgggaaagatgatggcgtaataagtgccgagtcagcctctccgatgagtagggaagaggaagaggaagaggaagaagctagaaaggaggaccctatatttttgcgaccaaaaaaatcacgttatgacccaaataaaactttttcctctaccagacaaggatcggaggatcatgcggtatcaaaggaagaactattagaatcagagaggaaagcttccaataatggcaagcaagctctgttaaagagcgaggtttctgcgatggggaatctggtacatgtaacccaaaatcaagctgagaatgcttctaattcagattcaaatgggggagaagatcgaagtcgcaaagcggaagttgtgcataagcaaactaacgctaaaaagagtgaaaatggaaatagacaacgaatgtgggaagaacagcagctacaaaacgcgatggctgcaaaaaatgacaatcctgatgacatcaccgtagaggggtctgacaagtacgactatgtattcgatacagatgcaatgattgattacaccaacgatgacgatgatttgctgcctgaagaaaaacttcaatacgaaactcgtttagcagaagcattagagactgaggaaaaacgtatactaactatacaagaaacaagaaaattattgcctgtataccaatataaagatgaactacttaaggagatcgagaaacatcaagtgttgattataatgggtgaaactgggtcaggtaagactacgcaattgcctcaatatttagtagatgatggttacaccaaacagggggagttccaaattgccataacgcaacctcgtcgtgtggctgccacttctgttgcagcgagagtggccgacgaaatgaatgttgtacttggtaaggaagtgggctaccaaattcgttttgaagataagactactcccaataagacaattctgaaatatatgacagacggtatgttactgagggaatttcttgcagattccaagctatccaagtactcttgcattatgattgacgaagctcatgaacgtaccttagctacagatatcttgataggtttgctgaaagatattttacccaaaaggcctaacttaaaactattaatttcatcagccacaatgaatgcgaaaaagttctcggaattttttgatgattgtcccatctttaacgttcctgggagaagataccctgtcgatattcattacacattacaaccggaagcaaactacatacacgctgccataacaacaattttccaaattcacaccacacaagctttaccaggggatatactggtgttcttaacagggcaagaagaaatcgaaagaacaaagaggaaattagaggaaattatgtttagattaggttctcgaacaagggaaatgcttataacacctatctatgcaaatttacctcaagaacaacaatcgaaaatttttcaaccgactccagaggactgtaggaaagtcgtcttggcaactaatattgcagaaacatccttgaccattgacggtatcaaatacgttattgatcccggatttgttaaggaaaattcatatgtaccttctacaggtatgacacaacttttgacggtaccatgctcaagagcttcagtagatcagcgtgccggtagagctggccgtgtggggccaggaaagtgttttagaatttttacaaaatggtcatattcacacgagttagaactcatgcccaagcctgagattacgagaacaaatctctctaacactgtattgctattattatctctgggtgttaccgatttgataaaatttcctttaatggataaaccaggtattcccacattacgaaaatccttggagaatttgtacattttaggtgcgttgaatagtaaaggggcgattaccaacctaggcagaatgatgtgtgaattcccctgtgaacctgagtttgcaaaagttcttcatacagctgcttcgcacgagcaatgccaaggtgtgttagaagagtgtttgaccataatttcgatgttacacgaaacatcgtcactatttattggtcagaagaaggaagctgcagcaagcgtaacaagtgaagtggaaagtgaccatatgttgtatttagaaattttcaatcagtggagaaattccaaattttctaggagttggtgccaggatcacaaaattcaatttaaaacgatgtcgaggataagaaacattagaaaccaactattcaggtgtagtgagaaactggggttggtggaaaagaatgatcgggctagagtgaaggtaagcaattcaacggtttacttgaatggcaggataacgcgttgcttcataagtggattcccaatgaatgttgtacagttggggcccaccggataccacacgatgggtaaatcgtcaggtggactaaacgttaatattcatccctccagtatccttttcgctaattacaaagaaaaggcgcagagaccaagcaaatatgtgctttatcaacaattgacgctgacatcgaaggagtttatcagagactgtctggttattcctaaggaggaatggttggcggagatggttccgcaagtttttaaaggcttgcttggggagaaaacaaatagaggaagagaatga

SEQ ID NO: 3264 - DNA, 609 bp, Saccharomyces pastorianus
atgaattccaccgatatcaagccttgcgctatcaacacgcccgtttctgcccacatcacgttccactataagccggctacggacaggagcagcagctgctgctcctcgtccgccggctcgaactcctgctcccccaggggcagctctgccggcctgccgcccaccctatcgagcgaaaacgagatcatcgagaccgtgctgaacgtgtctgcgcccgccgccgccgacccaacgccgccctcgttgttcaagagtaactacaccgctgccgtcgccacgaggtcgagctcgtgctcgacctcgccgtccagacgcaactccgtactgcccgcgggcgacttccaccagtgtgcgcatcacaaaaactttcagagaagggccagtgagccgcagctgccctctttcgaagaccgctcgtcgtccgagatgaaacggtctgtctcgtacgcccagcacaacaacgtgctgtttcccatcagagacttgccggagccccagacacccgattctcactcggactcgtcttgtccgtgcaacagacaccatcacaggaggaactccgtcgccgtcaagttcgacaagccactatacaaaagactatactcataa

SEQ ID NO: 3265 - DNA, 1422 bp, Saccharomyces pastorianus
atgaagtttgtgacagctagttataacgtcgggtatcctgtttatggtgccaagttcttggacaatgatacgttgcttgtggcaggcggtggaggcgaaggtaacaatgggatatcgaataaactgacgactttgcgagtggatcccaccaaagatagtaagaagagccagttccgcgagttgagcgagtttgtgttggaggagaacggcgattctcccacagcaattgatgcctcgaagggtatacttttgttgggttgcaatgaaaacagtacaaagattacggaaggtaaaggtaataaacacttgaggaagttcgaatacaacggagtgaacgatcaattgaagtttgttaccagcgtggattttgataagtccacgaacccagatgattacacaaaactggtttatatttcgcgagaaggtaccgtggccgccatagcatcatctaaagtacctgctataatgagaatcattgacccaagcgacttaaccgaaaagtttgagattgagactaggggggaagtgaaagacttgcatttctcttcagacggcaaggttattgcttatatcaccggttctagtttagaagtgatatcgaccgttacagggagctgtattgcaaggaagacagatttcgataagaattggagtttgtcgaagataaacttgatagctgatgacacggtattaatcgcagcttcgttgaaaaagggtaaaggtatcgtgttgaccaaaataagcataaagtcgggaaacacctctgtattgaaaactaaacaagtaacaaacaaattcaaaggaatcacttccatggatgttgacgtgaagggtgaattagcggtaatggcaagcaatgataactcggtagctcttgtgaaactaagagacctatcagtctctaaaatattcaagcaagctcatagttttgccattactgaagtagcaatttccccagattccacatatgtggcaagtgtctctgcggccaatactatccacgtaataaaactaccgttcaattactccaattatacttcaactaaagaaaaatttaccaagttcttcaccaacttcatccttatcgtattgttttcctttattttacagttttcttacaagcacaatttgcattccacgctctttaactatgcaaagagcaacttcatactcaagaaggataccatttcttcgccctacgttatcaatgaagacctacatcaaactactttatttggcaactacggtacaaagacctctgtgtccatcacggactccataaaagtgcatgatatgcacgcgacgaatagtgtaggtgaaagtggagatttccgtgttgaaaatgggagtattcacacagaggcaattgaggtcggagccactgaggtaaattcagacgacaagaatgatgctgaagcttaa

SEQ ID NO: 3266 - DNA, 1302 bp, Saccharomyces pastorianus
atgtctgcgttaaggaatattaagtataatgaagaggaagatggggaattgcccagcctagtgacaggtgaagagacgaatttacaagaaatactggaaaatgtttcgtatgatggtgggaatattgttagcgacaccaaagtggaaagagtgaataagcaaatggaaagtgtaggtaataatatgaaggggttacaaaagaggaaacgtatccctgtgagcatcatcactggttatttaggatcaggaaaatcgactttattggaaaaaatagcattaaagggtgcggataaaaagattgctgtaattttgaatgaatttggagattccagtgaaatcgaaaaagctatgaccatcaaaaatgggtcgtccagttatcaagaatggttagatttaggtaacggatgtttgtgctgctccctgaaaaatataggtgtcaaggccattgaagatatggtggaacgttctcctggtaagattgattacattcttctggaaacatccggtattgcagaccctgctcctatcgccaagatgttttggcaagatgaaggactgaatagtagtgtttatatcgatgggatcattactgttctggattgtgaacacatattgaagtgtttggatgatgtttctgttgacgctcattggcatggggataaagtcgggttggaggggaatctgactattgcacacttccagctagccatggcagatcgcatcataatgaacaaatacgataagatcgagcactcgcccaatacgatcaagcagttacagaaaagaatacgggaaatcaattgcattgcccccatgtatttcacgaagtatagcgaaacttcgatcgacaagctgttggatattcacgcatacgacagtatacgagtatcagacattttagataacagtgtgggagatgggaccattcatgatcatcgaatgggcacggtcatgcttactttcagaccattaagagacgaggaggaatatactgagagattcctcaaacaatttttgcagcccttactatggaaaaattttggggccctgactgtattggaagatggctcccaacatcataagcatgattgggaagtgcaaagaactaaaggtttgatacttatcgaaggcaacaaacctgctgtgcgtgtgattcagggcgtccgtgacacatatgatgtctttccaggccgacatgatgatgatggctcccataaggaatgtaagattgttcttattgggaagtacctggaaaaggattccatacagaagctgttacataaaacattgaattataagtag

SEQ ID NO: 3267 - DNA, 765 bp, Saccharomyces pastorianus
atggttgccaggagtcagtttaagggaagcagtgccacggtagcgcagttgattgaggaagtcggccgcagtgggggtaggaggcctgtgttccagtataaggttccacgctcgatacgatgggcttcgaccgccctagctgtggtgttcgtgacgtatggggctgcttacaccgatatgtcgtggagaaccgctcgagaagtgtacgggaatgccaccgaggatgaacaacgcagtgtatggttcaagttcaagacttttgggccggtcgcccttggggtcttacccatagtcctggcctgcggtacgaagcacgtaacatcgaggctagtcacagagatgaaatgtctaccgcccgccaagaatagcacggtaccacggtgccagttgacccgacacactcccttccgggggaggccagtcaccattctcagagacatcaatgagctgtccaagaacaaaaccaccaagatctttaccggggtgggatcgcagggtatggaggacaaggcgacgtttgtgttcttcatagaagacaaaaaggcgacttcattttttaacaggttttatatcttctcgagatctggcagcgtagtcaagaacgacgctaggatcttggattgcttcttcaacgatgcctcagtcaacaagctactgaacaagtcgatattgacccagattctctcgcgcacctctgccaagactcaatttcactccaataattccagattttccatcaaaaatattgttaagcccaaacactaa

SEQ ID NO: 3268 - DNA, 2136 bp, Saccharomyces pastorianus
atgactttctcttccgctcgtttcacttacatatgcacgattttgttgggattgaccaatattgctctggcctcagatccagagacagtttgggtcactgtgacgaagactgatgaggcaaatggggctgtcgcaaccacagtttcgcctgcattggtttccacatccaccatagtccaagctgatactacgactttgtacacgacttggtgtccattgaccattgccgctgcctctactactgccacctctactgttgctacctctactactgctgcatctccttcagttttttatgcaacaacattatcgcagttcagtactttgacgttatccactgaagtttgttcacacgaggcatgttctttatcgtcaacattaccaacaacgaccctatccgtcactactgagcttaccttatacgtctgccctacttgtcaaacaacaactatcaactcgtcccccaagctggaaactacaactgtaccatcgtctagtgttactacatcgtcgacaagtccctccaagtcctcatcaagtacttcaatttcttcaagcaaggccagctcaagttcaatttcaagcatacacacaagccccagctcagttgtaacttctactgttcaaaaaagctccatttcaagcaccacgtctacgtctaccacgtctacgtctaccagttcaccttccaccagttcgccttctaccagttcgccttctaccagttcaacttctgccagttcaacttctaccagttcaacttctactagttcaacttctactagttctacccctagtagctctgctctttctttggtaaagtcatcgtcatcgttatcaccatcatcatcatctacaagctcctcggtatctccgccaccttcttcaactacctccacaacatcaacatctacatcctcatatgctccatccacgcaatcttcctccatcgtttcgacctcatcgcctgttgtcattccttctaccacttcctcaacagtcgaggaaaccaccactactcaaagttcatctacccataccagcgaattggccaccacaacctcttccgaggctccatcgctttctatgtccacatatttcacaactatcagtggtgttactactatgtacacaacatggtgcccttactcctctgaatctcaaaccgctacattaactgggacccatgacacaactacgactggcattgagacttgcactcatgaaacctgtttggcgacatcttctcagactacaaattccgtagtatcttccacgatcacacctacaacaagcgatgttgcttctacagctacctcatcatctgaatgttctacgtgcactgaaaaattagaatcgacatcgtctgaaaaaccaacatcagcaatttcttctgagcaagacactacatccacagaaattactgcaagctcgacaacttcttcaggagaagatttcaataaacacgctaccggtaaatattacccaacttcatccaataccgtatttggatcgtccatcagaagccaaacgacaatttcgccaagcattggttcaagctctcaagaacaattgacgtcttcatcatcgacatcttcttcatcttcatctacaccttctccatcttcatctacatcgacgtctccattttatccatcttcatcgacatttaccccactaccatctatttcaatgtcgtctgcttctacaaaaacactatcctcgaccagttcattatcgccatatagttcttcgccatcgtcaactgatgaacaaccctcaaccgctacaccatctgtgactccatcaactagcactgaactgacatcgactgctaaaccagccatttcttcatcatcctctgtaccaacgactactacgtcatccacctccacatccttggctgctacatcatcatcatcatcatcatcatccgcctcctcttcatcacagtcatttgtatcaccatcctccgttactacagcgtcggaattttccagttcaatttctgtgcagtaccaaacttcttcagtggtaacaatcagccaatacatgggtagcggttcacaaaatggtttaccattgaataagattttctttgccgtcattgccgttgctttcaacgcaattatctaa

SEQ ID NO: 3269 - DNA, 630 bp, Saccharomyces pastorianus
atgagtcaagtgtcacaatcccaggaaggctccgggcgattttggaacaagttcaaaacatcaaccaaatcgttatctacatcattgtcacatttatccattaagacagagaaagatggtgacacagcaaattcaaccctggtccataagggactggtcaaattctatcaaaatcagcaccccttccagggattcccaggctggttaggggagaaagaagaactacctaatgagcgcaaaatattagatacgcaagtgaagcacgatatgaaaaagcaaaattctcatactttctcatcgtccttctccagcagaaggaaaccttcttctgaaaaccccatggatcctcctgcgtcgagtgggagcgtgccggaatatacacctgcaagcaaatcctttcagaacatttataacaacacagcaagttcttctggctcagcaccgagaagggctgtatcgcgaccctctaaaccttctgcaggccaagaatttagagcaagcttaggtcggagtaaaacatcgggaagttttaacacttccaatactccaacgccgccaccagaatcaaatggtggggttatggcaatgaaggatagactaaagaggcgcaataatgattatgggttttaa

SEQ ID NO: 3270 - DNA, 726 bp, Saccharomyces pastorianus
atgaacagcaaacctcaacaagaagaagaacaacaacaacaacaacaaccaatcgtattcgtcaccggtacagatactgatgtcggcaagacttttgtatctgcattgctggtacacaaatggaaagctgcatactggaaacccgtgcagacaggaattgagtctgatcaaggtgactcggagacattgaaaaatttcaaagtagccgcatcgacttggcaaccacgtatattcacgcccacctatgtgctgcagaagcctctgtctccgctacaggccatggaatatgagcctggagtggacatcaagttgttggattttgcagttcctgatgaatgggacgcagagagcccactggtcgtagagggagccggtggggtctgcgtgcccatcactcgcaagctggaaataactacggatctgattaaacatctgatcgagactagtagccatcctgtgtacgtggttgtcgtgacacgcagcggattgggaactctgaatcatacgttgcttacatggaatcacctctgcgataacggtttgagaggccacttgttcggggtcattcttaatggggaacccaatgaaggcaacgtgcaggtgctcgagaagttcggtgtggacgtgatcgcacaagttggacaatgtgctacggcgcagaacttggaaatggcgctgcatgggctgccaacggtggagtcattggtgacccaacaagatagataa

SEQ ID NO: 3271 - DNA, 2163 bp, Saccharomyces pastorianus
atgatgcttttaaggtctattataaccttccttttgttctttcagctttcggttgcaaaagcccctccaaggaagactgctagattaaacactcatgagaggagagctatgtattcatgctatgtggggttacgtaaagaaccgtgggaatttaatggttccgctatatgcaaatatgagcccgcgattcaatcaatgctgtactgtctccacgaggacacgcatgatagagggtattcgaataaaactcttgggaaggttttcgaagaaatgagacagttttgcgacacaccaaaatttttgaacatgactgacgctgaattttatgcctcattgaataatgggacacattacattcgggatcaattcaaaacaaacatcaatctaacctttcctattgtactaaattctacgctaagaaaaggctattatgacgcgtattatggattctactataatcttgatatgcctcattattttggaggaattatttgtgcttacttcgtgggagttatgctagttgcaggtttaattcggtttttagattatactcccataaaaagagtgattttcaagcagaagctgatcgattatgcgagaggttatgtcacgttacctactctttggaaaaaacatgcagagcctttctcctacctaaaagtgattactggctaccttcccactagattcgagactttggttattttgggatacctaatacttcataccattttcatgtcttacaaataccagtatgatccttaccacatcattttcccagcccataaagcagaagtggccgattttgttgcatttaggagcggtatactttcatttgcacatttaccgctcattgtcctatttgcagggagaaataactttctacaacttatttcgggtttaaaatatacttcgtttatcacgttccacaagtgggttggaagaatgatgtttcttgatgccgtgattcactctgcagctttcacctactatttcgtgtttactaaccgatgggaggctgctagaataagaacttattggaagtttggcgttactgccacctgtttagggggaataataattttcttttcctttggagttttcagaagacacttttatgaaagttttctcctcctccatatcgtactctctgctctatttctttatgcctgttgggaacacgttacaagtattggaagtattgagtgggtttatgctgcagtagcaatttggggtgttgacagaattgtacgcatcgttagaattattctcttaggattcccaaaagccgacttgaaattagttggttctgatttcattcgtgtgacagtaaccaaacaaaaaaacctctggaaagcaaagccaggccagtatgtgtttgtctctttcttacgtccgttgtgtttttggcagtcgcatccgtttacagttatggattcgtgcgtaaaggatggagaattggttattattttgaaagcaaagaagggtgtgacaaaactggtaaagaaccacgtcgagcgtgaaggtggaagaacttccatgaggttggctatcgaaggtccatatggatccaggccctctgcccatcacttcaacaatgtcttacttttggcaggcggaacaggtctccccggtccgattgcccatgctattgagttaggaaagacaacggctgcaagtggaaaaaattttgtacagctagtcatagcagttagaggatttgatatgctcaacgcgtgtaagcaggaactgatggctttgaaagatctgaatgttcaggttgatatttacaattctaagcaggatgcaactccaggtgaactaatcatttcaaatgtatccaaaaatgacgaaatagtgatagaaaacactccttctgttgccagtaattcagagaaagctctttctgaaaacgaaaatacggagcaacccctctctgtaagtgacacgtccagcgccgattttgaatttgccactttccatgcgggaagacctaacgttgcagaattgttgaaggaagcggtcagccatcctggttcacttgcagtggtgtgttgtggtccgcccgtttttgttgacactgctagaaatgagactgccaaagctgtaatcagaaacccatcaagtgtaatcgaatactcagaagaatatcaagcgtggtaa

SEQ ID NO: 3272 - DNA, 876 bp, Saccharomyces pastorianus
atgtcgaatattactccaacattccacaagactcaaactcaagacggtgtgaaggcctggtaccgtgaggcaggtgaaagagggaaccccataattgttttactacatgggttccccacatcttctaacatgttcagaaacctcattcctttattggctagacacttccatgtcattgccccagatttgcccgggtttggcttctcagagacaccggatgactacgacttcagttttgacgcgttaagtgacacaattggatatttgcttgacactttgagtatcgataggtactttatttatatatttgattatggttctccggtaggcttccggttagccttgaaaaatccttccaaaattagaggggttatcactcaaaatggcaatgcatacgaagagggtcttgacgaccgcttttggggtcctttgaaggagtattggaagtcatatcaaagtgacccgaaatttgtcaaagctctctcttcatacatccaggatcctgccaatgtcatctctcagtaccatggcggagttgcgaatactgagtctgttgatcctgctgcttatacgctggacattgcgctcattcagcgtgtaggtcaaactgacattcaattgaagttgttctttgattaccaaaaaaatgtcaagttgtattccgaatttcaacggtttctaagagattcgaacattcccgttctagttgcttggggtcgaaatgacaccatctttagtgtttccggcgctgaagcctaccggaaagatgtcaaaaatttaaagattgtttactatgataccggccattttgctcttgagactcacgtagttaatattgctaagcaaattatcagcgtctttggagagaaggcttga

SEQ ID NO: 3273 - DNA, 1035 bp, Saccharomyces pastorianus
atgacaaatagtgacaatagtaatgaatacggagtcatcacaattggtgatgcgactaggttccaagccaccattgccaaacttggtgcaactttggttgacttaaaagtgaataatcaatcagttgttttaggatattcggaagttcaggattatttatccgatggcaacatgatgggtgctatcgttggccgttatgcaaatcgtatttccaagggtgtttttcatctggaagatggtccccaccagttgactgttaacaactgtggtaacacaaatcacagcagtattagttccctcaaccttaaaaaatacaaggctcttccagtcgaaaacccctccaaggatgtttacacggctgaattctcattgttagatgaccatacacaatccaatcctaatgaattcccaggtgatctagaagttacaataaagtacaccttgaatgttgtcgaaatgactttggacatggaataccgtgcacaactagttcgtggagaggctactcctatcaatatgaccagccacacctacttcaacttgaacaaggctaaaagtgacaagtctatcagtggtaccgaagttaaactttgttcgaacaagtcattagaagtcagcgaaggagcattgattccgaccggtaagatcatcgagagaaagattgctacatttgattctacaaaacctaccactttgggcgataatgctccagtttatgattgtagttttattgttgatgcaaataaagatttggaagtcaccgactctttgagcgtaaataaattggtgcctgtttttgaggcttatcatccagaatcacgcctcacactagaagttgcaacaacagaaccaactgttcacttttataccggtgatagtctatgtggcaaatttactcctagatcaggatttgccgttgaacaaggcagatatgttgatgcaatcaatcatgatgaatggagagattgtgttcttttaaaacgtggtaagttatacacctcaaagacccagtaccgttttaaggtacagatgtga

SEQ ID NO: 3274 - DNA, 366 bp, Saccharomyces pastorianus
atggtcaaattcgcttctatcgccgctggtgtcgtcgccatcgcttccggtgccgccgccgccaccaccaccctagctcaatcggacgaaagagttaacttggttgaattgggtgtctacgtttctgatatcagagctcatttggctcaatactacctgttccaagccgctcacccaactgaaacctacccagtcgaagttgctgaagctgttttcaactacggtgatttcaccaccatgttgactggtattgctccagaccaagtcaccagaatgatcactggtgtcccatggtactccaccagattgagaccagccatctccagcgccttgtccaaggacggcatctacactgtcgccaaatag

SEQ ID NO: 3275 - DNA, 363 bp, Saccharomyces pastorianus
atggtcaaattaacttcaatcgctgctggtgtcgccgccatcgccgccggtgcctccgcaactaccactctagctcaatctgacgaaagagtcaacttggttgagttgggtgtctacgtttccgatattagagcacatttggcccaatactacctgttccaagccgcccacccaactgaaacatacccagtcgaagttgctgaagccgttttcaactacggtgacttcaccaccatgttgaccggtattgctccagaccaagtcactagaatgatcactggtgttccatggtactccaccagattgagaccagccatctccagcgccttgtccaaggatggtatctacactgtcgccaaatag

SEQ ID NO: 3276 - DNA, 1539 bp, Saccharomyces pastorianus
atgatgagtagtgtaatccagaaaagaatttttgtaggaaacattttccatgatgcagatgactgttattcagaactattaaatagatttagcaagtttggtgactaccaagatgcggaatttgaaaagcacaatcactttgcatttattgacatgaaatttaatgatgaggcagcatttcacaagctgaaaaaaagtttcaataatgttaagtttaaagggaacatattgaagattgatgaagcaaagccgagttgggaatctatttgggcggtacaacatgcgaaggacctcgaggagaatattgtgcaaaccatcaagatgaaaaaaaagaattgggagcattacaagaagatggagaatgtggcgaagagctggaaagatcataaggaggttatttctggaagaatgagagaggttcccaggaaaagagctcagtcgagaaacattaccttcagaattaatgtggacggatcgttgaaagtttataaatgttacaaaacaaaattatggggttatgagagaaacaaagaattaaatgacctggtgtataaatttactaataatttctggaaaaacgggtatgatcatattgtagataggttagactatagtcatgcagccaagactattcgattcagtaatgggctgaaacagttgaccgtatcacagagtgagaacgctggaagcggaactacggacagcgatgagaatgtttcagaagaagagaaggagaaaaacaatgacattctaaatggcctattaaagggctttgatttcgataagccgatgccattgaatgactccgaggatgagctgattgtacaagatgaagcaggggaagaatatgtttcagagagggaggattccgtactggaagaagtaccagaagaagccacagaggaaaatgtttcagaagaggaggatactgtaatagaagaagacattgcagaagaggaggacgcagtagtggaagatagttcggagcaaattgtgaacgaagaagatgacgttataatggaagaagttccagagaagaaagaagaacaggatgacgatggggaggaggatcatgaattcattccaactttcagcaaggaagttggtcaaggcacaataagcaacacagagacattaagaaccttgttcaaccccaacgaggcagaaccagtgtcaggatttaaattaattgaagattcggacaacgatattgatcatgcaaaggatattgatgtccagcaacaagaagtagaagcaagaaactcacacgctttggaatttgattccaccatggcccaaacatccaaggataaagataccaagaacttcttatttttccctcatttacaatcgccatttttggtggggcaaacacagttgagtaaagtgagggctagtgagaacgaaaagattctgtcgacctgggacgaagagttttgggccaacagaggtaactggacgcgtgacatgagacgcaaaatgaaagatgcacagaagcatcgcaagagaaaacaatccaaaaacggggttcttttataa

SEQ ID NO: 3277 - DNA, 690 bp, Saccharomyces pastorianus
atgtccaatggtactggaaacgaggtcagttcgctgtacccgcctccacccccgtacgtaaagtttttcacacagacaaatctggagaaattaccaaaatataaggaaaataagactacgaacacagagcaagctgcgccgggagacggcaccggcagcagcggtaaagatgagcagcggggggaagaggagattacttgcgccctggactacctgatcccgcctcccatgcccaagaaccagcagtaccgagcgtttgggagcatatggcaggtcaaggaccaactgcccgacctcgagaccatggggctcacccaactgtacaaaaagtccacggagagcgaaagcacaaactaccagtacaaggtccaagagctgcgcaaactgttgaagtcgctcctgctgaactatttagagctcgtcggggtactaagcatcaacccggacgtgtatgagcgcaaggtggaggacatacgcaccatcctcgtcaacatccaccacctgctcaacgagtacaggccccatcaatcccgagagtccctcatcatgctgctggaggagcagctggagtacaagcgcggcgagatccgcgagatcgaccaggtctgcaaacaagtacaggacaaactcactagcatacaggacaccttgagagccggcacgcatcctcccccatcgtcctccccttga

SEQ ID NO: 3278 - DNA, 1422 bp, Saccharomyces pastorianus
atgtatgcgatgaaatttgcaatcacgtttattttcctggtcttggaactgctcacattgtgtcaagcttcagtccatcccataaaaatcaaggacaagcatttcgttgacacagtgactggaaagccgttcttcataaagggtgttgactatcagccaggaggctcttccgaagttaacgaaaaacaagacccgctatccaatcccgaagcatgtgctcgtgatattttgttgtttcaggatttgggcataaatacagtaagaatatactccataaatccagacctaaatcacgacgcatgtatgaccatgttggcgatggcaggaatttatcttattttggatgtgaattcaccgttacaaaaccagcatctgaacaggtatgaaccttggtctaccttcaacgaattttatttggaacatgttttcaaagtggtggaacaattctcccattacaataacactttaggattctttgctggtaatgaaattgtaaatgacaaaaggtcagcccaatattcaccggcatacattaaagagcttattggatctatgaaaaaatatataagtgcacactctgccagaacgattcccgtaggttattcagctgcagacgatttaagttataggatctcgttatccgagtatttagaatgcaaagtcgaagataagcctgagaacagcgttgatttctacggtgttaactcttatcagtggtgcggtcaacaaactatgcaaacttccggatacgacacattggtggaagcatacaggagctattcgaaaccagtttttttttcagagttcggatgcaataaagttttgcccaggcaattccaagaaatagactcattgttctctgatgagatgtattcagtgttcagtggaggtttggtttacgaattttcacaagaggataataattatggccttgtcgaatatcaagacgacggtaaggtacagttattggcagattttgaacagctcaaaatgcattaccaaaatgttgagtttccctctatgaaaactttaaaagagactgttgaaatgcaggacgccccatcgtgcatcgaagattatgaaaatttgaatattgaatccaaaattgctaaaaatttaggaagttttttggttaaaaaaggtgtaaaagttgagaaggggaaatatatagatctgcataagaatcagttatcccctaatgttacgatattgtgtgtagatggtagtagctgggatggacccaaaaggattgaagtagtacaaagtttaacatcctcagaccagcaagaggggggggaggaggacgaggaaggggaaagagatgagttgaaaagaaagcacagaaattctggctctatgatcggccctttggtaccccccggtttgtttttgctcttttatattttaaacatcctattttaa

SEQ ID NO: 3279 - DNA, 726 bp, Saccharomyces pastorianus
atgtgcgatagcagccaaaaagaagatcacagcacaagtgcgagcgatagcgcgttgttcttcaactaccatgagttctcgtttccattctacaaagagctcggttccgaagacgctatacccaaggagcacgacgaagaccacaaattgtgtataacgcactttccaaacgtctacgcgccgcggggctccgccgagtttcagatgacccgggtggtgcgtgtgccccggcgattcgacgagtcccgggacagcctggaaataccacagttcagcacgcagttgcccgggagcgagccggcggctatcgtcggagacaatagcagtggcgggtttgtgcgatgcgggcgctacgacaccggcgatcacgtgttcggctgctcgtccgcgtcgccactgtccgagctgttggacgcggcggagctggcagaggtggtgcgccgggtaaacgagtacctgcggcgggaggggtatgaggtgtacgggtggcgcaatcttggtggcgtggtgctggacgcggtcacgggcgggctgtggagctgggcgtcggggccccttctcgctttgtgtgggcctatgtttcaagagtcgcgcgccctagaacagtacgtggcgcagctgaactcgccgggcggattgctccacgagcgcggtgtgcgcctagttctgccccgacggtccgggtgcctatccctggattttgtcgtgcctcgacctgccgagtaa

SEQ ID NO: 3280 - DNA, 1830 bp, Saccharomyces pastorianus
atgaagacttcgatagctgctagttctcgatgggccaagggccgtttctctcatttccttccctcgtcgaccaacgaaaacgatatagaggcctcatccactgatgaatcctctttacaaggaaaggaactacatcataggaaaaaccacgaggaagaaaataatggtacgaggccaaaaaagtctcagatgtctacctcgactttgcagatagagacgagacaagatgaggatgaggatgaggatcgaatcgtcatcaaacccgttaatgatgaagacgatacctcggtgataataacattcaatcaatcgatctctcctttcatcatcactttgacatttgttgcctccatatctgggttcatgtttggttatgatacaggttatatatcgagtgcgttgatttctatcaataaagacttggacaataaagagttgacgtatggtgaaagagaaataatcacagccgctacttccttgggtgctttaatcacaagtatcggggcaggtaccgcggcagatgtgtttggcagaagaccgtgcttgatgttttccaatttaatgttcttaatcggggcaatcttacaaatcaccgctcatagattttggcaaatggctgcaggtaggctggttatggggttcggggttggtattggttctctaatttcaccccttttcatcagtgaaattgctcccaagatgatcagaggccggttgaccgtcataaattctctatggctgactggtggtcaattgattgcctatggctgtggtgcgggccttaaccacgtcaacaacggttggagaattttggttggtttatcgttagtacctactgttatacaatttactttcttttgtttcttaccagatactccaagatattatgtcatgaaaggtgatttagagaaggccaaaatggtccttaagaggagttatgtgaatacagatgatgatgtgattgaccaaaaagttgacgaactggctagtctgaaccaatctataccgggaagaaacccgataataaaattctggaatatggtcaaggaattacatatggtaccttcgaatttcagagcattgattatcggttgcggtctacaagccattcaacaatttactggttggaattccttgatgtatttttcaggcacaatctttgaaacggtaggattcaaaaactcttctgctgtttccattattgtttcaggtacgaattttattttcacattaatagcgttcttctgcatcgataaaattggccgtagatatatcttgttgattggtctgccgggcatgacaatagcattggtcgtatgtgccatcgccttccatttcttaggtattaagtttagcggcgctagtgcggttgtggcatctacagggttttcatcctgggggatcgtgatcattatatttattatcgtttacgctgcattctatgctttaggtatcggtaccgtaccatggcaacaatccgaattattcccacagaatgtgagaggtgtggggacttcatttgccactgctaccaactgggcaggttctttggtcattgcatctactttcttgaccatgttacaaaacatcacacctacgggtacgtttgccttctttgccgctgtggcatgcttatcaacaatcttctgttacttctgctatcctgaattatcagggttggaattagaagaagttcaaacaattttgaaagatgggtttaatattaaggcttccaaagctttggccaagaagagaaaaaggcaggtggctcaaggtgctgttcatcacaaattgaaattcgaacccacccaagaaatcgtggaaagttaa

SEQ ID NO: 3281 - DNA, 690 bp, Saccharomyces pastorianus
atgcaggtagcgcaaaaagataaaagagatacgcagatctccaaagctttgtcatatttgcttcgacatgcagccacgaaggaaaatttgatcattgacacgaatggttatactccagtgaaagaactactaagccataatagattgaaaactcataaatgtacactggacgatatacatcgcattgttaaggagaatgataagcaacgtttccatataaaagtatccgaagcgggtgaagagtggatttgcgctacccaagggcattcaatcaaatccatcaaaccatcagatgacgttcttgaaccgatcactgaagtatcgcagctaccagcggagctgatacatgggacaaatctccaatccgctataaatatcattaaatcaggcacgatatcaccgatgagcagaaatcatgtccatttgtcgccgggaatgttacatgagaagggtgttattagtggaatgcggtcttcaagtactgtctatatttttattaaatgccattctctctcatttcttcaaaatattaaagtattcagatccctgaataatgttttcttgagtactagcattcctgttcaatatattgaaaaaattgacatcaaaagaaatttgagggacgaagagaaattaaatatcttgacaagaatcttgggtgagagaaatataccgatggaaaagatgtaa

SEQ ID NO: 3282 - DNA, 1302 bp, Saccharomyces pastorianus
atgagtagcgacgagagtgtagaacaagtcacccaacaagtgtctggactgaaaaccgccgatgtcaaggaacaagtggtcacaccttgggacgtggaaggtggtgttgatgaacaaggtaaggcccagaacatagattacgataaattgatcaagaagttcggtaccaagccagtcaatgaagaaaccctgaaaagatttaaacaagtgacaggtcatgaaccacatcatttcatgcgtaagggtctgtttttcagtgagcgtgatttcaccaagattttggatctttacgaacaagggaaaccatttttcttatataccggtagaggtccctcaagtgattctatgcacttgggacatatggttccatttgtgttcaccaaatggttacaggatgtgttcgacgtgccattagtcattgagttgactgatgacgaaaaatttttattcaaacataagttaacgattaatgacgttaagaattttgcccgtgaaaacgccaaggatatcgtcgccgttggctttgatccaaagaataccttcatcttttccgatctacaatatatgggtggcgcattctatgaaactgtggtaagagtctccagacaaatcacaggttctactgcaaaggccgttttcgggttcaatgactccgattgtatcggtaagttccatttcgcatctatccaaattgccactgcgtttccaagttcattccccgatgttttaggcttgcctgataagacaccatgtttgattccatgtgccatcgatcaagatccatatttcagagtctgcagagatgtagcggataaactaaagtattcaaagcctgcattgctgcattccaggtttttcccagctttgcaaggttctactaccaaaatgtcagcctctgatgacactactgccattttcatgaccgacacaccaaagcaaatccaaaagaaagtcaacaagtacgcattcagtggaggccaagtctctgctgatatgcatagagaattgggtggtaaccccgatgtcgacgttgcataccaatacttatcgtttttcaaagacgatgatgctttcttaaaagagtgttacgacaaatacaagtctggtgaactactatcaggtgaaatgaagaaattgtgtatcgaaactttacaggaattcgtcaaggcattccaagaacgtagggctcaagtggacgatgagactttgaacaaattcatgctaccacataagctggtctggggcgaaaaggaaagactagtcgcacccaagccaaaggtcaagcaagaaaagaagaaataa

SEQ ID NO: 3283 - DNA, 942 bp, Saccharomyces pastorianus
atgatgtttgtaaggtcccgggtattgaggagtgctacagtgtggaagcaattggatgtttgttcgaggtttacggttgggcgacaaacaagatacaaatctactgatgcctcggaagatgaagtgaagcatttccaggagctggccccaacgtggtgggacactgacggatcgcaaagaattttgcataagatgaaccttgcccggttggattttatacaaagaacactaaggaaccaaatcaagattcaggatccagaggtatacgtccctgggttcaactacaaggaatttttacctgactatgtatgtgacaatattcgtcgcgaagtgcaagggagtatagaggctggcttgtccggaaggcaggaaatgagcgtcttggacgtggggtgcggtggtggtattttgagtgaatcattggcgagactcaaatgggtaaagaaagtccaaggaatcgacttgactcgtgaatgtattatggttgcaaaagaacacgccaagaaagatcctatgctggaagggaaagttgattatgagtgtaaggccttggaagacgtcacaggacagtttgatattatcacttgtatggaaatgctcgagcacgtagacgttcccagcgaaatcctaaggcactgctggtccagactgaaccccgacggaggaatactatttttgagtaccatcaacagagatctcatctcgtggttcactacgatcttcgtaggtgaaaatgtcttaaaggttgttccaaagggaacccatcatttgagcaaatacatcaattcgaaagagatcctagcctggttcaatgaccactacgacggccaatttcgcttgctggatctaaaaggaaccatgtaccttccaatgcaaggatgggtcgagcacaactgttcagacattggtaattattctatggccatccagagattgaagtga

SEQ ID NO: 3284 - DNA, 972 bp, Saccharomyces pastorianus
atgtccaagattttgtctttgcaacttccatgggtggagaaatatcgccctcaggttttatctgatatagtcggtaataaagaaaccattgatcgacttcagcaaatcgctaaagatggtaacatgccccatatgataatatctggtatgccgggtataggtaagaccacctcggtacattgccttgcgcatgagctgctgggcagttcctacggcgatggtgttttggaattgaacgcttcagacgatagaggtattgatgtcgtcagaaaccagataaaacactttgcccagaagaaattgcatcttcctcaaggtaaacataagatcatcatcctcgatgaagcggactccatgacagctggtgctcagcaagcattgagaagaaccatggaattatactcgaattcaaccagattcgcatttgcttgtaatcaatctaataagatcattgagccattacaaagtagatgcgcaattttaaggtactctaagctatcggatgaagacgttctaaaacgtctcttggaggtcataaaactagaagatgtcaaatacacgaatgatgggttagaagcaataatttttactgccgaaggtgatatgagacaagctataaacaatttacaaagtactgtagcaggacatggcttagtcaacgctgataatgttttcaggatcgtcgattccccacatccattaatagtgaagaaaatgctactagccaccaacctagacgattccatcaacatcttgagaacggatctttggaaaaagggttattcctcaattgatatcgtaacaacatccttccgtgtcactaaaaacttgacgcaagttaaggaatcagtaaggttagaaatgataaaggaaattggcctaactcatatgagaattttggaaggtgtcgggacttacttacaattggctagtatgttagccaaaattcgtaaactaaatactaaagtctaa

SEQ ID NO: 3285 - DNA, 9246 bp, Saccharomyces pastorianus
atgtcccatcacaccaaaaataataagaaagagcatggtaccgatgctcaatcatcccatatgactcgcacactgatcaagcatgttcttttcgatagaatactcccgatcttaccggtcgagtccaatctcagtacttatctggaagtggaggcatacgctccattcatatcatgcagatctttactctttaacgtcgccgtttttagagaccttaacgctatcgtgggttattctttggaattgattgagttactcctccagggccatgatatcatttcggatgagaacaacgacgacgttatcgagtcgatattggtcactctgcggctattaagtgatgtgctggaatataactggcaaaagctggaaagtctcaaccatagcgacatatcaactcaaatagaacacgagcaagaacagaagccaaagcttcccggtatttttcccgagttctcttccactcataataatgacaataaacattttttccatcagatgaaaccatactcactaatacctgatttggcgtcgaagttgatcgagacttgctcggctttgaaattcaacacgagaactctgcaaattttacaaaatatgattgaccatgtgcacggaaatattttgacgacattgagttccacgattctgcccggtcacaaatcttatctggcaaaaaataaccacccttcccattgtaaactaatcgattccaccctgggtcacattctccgatttgtagcagcttccaatccatctgaatatttcgagtttatcaaaaaaagtgtacaaattcctgtaacacaagcccaggtgcactcccacagtcactcacattcattgtcgtcttccgtgtataacaacatagtgcctcacttggatcttttcagtttcatctatctaaccaagcataacttcagaaggtatttggaaatcgtaaaaaacttatccatgccactaaagagaacgatataccattgtcttcttttacatttcaccgcaaaggcaataatgttctggataatggccagacccgcagagtactatgaactttttaacttattgagagatcataatgatgaatctgcaaaatccataaacttgctaattcatactctttttgaggagatccactcaactttcaacgtgaacagtatgataaccgccacccaaaacaaccacccgggttcatcgtcttcttcgccatcttcgccgtcgtcgccacctagctcatcatcatcagataataaccaaagtgtgatagctaaatctttaagccgccagctttctcaccatcagtcttgtatccagcaacaacccgagagaaaagtccattcgtcgtggaccacaaattctcaatcctctacgtcattgtcgtcgtcagcctcttcatctacaacaacatcattatccgctcacgcacaatcagttgaatatgatccatctttcgcagatacaccaacgatgtccaatgttaccatcagtgcctcctccttgctctctcagacacctacgccaacaacacaattacaacaacgattaaacgcagcggcggcagcggcagcggcagcggctgcatcatcgtcatcatcatcgaattcaacccaaactgcatacacggaacaacagcaaagtcgagccgcatatgactcgcccaaagttggtcacactggtaaggattatgatgagaatttcttatccgtgactcgtttgaataatgttctggaactgtacacgcatttcgatgacactgaagtactgccacatacatcagttctaaaatttttgaccactttgacaatgtttgatatcgatctattcaatgagctgaacgcactgtcatttaaatatattcctgattgtatatcgcatcgcccaagggaaagagcaagctcatttaatagcgccgcgttacatgaagttggttcagaaagaaccttaggtataaaacacatcacacagggtttgaaaaaattgacttcgttacctacgtcaacgaaaaaaactgtgaaatttataaaaatgttactaaagaacttaaacgggacacaggccgtatcggatgttgctcttctagacacaatgagggctttgctatcattcttaacaatgacctccgcggtcttcctcgtggataaaaatcttccttcagtactttttgccaagagacttatccccataatagggacgaatttgagcgttggccaagattggagttctaaaatgaattacaatttaatgggttgtttgaaaaagaattccaacgcgttcattcaattacaattaatattcttctcttctgcaatccaattcgatcatgaattattactggcacgtttaagcattgataccatggccaacaatctaaacttgcaaaaactatgtctttatactgaaggattcaggatatacttcgacataccaagtaagagagaactgcgtaaatctattgcaataaaaatctccaaatttttcaagactttattttccattatagcagacattctcttacaagaatttccatattttaacgagcaaatcaccgacatagtcgcatctatccttgatggtacaattatcaatgaatacggtacaaagaaacattttaagggaagctcaccctctctatgtccgacaactagatcaaggtcagcatccacatcccagagttctatgacccctgtttctccattgggatcagaagcagacacgtatccaatgaacactttatctttagtcggttcaagcacttcaaggaattctgacaatgtaacccctttgaacagttctcctaagaatttatctactgatccgtatctgtcacatcttgtagcgccaagagcacgtcatgcgttaggaggtccatctagtattttgaggaacaaggtgcccactactttgacatcgcctccagatacagaaaaatcatcacctgtacaacgtccgcaaactgaaagtatcagtgctaccgccatggcaataacaaattctactccattatcatctgctgcctttggtattagatctcctctacaaaaaataaggacaagacggtattccgatgaaagtttggggaaattcatgaaatcgacaaataactatattcaagaacacttggtaccaaaggatttggatgaggctgctctccaagacgctagaaggataatgattaatatattcagtatattcaagagacctaatagctacttcatcattccacataacgtaaattccaatttacagtgggtttcccaagatttcagaaatataatgaagccgatctttgttgcgattgtaagtgctgatctagctttacagaaaacggcccaatcatttatggatacgctgctatccaatatcatcaattatagcgagtcagatgaaaccattagtattgaaggttatcacctcctttgtagttatactgtaactttatttgccatgggtctttttgatttgaaaatcaagaatgaaaaacgtcaaattcttttagatataacaattaaatttctaaaggttaggtctcacttggctgaaatagctgaaacttcgcaccatatggagtacataaatgatgctgaaaaacttactttcccactgatagtgggaaccgttggtagagctttattcgtttcattatattctagtcaacaagaaattgaaaaaactttaaaagtagcatactcacagtacctttcggctatcaattttcatgaaagaaatatcgatgattctgataagacctgggttcataacattgagtttgtagaagcgatgtgtcatgataattacaccacctcgggttccatagcgtttcaaagaagaactagaaataacattttacgatttgctactattcctaatgcaatattacttgactctatgagaatgatatacaagaagtggcattgttacacgcatactaaagacttagataaacaagaattgaatgatttcagaaatttcgcaggtattttagcctctttgtctggtgtcttattcattaacagaaaaatgctagaggacacatacccttatctcctcgacactgtttctgaattaaaaaagaacattagctttttcatttcaaaacaatgccaatggctgagttatcctgatttattaacgagagaaaactcaagggacattttgagtgtagagctacatcctttgtcgtttaaattacttttcagtagtttgagactcaaaatgaaagaattggcttgttcagacttatcaataccagaaaacgaaacttcttacatcttattggaacaaatcatcaagatgctacggacaatattaagtcgggaagatgataattctgttatgttgcttttctccacagagatagtagacttaattgactcattaacagaagaaatcaaaaagatgccagcgtactgcccaaaacattttaaggcaatcattcaaatgaccaagatgttcagtgctttgaaacattcagaggttaatttgggtgttaagaatcactttcacctaaaaaatagatggttaagacaagtgaccgattggtttcaagtcagtatttcaagagaatatgattttgaaaatttgtcaaaaccactcaaagaaatggatttgatgaaaagagacatggacatcttatacatcgatactgcaattgaggcctcaacagcaatctcatttttaactaggcacacttttctggaaattccacctgcagcctcagatcctgaattatctcgttccaggtctgtgatatttggatactattttaatattttgatgaaaggcctcgaaaaaagtaacgaccgcgataaattcccagtgtttttgaagcacaaaatgagtgtcctcaatgataacgtcattctttcgttaacaaatctttccaataccaatgttgatgcaagtctgcaattcaccttaccaatgggctattctggaaatcgaaacatcaggaacgcatttttagaggtattcatcaatatcgttacgaactatcgcacctacacagctaaatccgatcttgggaagttggaagctgcagacaaatatttacggtttacaatcgaacatcctcagttgtcatcttacgcggcagcagtttgtcctgccagtgatatcgatgcttatgctgctggtttaataaatgcatttgaaacaaggaatgctactcatatcgcagtatcacagttgatcgagaatgaaatcgaaaaatcttcaagacccaccgatatacttagaagaaatagttgcgctactaggtccttatctatgttagcaaggtccaaaggtagtgaatatttgattcgtaccctgcaaccactactaaaaaaaatcattgataacaaggtgttttttgaaatcgagaaattgaaaccggaagatgcagacgccgaaaaacaagtacaattgttcatcaaatatatgaatgaattgttagaggccatatccaactcagtctcgtacttcccacctcctttgttctatatttgtcaaaatatattcaaagttgcgcgtgtaaaatttccagaccatgctctcattgctgcggggtccttcgtatttctaaggttcttttgtcctgcattagtcagtcctgattctgaaaatatcatcgacatatctcatccaagtgaaaagcgtacatttatcagcttagccaaagttatccagaatattgctaatggctcagaaaacttttcaagatggccagttttgagtacccagaacgactttctgaaggaatgtagcgataggattttcaaattccttgctgaactttgtagagcggaccgtatcatagacatccaagtcaggacagatcctacaccaataccctttgattaccaatttcttcactcctttatatatctctacggacttgatattagaaaaaatgttctcaatgaagcaaaacgtgatgatggtgacattgacgatgatgagttctataagtcaacatttttactcatcgatgatgtcctcggccaactaggtcaacctaaaatggagttttcaaatgaaataccaatatatattagagaccacatggacgactacccggaactttatgagtttatgaatagacatgcattcagaaacatggaaaccccaacaacgtccaatccaaacgtccacgaatctacgtcaagcgaaggtgttccaatcattactttaacaatgtcaaatttctcaaacaaacacgtggacattgacacagttgtttataaattcctaccaatttatgctcgaatctggaccactaaacattgcctaattattgattgcactgaatttgatgaagacggacttgacatgagaaaatttatctccctggttatgggattattgccagaagtagcaccaaagaattgtttggggtgctactattttaacgtgaatgaaatgtttatgagcaactacgggagatgtctagacaaggagaatgttttcgtctcttcaaaaattccccattttttcatcaatagcaattctgatgaagatctcatgaaatcgttaggcataactggtcagggattaaaagttctgcaagacattcgtgtctctttacatgatattactctctatgacgagaaaaggaataggtttaccccagtttcactgaagataggtgatatttacttccaagttcttcatgaaaccccaaggcaatataaaataagaggtatggatacattatttgatgtcaaattcaatgacgtctacgaaattagccggatatttgaagtacacgtttcttcagtaactggtgttgctgctgaatttacagtgactttccaagatggaaaaagattgatttttagtagtcccaagtatctcgagattgttaaaatgttctactatgcacagatacgattagaaaatgaatatgaaatggacaacaattcaagcgcttcttcctcaaaatccagtgctaaggataaagaacaaaaggaaaggaataaattattgtgccacttactattagtatcgctcattggcctgttcgatgaaaataaaaagatgaaaaacagttcgtataacttggttgctgctactgaaatatcattcggtttgaacttcggttctcactttcatcgttcgcctgaagtgtatgttcctgaggaaaccactacgtttctatcggtaatcgggaagtcacttgcagaatctaatcccgaactcacaacatatatgttcatctatattttggaagctttaaaaaacaacgttatcccccatgtttatatccctcacacagtttgtgggttatcttattgggttcctaacctataccagtatgtgtatttggctgatgatgaagaaggtcctgaaaacatatcgcacattttccgtgtgctgattagactgtctgtgaaggagactgatttcaaggctgtgtacatgcaatacatttggctgcttcttttagacgatggtcgcttgactagcattatcgtcgaagaagttattaatcatgccttagagagagattccgaaaaccgtgactggaaaaaaacgatatcgttattaacagtactaccaactaccgaggtagccaacaatattattcaaaaaataatggcgaaaattagatcttttctgccatcattgaaacaagaagctatgacccaaagttggtctgagttaacgatattggtcaaaataagtatccatgtcttttttgaaacttccttattggtacaaatgtatttgccggaaatcctattcatcgtatctttattaatcgacgttggcccaagggaactcaggtcatcactgcaccaactactgatgaacgtatgccattccttggccatcaactcagcactaccacaagatcacagagacaatctagatgagataagtgacatatttgcccaccagaaggtaaaattcatgtttggatttagcgaagacaaaggaagaattctacaaatattcagtgcaacttcatttgcaagcaaattcaatattttggatttctttattaacaatatactattgctgatggaatattcctcaacttacgaggcaagcgtatggaagacaagatacaagaagtatattttggaatctgtattcactagcaactcctttctttcagcacgttcaatcatgatagttggtataatagggaagtcttacataaccgaatcattatgcaaggctatgattattgaaactatgaaagttgttgctgagccaagagtaaccgacgaacaggtctttttggtcatatctcatatctttacttattccaagattgttgaaggtttggatccaaacctagacttaatgaagcacttgttttggttttcaactgtttgcctcgaatcaaaacaccctataatttttgaaggtgctcttttgtttgtgtcaagctgtatgagacgcttatatatgtcccagtttgaaaatgaaagcgaaacatcattaagcacaactttactaaaagaaagaaaattcgcctccaccttactatgcgaaatagagagcattaatggtatcgtttggaatggagataattttacacacattatagtttccattgttaatagagggctctgtaacccattcatcaggaatacggcattagattttttaaaaatggtgtttaaaaattcctattttgagcaccagattgatagaacctctgatcattatttgtgctacatgtttttgttgtatttacttctgagctctactcaatttgaggaagttctaggtgatgttgatttcgaaggcgaaacaatctccattgaaaacgaaaatactattccaaaggttttattagaatggttgagttctgacaaagaggattccaatatttcactctaccaaggtgcggtgttattcagaagttctgttatagatgaaccaagcaagttcagatttgggttgattgttaggcatttacttaatgtaaagccgatttgtgcattcaggttctacaacgttattcgtaacgagataagaaaaatctcagcatttgagcaaacatcggattgtgttcctttggcgtttgacattttgaatttattggtgacacattcagaatcttattcattggataaacttaacgacaagtccattgaacttttgactaaaagaggtctcctgataacaactaagatcgacaaatttgcaaagaattccgatatgatgttactgatacatttagaaccccatattctttatgaacgtaaaagaatactaacaatgattttatcgagaatggcatgctctacttag

SEQ ID NO: 3286 - DNA, 1374 bp, Saccharomyces pastorianus
atgggaatggacaagttcagccagctactggatcaactgggacggggcaatttcacacaattgacactgaacctgttccaaaacggtcaagaaattgctgttctacaacaacagttggccggatatgatgataaacagttggtcacgttggtggaacaacacccggctatgcccaatgacacacggttcaagatgatgtgcatatcatatctgaaatatagtcgggatgtggatccatggtctgtctgggctagctcagatttaatatttgagttttatcaatgtttaatcaactgcctcatcaatgacaatgctcctcacattgaggcattaataccggtggccatcagagagacggagtttattattgccctagctcataaactagactcgttccacttgcaattgcatacaagaaaccatcagtttttatcgcatacatcgtccattctatccagattattcaacagcaccaaacctccacgtggtaatggatcgtccaaaactattccaggaaagcagcgaatactgctgtatttggtcaataagctaaataacatctacttcagaatcgagtctccacagttgtgttccaacatcttcaagaactttcagccaaagagcatgctcgcacattttaacgagtaccaaatcaaccagcagatagaatatagatatctcctggggcgttattacctattaaactcccaagtgcacaacgccttcgttcagttcaacgaggcattccaatcgctattgaacttacctttaaccaatcaagcaatcgtcagaaacggttcgagaatactaaactacatgatccccacgggattagtactgggcaagatagtcaaatgggaacccttacgaccgttcgttagtcaagaaactatcgacaattggaatacactgtacaggtttgttcgtttggggaatatccaaagtgtaaaccactggttgaggcacaacgaacgccacttgtgtgcgagacagttgctagtagtactcttagagaaattacccatgattgcgtaccgaaatctggtcaaaacggtgatcaaaatctggaccaccgaatggggccaaaacaaattaccatactcgctaatagaacgggcactaaaactatccattggcccagcatacgaagacaacacagcccaggatttcaccatttataacggcattcactcctcaaagaacgtagaaaacgtacttgtgaccttgatcaacttggggttcttacgtgcgaactgtttcccacaactacaactatgtgtggtaaaaaagaccacaatgatacaagaaattgtcccgccagtcactgagcggatcaccaagatatttccagcaaactctcacgttctttggtga

SEQ ID NO: 3287 - DNA, 480 bp, Saccharomyces pastorianus
atgtttccaacagtcacaaagacattgtcgctgcagcgctacagaatcactagccctctggttgggtccacttcgttgttgcgcagccttaggtggtacagcagcgagaaagatgaccacgacgatgtgatgacaaggatcaaaatggcccctataaagagaaccaatgagccactggacaaaaagagagcacggttgatataccagtctcgcaaaagaggaatcttggaaacagacttgcttttgtctgggtttgccgctaaatatctgaagaaaatgaaccaagaggaactggaggagtacgattcgctactgaatgagttggactgggatatctattattgggcgacgaagaactacgagattagtcccttgcctgagaagtgggccaattcaaagttgttgacgcaattacaagagttcagcgaaaataaagagaaggaaatcctgagtatgcccgatttgtccaagtaccaatga

SEQ ID NO: 3288 - DNA, 2874 bp, Saccharomyces pastorianus
atgccttctcagctacccaacgaaactgacgatccttttacgagatggctaaaatcccgccccattatacaaagaactatatcgacgagagagtgctttgattctgaggtgttcttggcctctggtggctggaatgtaactaatgaattgctaacgctaaagaaatactaccagctgaaatggccgaactcaagtggctgtacgttccacccaaagactatagagctcattgaagaacgattgcgcagtttggaggagcatgattcttcatgcaaaatcccaaatacatcttattcatacaagaaaacatttctggaagataccaaatctgcattgtccaatttagaacccgtttggggcccaccaagacttttgaatccagcagaattgctgttaccacaagatgagaagttattcgttcaagagataccactaaaattcgaacctttccaatacacaaacagatttgcatatggtggcctacagtttaagaacaatttattcgtgacttatggaagttattctttcctggctgctggtcaaagcattgaggttcataattttgacgtgcttttaaacgcttcctcattagagatctgtcatgctctattgcccgtggtaatgccagacgatgaaggtgttagaaattctcgtaattcttcttatgtgaaattcaaagatgcacaattcaatgacatacctatgttatcctctgtcaattttctgaaaatctgtaaccttatgcatcaagacttcttgttggcatgtggtgataatggggttgtttacatgtgggagatttacaaggtaatcaaaatattcaataaatttacttcagacaccttagcaggcagcgataacagtcgagaaaggtacataaacgttgatccatatatggtgttgagagtagaggactcttgttggagcgtcgacgcaatcgacatatatggtgtaatatatatcgctgtgggacataacaagcctggtgttactgtcttcgcctttgataaggataccggaaaggaaaggaaacacattcatccactagacctcccctcgtctcataacgttccttgtgttaattttgtcccgaattcaaaagattccaatggatatattactttgagttactgctccatatttgggaacgttgttactgttaagataaaggaacacaactctagtattctaacgagctttcttgatacccaattttttggcgatgatttgtggacagtaactccactaagtaaaaatgattttatgaatgttgaaaattttgaatcactgaatcttaactaccaagatggcttcaaggaaaatatgttgtattctatttgccgagatgatttcttactagggtattactgtgataacacatatctatcagggaattttggaatcggtacactactcaatcaatttcaagttcctgtaacagatctacggctaacttcctcagaaggaattccagacgaacaaatcctactaagattcacctcatttgatagaaattataccaccacaggctcaataaaatatgagtacagtagagaggatttcgcacttatcttacatactagcgatttagatgatatgaaccatacagtgacaaaaagtgttccttgcgaaccacatttacggcagtggacattttgggacgattttggtcacaaacattaccgtaccacggatcgtgggttttcaaagtataaagatatcatcagtacctttccacaaatgataacgccaagcggaagaaataaatcatcacaataccagagtgcttctgacaggaaaatctgcgaaccttttacttataaacttactgatctagaaaacgatattgaagatatttctagagaattcaataaaagtgtccgcaatctaagaatggacaaaagaagacaactgcaaacgtcaaaagagtttaaatcgctaagctcagtaaaccatctgcccattattgagtcggggaatttcttatggtacaacactgacgctgcagctgattggagaacactttcaggtaaaaatttaaagactgttctaaagaacccagagatatgtagccttcgcctgaactccgtagaggataatgaggtcatcagcgactctgagaacgaagaatctggcaacaacttaacaagtttccaacgtagatataggaatactgaacagcgtgctaatctcaaatcagatacacaaaaatcctgggggttccataactatgtaagaagcgtcaagcggttattggagtcagtggtaccgggttcggaagattcgccgcttggataccaactacctgaaatgcatgacgaattcttccttgtcactacagcacacaggttagtattaatgaaagcgcatcccctcatcattacatcagcgacacagcatgacattttccctctagatggtgttgtcacatgtacctcgaaatcgttactgcaggcattgaatagaataaattttgtatgtcacatcaaggaactacattgcgtagccatagcctcacaattgggtctcgtttcattattaagactaacggagtatagaggcatatattcgttcagacaggaatatattctgggttgggaagtacaggaccccactaatcctagcgtagagtgtaggtgcaacagaaatctgtttaacgcacccatatacggtgtcgacgaagagaattcagatagctattgcggagtttgtgatgcatacttccctatgggtgatgtttgtggtcttgactacacttacacagctggcgatgaagcgttgaagcgtaagggatatgccacactctacgtagcctcgagaggcgccttacgggcgttcaagatcaccactgagcatggagctgccctattatag

SEQ ID NO: 3289 - DNA, 2871 bp, Saccharomyces pastorianus
atgccccctcagattcccaatgaaaatgatgatctctttacaaggtggcttaagtctcgggccatcatacaaagggcagtatcgacaagagagtgctttgactcagaagtatttctggcgtctggtggctggaatataacgaacgagatggtaacgttaaagaaatattatcaactcaagtggccaaactccagttgcaattcgtttcacccaaaaaccgtggagtttattaaagaacgattacacaacctagaagaacatgactcttcatggaaaatcccaaatcctgcttactcatccaaaaaagccttcttagaggatactaaatctgcattttccaacttagaacccgtctggggaccgtcaaggtttttgaatccagctgaattactattgccccaggacgaaaaactacttgttcaagagataccactagagttcgcaccttttcaatacacaaataggtttgcttatggtggtttgcagttcaagaacaatttgttcgtcacttatgggagttattccttcctggctgccggtcaatgcgtcgaagttcataatttcgatgtactattgaacgtttcgtcattagaaatatgtcacgccttattgcccgtgataataccagatgacggagatgtaagaaacttccgcaattcatcatatgtgaaatttaaggatacgcagttcaacagcatacctgaactatgttctatcaactttatgaagatttgtaacttcatgcatcaagattttctactagcatgcggtgacaacggaattgtttatatctgggaaatcaacaaagttattaagatatttaataaatttacttcggatatcttgggaggcaaagataacagccgggaaagatacataaatgttgatccatatatggtgttaagagtagaggaatcttgttggagtgttgatgtaatagatataaatggcatcatatatatcgctgttggccataacaagcctggagttacagtctttgcattcgataaagatgtaaagaaggaaagacggtacattcggcctctggatcttccctcatctcacaatgttccttgtgttaactttgttcctaattcaaaagattctgctggatatattacattaagttattgttctatatttgggaatgttgttaccgttaagttaaaggagcatgattgtaccattttaacgactttccttgatactcaattttttggcgacgacttatggacaataactccactgactaagaaggattttgcgaaagttgacaatttcgaatcgttgaatcttaactaccaagacggtttcaaagaaagcatgttatattctatttgccgagatgattttttacttggatattactgtgataacgcctacctctctgggaatttcggtattggtacattactcaatcaatttcaggttcctgtcacagacctacgattgacttcttcagcagggatccccgatgaagttataccattaagatttacctcatttgatagaaattacactacaacggcctcgataaaatacgagtacagcagagaggattttgcacttattttacatgccggtgacttagacgatatgaatgatgcagtaacaaaaaacacttcatgtgaacagcatttacaccaatggacattttgggaggattctggttataaacattatcgtgctactgagcgtggattttcgaagtacaaggatattattaatacttttccacagttgataacgcctagtggaagaaataaaacatcgcaatatcaaaacacttctgggagaaagatctgtgagccgtttacttataaacttactgatctcgaaaatgacattgaagatatatctcgcgaatttaatagaagtattcgtaatttgaaaatggataaacaaagacaactacgaacttcaaaagagttcaaatcgctaagttcagtaaatcatttaccaaatattgaatcgggaaactttttatggtacaacaccgatgccgctgccgattggagaacactttttggcaaggatttgaacacagtcttgaaggacccagaaatttgtagccttcaactgaactctacagaagaggacgatgtcaatagcgaccctgaaaatgaagaatctggtagcagcttaacaagtttccagcgaagatacagggatactgaacagcgtgctcacttgaaatcagaatcgcagaaatcttgggggttccacaactatgtaagaaacgtcaagcggctattggagtcagtagtaccgggctcagaagattcgcctcttgggtatcaactatccgaaatgcacgacgagttcttcttcctaaccacagcccataggctggtgttgatgaaagcaaatccactcataattatatcagcaactcatcatgagatttttcccttagatggtgttgtgacgtgtgcttccaagtcgctgctccaagcactaaacagaataaattttgtgtgtcacatcaaagaactaaattgcatagccgtggcttcacaattgggtctcatttcattactaagactaacagagtacagaggcatctattcgtttagacaagagtatattcttggatgggaagtccaagaccctgttaaccctagtgcagagtgcagatgtaacaggaacttgtttgacgcaccaatgtatggtgcagatggagagagctcggacacatactgcggcgtgtgcgacgtctatttccccatgggtgatatttgcggactagattacacttatgcatctgacagtgaagagttaaaacgtaagggatatgctaccttatacgtagcatcaagaggctccttgagggcattcaagatcacaactgagcatgaaacaactcaataa

SEQ ID NO: 3290 - DNA, 1485 bp, Saccharomyces pastorianus
atgagtaatattgttgtctttggaggggactcgcaccccgagctggtgaccaagatctgtgagaatttagacattcatccgttgcaggtggaattggggaagttttctaatggggagacgagcattgccctgcgtgagtctgttcgtgagaaggacgtgtatatcatccagagtgggtgcggtcaagtgaatgacacacttatgcaactgttgatcctgatcagtgcttgtaagtctgcgtctgcctcgagggtcactgcggtaatgccgtatctctgctactcgagacagcctgatattccatacactgccacgggtgcccccatcatttccaaacccaaggagagctacacttttgaatcgcatccaggcaccccggtgtcttcttcgttgatgacgcaaagaccaggtgctgaaagttcgttgaagagcttggatagtgccatacgatccaccatcaatctggaaaatcctcaacctatcagaacaccaaacatcaacgccacagcgaacaacaatcccgaaatcaaaaaaacgctttcgttttccagaatccccatgatccctggtggtaaattacaaaacacaagcaacagcaaggatgcaggtgaattgttcaacgctcaaaacgcgggctacaagttatgggtagtacaagccggtactttgattgctcatttgttgagcgctgcgggcgctgaccatgtgatcaccatggatctacatgatccacaattcccagggttttttgatatcccagtcgataacctttactgcaaaccaattgctcaaaattatatccaacaccgcattccagattatcaagatgcagtgatcgtttctccagatgctggtggtgccaagagggccaccgcgatcgcagacgctctagaattatcgtttgctctgattcataaagagagaagatctcagttactaaagggtcctccggatgctacattgacttcaggtggttcgttgcctgtatctccaagaccgttggtgacgacacttgtatcttctcaaaacatgactacatcaattgccacaggtgttgcagctctagaaatgaaaaaaacaacatcaaactcttccacttcatctcaatcctctaattcatccaagtttgttcagaccaccatgcttgttggtgacgtgagaaacaaggtgtgcattatcgtggacgatttagtagatacttcatacaccatcacgagggctgccaaattattgaaggatcaaggttccaccaaagtttacgctctgattacacacggtatcttttctggggatgcactggagagaatcggccagagtagtatagataagctaattatttccaatactgtccctcaagacagaaccttacaatacctgggcaaggaaagagtggacgttattgatgtttcttgcataataggtgaagctatcagaagaatccataatggtgagtccatttctatgttgtttgaacatggttggtag

SEQ ID NO: 3291 - DNA, 912 bp, Saccharomyces pastorianus
atgactgttggcgacacttttaaactatttattttaagacatggtcaaagcgaactgaactcagagaatatattctgtggatggatagatgccaaactaactgaaaaaggtaaatctcaggctcgccattccgcaaaattgatcaagcaatatagcgacacaaataacatccctttgcctcaaattggttatacttcaagattggtccgaactgagcaaactatggacgtccttctcgaagaattaaaattaggacaccaaaaccgcataattactatagatacagacatcaatgaagaactacatgatatagggttgcgaggagagatacctgtgttccaaacttggagattgaatgagcgccattatggttcatggcaaggacaaagaaaaccaaaagtcttaaaagaatacggcaaggaaaagtatatgtatatcagaagagattacgatgggaagccgcctaaagtcgacttgagtttggaaatggttcaagaggagaatgatcaaggttcctccaccggctatgattttaaggagcctaatagacgcttaaaatatgtcgcagaagaaaatgctaatgaacttttacctgaaagtgaatctctttgtgaagtggtcactagattgagacccttcttaaatgacgctattttatctattgctagaaaaaacaaccaagaatcatgtgttatagtgggacatggtagttctgttagatcgctgttgaaaatcttggagggcgtctctgacgaagatatcaaggatgtcgacatccctaacggtattccgctagttatagagttggatagaagtaatttccaatttgtgagaaaattctatttggatccggaatcagctaaagttaatgcacaaatggttcgcgatgaaggtttcgaaaaaaactcatga

SEQ ID NO: 3292 - DNA, 3279 bp, Saccharomyces pastorianus
atgagcagcctcatagatttaggtagatatgttggaagaactcgccatgaagaagacgcctcatcgagctccaaaagagtaaaagttgccacagctgatttatcttccttccagcctggcagtataattaagatccgtttacaagattttgtgacctacactttaactgaattcaacctttcgccgtctctaaacatgattattgggcccaatgggtccggtaagtctacttttgtgtgtgctgtgtgtctggggttggctggtaaaccagaatatattggtagaagtaaaaaagtggaagattttatcaagaatggtcaggatatttcaaggattgaaatcactttgaagaattcaccaaagattcatgatattgacttcataagtacacatgacgaaacaataaaagttactagaataatcactagatctaagaggagatctgattacttgattaacgacgaacaggtatcggaaaatgcagttaaaaccttagtctctcagttgaacatccaattagataatctatgtcaatttttatcccaagagcgtgtggaggaatttgctcgattgaagtcagtaaaactattggtagaaactataaggtccatcgatgcaagcctgttagatgtactagaggaactaatggaactccaggcaaatgaacagagtttgcaaaaggaccttgacgttaaaaaaatgaaagtcgttcatctgagacaagagagcgataaactacgaaaatcagtagagtcattacgagattttcaaaagaaaaagggtgaaattgagttgcactctcaattattaccttatgtgaaggtaaaagatcataaggagaaactgaatacctataaagaggagtatgagcgagcgaagtcaaatttaagagctttattaaaggataagaagccatttgcaaatacaaaaaaaactttagagaatcgagttcacgaattgacagaaaaatgttccttaaagaatgacgaatttgtgaaagcaaaagaaaaagttaatgatatttttgaaaagttgaataccatacgagatgatgttattaagaagaaaactcaaaacgaatattatagaggtagaaccaagaaattgcaagcaaccatcattgatacaaaggaggatttggcgagaaaccgagaaattctagaacaaactcaattgcctgaaaaaagcgtatttgaagatatagataacaaaagaaaggaaatcatcaacaaagaaggagacctccgaggacttatttctgaaatagacgcaaaagcaaatgccgttaatcatgaaatgaggagtatacagaggcaagcagagaataaaactaagtccctcaatacaactgataaaattggtattttaaatcaagatcaagatctgaaagaggttcgtgatgccgtgcttttcattagggaccatcccgaaatgaaggagaaaattctagaacctgcaattatgacagtgtctgctattaattctcagttcgcagcttatctggctcaatgtgtggattttaatacaagtaaagccctgaccgttgttgactctgacgcttacaggctatttgcaaatccgattcttgagaaattcaaagtgaacttaagagaactatctaacactgattccaaacctccggtgcctatagaaacagttcgagatttgggtttcgaaggttacttatccgattttattactggtgacaagagggttatgaaaatgctttgtcaaattaacaggatacataccatcccagtatctaggagggaattgacgccggcccagataaagagattgattacaccaacatcaaatggaagaattcttttcaagagaattattcacgggaacagacttgtagacatcaagcaatcatcttatggtaataagcagatatttcccactgatgtcaacataaagcagactaacttttaccaagggtctatcatgtcaaatgaacagaaaactagaatcgagagtgatattgacaacttaaagaatgaatataataaccgaaaatctacgttagacacattgtcgaatcagaagagtgattataggcacgaattatctgaacttgcatcaaaaaacgacaatataaacagaaaggctcatgaactaaatgaggttcgtaaaaagtacactatgaggaaaagtacaataggaacactggaagagaaattagatgagttgaaacgtgaagccaggaaggatgtatcacagaagatcaaagatatcgatgaccaaatccagcagcaactgctcaatcaaacacgattactgtccaagatggtctcttcgatggaggatttaaaaaattctcaaaaggaattaatgacctcccaaattttccagtttgaagcccaaaatatggacatttccatgaatgatgtgattggatttttcaacgaaagagaggctgaattaaagcatcaatatgagcataagaaaaagttcgtgaaggagatgagggatactcctgaatttcgatcctggatggaagaaattagacactacgacgaggatacaaaggaaagattgaataaagtagcagaacaatatgaaaaagagaggaatttcaatttgccattcattcaagatgttatcgataaattagaatccgagatagctatggtgaatcatgacgaatctgctataacaattttagatcaagtcgtcactgagttgagagagttggaacaaacagttcctcagcaaactaaagatttagaaaccactaaagccaagttaaaagaaggtcatgccattttggaacctaagctggatgacatagtatcaaaaatctccacaagatttgctcgtttatttaataatgtcggtagtgccggtgctgttcatctggaaaagccaaaggactatgctgagtggaagatagaaatcatggtcaagttcagagataatgcaccattaaagaaactagattcccacacgcagtcaggtggtgaaagggcggtttctacggtcctttacatgattgccctacaagagttcacctctgctccattcagagtcgtagacgaaatcaaccaaggtatggactcaagaaatgaaagaattgttcataaggccatggtagagaatgcatgtgccgaaaacacatctcaatatttcttgatcactccaaagttgttaaccgatttgtattaccacgagaagatgagagtacactgtgttatggccggttcttggattccaaatcctacggaggatccaaggatgattcatttcggcgagacctctaactactctttctga

SEQ ID NO: 3293 - DNA, 522 bp, Saccharomyces pastorianus
atgtacaagatgtcgaaactagcaatatactcccagctaggcgattttacaaatttagaagagccgccggagcccaaggaattattccaagaccttggtagctttcctacttttgccaagatacatttatcaagcacccaaaggtcaacaaactatagtgaggccttgtgtcattccaggcagagttatcctgtcacactgtccaaaatgacgttgcaagagcagaggcacaatatgtccacggttccgttacaagaaaaggatcagatgaaaatttacgatgcttacaaggtgatagacatgggcgatcacgtttcaccggaatccctgcgtttgaaatcaagaacagcattcgaaggatcccatgtaaataaggcacgctcaaagacagagggattttttaacgagccaactgtactcaattcagacttccaagcactttccattgcacaaaattcaaacgtcttcttgtatgaagactacaaaaaattcgtttatcgacagctaaatatgttcacctag

SEQ ID NO: 3294 - DNA, 2163 bp, Saccharomyces pastorianus
atgacggatgttattgatttagagttaggcgacgacatcgtcaagaagcctattgattcgaaacgcccgaaccagtcttcgaaaaccaaggtcaagaggaggggccaattgacttttgacgatttcagaaacattaaagttaccgaggaacctgttgtcttttctcacaatgtttccatcgatgactcgttggacgctgctatccagaccaataagcacaataaagatgaaaaaattgatgatgaagagcctccaagcaaaaaattaaagggtaacgccaagcatgaacactctaacatcaaagctcatccaaacgaggtaataaaggcagaatcgaacaatgaaaatatcattaacaatagaccgctatatactttaaactggtcacccaatatccctttacaatttcttgactaccgaaaacctgtaggcgaagacaaagctgtagaagataagtgggcacctcccaactgcattcctctcccatacgcaggtgatattataaaggtgctttcgtttattgctaaatttcattgggccttcggtgatgatttactaaatttatcattccaagaggtggagattggattagagttacaatccaatctccacgttgcatatgttcattctttgaaggatgttaagctctgtcaagacaaaatgaatcttctattctgcagcattttaaaattattattcaaccccgataaaggaactgagaaccatacacacaagaatttcactttacaaaggttcctcaatttgaaaaatccatacggaaaattggtacgcaaactaaagactgtaatgcaggaatggggctgccctgaagaatggcgtaataacgatgactcgttatctaccttaaaccttaatgggcgtggtttgttgaccatgaaaccatcagctagaataatcctattaaggtgtatgattgattggagttgtagctactctccgctttttcataacgaaatccagaggctgtctcatttgaaaggcgacactgggtttaaccatcagactttccatacccccagactttccatgtacggagtcgatgacactttaaacaattttgaagtattgtgttctttaatgaatcaaaaactggaaaaccggaaaaagaggaggtctcacgaccaagacaaactgagtgagatcaacgaacaaatgaaatttttgaaggacgttcgaaagtcgctgaacgaaaagttgactgcggacagattacgggcaaccatcaaaattaatgaacagtggagcaagtatttcgagaacgaactatcgcacacaccggttgatgaccctatagccgatgaaatatataggttaaggtcatcagagttcatgatcgcaagaattccgaagttaggtgatttttacttgccaccatttcgcatcgaaaataagtgcaatgcaactagtactacttataattttaacaaaatgacaacttatgttaattactatatcaaatttaaaaaagaggacagagtggcaccaaaacagcttgcggcaagtataccgagagaaaacacctgtcaattaaaactattatacaatgacacttcggtacgtgttcacgatctactttctagtgacactaaattagcgaaggcgtctcattggtttgaagtttcaggtgacctagagtctttaattggctttattgaatatttagaaagagcgccgttacttgaggaaagtactggtgccgatacgaaaaagggtattgataacctaattgaatatttgaaagttttcattgtctttataagtgaaactattaaaattactacagatacgactacacagagcattgtaggacgtcatctgcgaacgaaatctcggcaaagagctagaacgcattactcggcggatggggatagtgactgctttgaggaaaccgaaaacgaatttgacaaagagtttaacgataattgtcaatctgaatatttctgcagtagggaggaatctgaaaaaactagtggtaatgggataagtgaatgtttaaaggctggaacagataatgaaagtaataatcagagtgaggattacagcgatgtagaaattttttcagaacctgtgaggcaaatgcctagcgattctagggaagggagaagtttaagacgtaatgccagaagagatctatcattttga

SEQ ID NO: 3295 - DNA, 1365 bp, Saccharomyces pastorianus
atgcccaaggagacaaagctcataaactctgagtttgatgtagaggttcaagatccagaacgtctaaatggccaccctgtggccaaatttatcaacaagttgagcggtcaacctgaatcttatgtcaacaggaccaattatattttcggtcgaacactgggtgctggttctttcggtgttgttagacaagcaagaaagttgtctacaaatgaagatgtagccatcaaaatccttttgaaaaaagccttgcagggaaataatattcaattgcagatgctgtacgaagagctatcaattttacagaaactgagccatcctaatattgtctctttcaaagactggtttgaatcaaaggataagttttacattgtcactcaattagccactggtggtgaattattcgatagaattctctcgagagggaagtttacagaaatagatgctgttgagattatagtccagatccttggtgctgtagagtacatccattctaaaaatgttgttcatagagacttgaaacctgagaatgttttgtacgttgacaaatcagaaaattcacctctggtgattgcggactttggtatagctaaacagttgaaaggaaaagaggatttaatttataaagcagctggatcgttgggttacgtggcgccagaagtacttacacaagatggacatggaaaaccctgtgatatatggtcagttggcgtgatcacttacactttactctgtggatactctccgttcattgctgaaagtgttgaggggttcatggaagagtgtacggcttctagatacccggtaactttccacatgccatactgggataatatatctattgatgctaagcgctttattctaaaagctttgatactggacccgactgataggccaaccgctacagaattgttagacgatccatggattacatcgaaaagagtcgaaactagcaacattttaccacacgttaagaaaggcttttctttgcgtaagaaattgcgcgacgctattgaaattgtcaagcttaataacagaattaagagattgagaaacatgtatttgttaggtgatgacggtgataatgacatagaagagaactctcctaccgggagttgcttggatggcatcacacgctcattgcatgatttgcgttttcaacctcaaaagaaagtagcagaactttcaaaagagcaaatgaaactaaaatctgcgttgacgaaagaagcgtttgtccaaatcgtgaaagctgcaacaaagaataagcataaagttctaggtggcgaggaggaagagagtgatagtaccggaagtgaggaaaccaaagcaaataaccaagagtccaactcaaaggactcaaattactga

SEQ ID NO: 3296 - DNA, 822 bp, Saccharomyces pastorianus
atgtcatttgatatcaactggagtacactagaatccgataatcgactaaatgatcttattagaaaacatttaaattcatatttgcagactacacaactaccaagctacgtaagtaatcttagagtattggatttcgatttgggaaaagttggtcctgcgataactctaaaagagataacagatcctctcgatgagttttatgactccataagagacgagctcgagaataatgaggcagaagaaaatgacaataacaaaaacgaacacgaacacgccaatattgaacatcgtgtagtcaatcaagaaaatattaatgaagattccgagccactcgtaattatgccgtccccgaatgacgtacagtttttattagaggccgaatataagggtgacctacttgttacaataggtgccgatcttgtactaaattatcccgttgaaaagtttatgactttgccagtgaaactttctattagtgatatagggctacattctctttgcattgcagcgtatctatcaaagcaactattcttcagttttctgtgtgatgttagcgatcccgcattggatgatagtcaaattattttggatcctaaaggaccaattctggcagctactaagccgttagaacgaatatctattgtaagaagtatgaagattgaaacggaaataggagagcagtatcagggacagggttctatactaagaagtgttggggaattagaacaatttatgttcacgatttccaaagattttttgagaaaggaattggcatggccaagctggatcaatctagactttaacgatgatggtgaacaataa

SEQ ID NO: 3297 - DNA, 633 bp, Saccharomyces pastorianus
atggttataataacaagttgcttgcagacttcagtactcttcaggagagcatctctcaagccagttctaaggtgtccatttgaaaggcatttttttggtttaggcaccagtaatcatgctattagggaacaacggtatgtcttacgcaagaccgttaacacgcatcctagtactgtttatgcagctgtttctgaggtttctgaatacaaggaatttattccttattgcattgattcatttgtagacaaacgaaatcccgtagataacaagcctgtaattgcggggcttcgagtcggttttaaacagtacgacgagaaattttcatgcaatgtctcatgtaaagaaaaggtaaacggggataacacttacacagttgttgctgaaactatatctcataatttatatgatctattgtactcgaaatggactataatgccccacccaactagaccaaatgcgaccatggtagaacttttgttgcggtttaaatttaagtctcgcatatataatagtgtttctctgatatttgcaaagactgtgaccgaattagtgatgaacgccttcgctaaaagagcataccatttggtaaggctggccatgttaaaatcttcatctaaagaaactccttcatga

SEQ ID NO: 3298 - DNA, 369 bp, Saccharomyces pastorianus
atgaatgctccagacagatttgaactattcctgctgggtgagggggagtccaagctaaagatcgagcccgacaccaaggcccccaacgccgtggtgatcacgttcgagaaggaggaccacacgctgggcaacctgattcgcgcagagctgcttaacgacaggaaggtgctgtttgccgcctacaaggtcgagcaccccttctttgcccggttcaagctgagaattcagaccaccgagggctacgaccccaaggacgccttgaaaaacgcctgcaacagcattatcaataagctgggcgcgctgaagacgaacttcgagaccgagtggaatctgcagaccctggccgccgacgacgcgttcaatatgtaa

SEQ ID NO: 3299 - DNA, 4680 bp, Saccharomyces pastorianus
atgtcgcaggtctggcataatccgaattcccagtcgaatgaggcgtccactccaactgataccgccaattcgaaggaaagaaccgaaaaggaaccgcccctccagggaacacagcctagttccttcgttcaaccacaacaacgcattactctaccttcactgtcagctttgaacgctaaggacgaagacaggagagatggcaatggcaatggccatggtcaacaacaacaacagccgttgggctcacattctactcgcatactgggctatcctcctgctcattcgaatgtcatgccttccaattcggcgctaaaacaaccccacgactaccacccccgttcgaactcgccctcctcgtgtccttcttcaaacgccgcgactatggcggctgctgtagcagcggctgctccagctccagcaccagctcctctacctactacaggaggtgctagcttttccctatcaagattcgacaatcctttgccgatgaacactcttggacgtaccgaagaccggaagagttataacggtctgccagaggaagaaaaaataaaccaacaagttcaagatcataaggaagttcccactgtggtacaacccgccgacgcggccgaagtctcaagtgtttacactgacactaaagacgatgttaatgtcgagaacactaacgatgaagatcctgactatagacccttaaacgtcaaagatgctttgtcgtacctcgaacaagtcaaatttcaattcaattcgcgtcccgatatttataatctatttttagatatcatgaaggacttcaagtcacaagcaattgacacgcccggtgtcatcgaaagagtgtccactttgtttaggggctatccggttttgattcaaggattcaacacgttcctgcctcaaggttataggatcgagtgttctgctaacccggacgaccccattagagtcaccacccctatgggtactacgacagtaaataataacgtcagtccacccgcaagaggcactctagacacgcaggagcccagttcttttccggaagccgatggaagcactatcccacaatctcacaacgtgcccatggtaccttcgaatgtttaccactcggaacagagtcaagatcaacaacaatctcagcccctttcgaataatcctcctggcttaccttcaattcatcaacccgaatcaccaattccccagggtcaacctttaactattcaagaagacgttaagaaaaatgtcgacgtcgaatttagtcaagccataagttacgtcaataagattaaaactagatttgccgatcaacctgatatctataagcatttcttggaaattttgcaaacataccaaagagaacaaaagccgatcaatgaagtctatgcacaagttactcatcttttccaaaatgcacctgatttacttgaagatttcaagaaatttttaccagactcttcagcttctgctaatgaacaggtacagcatgcccagcaacatgcccagcaacaacaggaggcccaaatgcatgcacaagcccaggctcaggctcaggctcaggctcaagcacaagctcaggctcaggctcaagcacaggctcaagcacaggctcaagtggaagcagaacagcagcagcagcagcagcaattcttgtatccggcatcgaactattatagccattctgctaacggaggtattccacaacagaatttgccccccattggaagtttttctcccccaacaaacggttccactgcacacgaaggttaccaagatcaacaacatatgcaaccacctcatttaattcccttaccttcgatggttcagcagggcccaaatatggtgcaccaaggaattgtaaacgaaaacctacctctttcggatttaagaacttctcttaccgaccagtatgctccatccagtttccaacagcaacagcaaccaagtactagtcctataatagattcgcaatatggtgatgtgcctgttaggccagaaatcgatttggatccaagcatagtacctgtggttcctgaaccaacagaacctatcgaagataacatatcgctcaatgaagaagttactttttttgaaaaagcaaagagatatattggcaataagcacctatacacagagtttttgaaaattttgaatttgtactctcaagatatacttgatctaggtgacttagtggaaaaagtagatttttatttgggttccaacaaggaactattctcatggtttaaaaatttcgtcggttaccaagaaaagaccaaaagtatcgaaaacgttgtccatgaaaaacataggttggacttagatctatgtgaagcattcggtccaagctacaaaagattaccaaagagtgatactttcatgccatgttcaggcagagatgatatgtgttgggaagtattaaatgacgaatgggttggacacccagtatgggcttctgaagattctgggtttattgcccaccgtaaaaaccaatacgaagaaacactattcaagattgaagaagaaaggcacgaatatgatttttacattgagtctaatttaagaactatccaatgcttagaaacaatcgtaaataaaattgagaatatgacggaaaacgagaaggccaatttcaagcttcccccaggtcttggtcattcttcaatgactatttataaaaaagtgataagaaaagtttacgacaaagaaagaggatttgaaattattgacgctctacatgaacatcctgcagtgacagctccagtcgttttgaagagactaaaacaaaaggacgaagaatggagaagagctcaacgtgaatggaataaagtttggagggaactggaacaaaaggtttacttcaagtcattggatcatttgggtttaacatttaagcaagccgataagaaactattaaccacgaagcagctaatatcggaaatcagcagcatcaaagttgatcaaacaaataaaaagattcattggttgactcctaaaccaaagagccaattagattttgattttccagataaggatattttctatgatattttgtatttggcagacagtttcatagcacataccacagcttattcgaatcctgataaagaaaggctgaaagatttgttagatcattttatatctttgtttttttctattcctttagaaaaaatcgaagaagcattgcaatcttataaacaaaatttgtcagactctagtggatctgacgatggagattctactacatctagaaaaaggccatatcaacaggaaatgagtttacttgacattttacatagaagcaaataccagaagctaaagcaatctaacgacgaagacggcaaagtaccgcaactttcggagccacttgacgaagaatccaatgctatcgaggaagaagaactcatcaatgaagaagccaaaaacccttggttaaccgggaacttggtggaagaagcaaactctcaaggcattatccaaaatcggaatatctttaatttgtttgccaattcgaatatttacatatttttccgtcattggacaaccatttacgaacgtcttttggaaatcaagcaaatgaatgaaaaggtcactaaggaaatcggtaaaagatcaatggtcacttttgccaaagatttagatctgctttctagccaactttctgaaatgggattggatttcattggtgaggacgcgtacaagcaagtactgaaactgagtaggaggctaattaacggtgaccttgaacatcagtggtttgaagagggtttacgtcaagcttacaataataaggctttcaaactctataccattgataaagtcacccaattgttggtaaagcatgctcacaccttaatgactgatgctaaaactgcagaaataatggttctatttgtcaaagatagaaactcttccacaacatgtgccaaggatcaaattatttaccgtttgcaggcacgttcatatatgtccaatacagagaatatgtttaggatggagtttgataaaagaaatttgcatgtttccgttcaatatattgcccttgatgatttaaccctaaaggaacctagagcggatgaagataaatggaagtactacgtaacatcatatgctttaccacatccaacggaaggtatctctcacgagaagctcaagataccatttttggaaagacttattgaatatgggcaagacactgatgggagggaagttgacgaaaaattctctccagaaggtatctctgtatcgacgctgaaaatcaagattcagcctgtgacttataagctgcatattgaaaatgggtcttatgacgtttttactcgtaaggcagctaacaaatatccgaccattgctaatgatgacattcacaaagaaacggtcgtaaaaaagacagggttggtatcaaagtttttggataacgcaatacgtttaaggaatgatttaaatgagactaggaaattaactatgcaagaaaaattggacagcctaaaaggctccacggcaaaggtggacgttgataataaaataatagtaaccaaaaacgaaaaagctatagaggcaaaggaagaacagccagagaattttccaactcccgatacacatatattaccttcttccatcgcaaatgtgccacaagatgataatacagtagtgaccggaggcacgggtccttccgataaagagataaaataa

SEQ ID NO: 3300 - DNA, 2847 bp, Saccharomyces pastorianus
atggcatcagcactaccaaccatacctgagcctcaaaactttgcacctagtccagactttaggtggctttgcgaagagttatttgccaaagtagatgaggttcgaattaatgggaccgcaggaaccggtaaatcagtatctttcagatattacgaaataatatcaaacttcacggagttgtggaggaaaacggtaggaaataacatatatcctgcgttgattctcgctcttccataccgcgatagacggatctataacataaaggattatgtgttaataagaactgtatgctcttacttaaagttgccgaaaaactctccaacagaacaaagattgaaagattggaaacaacgtgtagggaaaggtagaagcctttcttcccttcttgtggaagagataagcaaaagaaggactgaaacaactggaaaatttattaccgttgacagtattaatgattatctggatgaattaagtgaagagatgaacgcgtctggacgtggtttcaagaacctcgtcaagtcgaaaccctttctatactgtctggaaaatatgacttttgtcgagttaaaatacttttttgatatcgtacttaagaatagagtaattgggggacaagagcacaagcttctgaattgttggcatcctgatgcccaagattaccttagtgttgtatctgatttaagggtagtgacatcaaaactctacgatccaagagttcgtttaaagaatgatgatttgagtataaaagttggctttgcatttgcaccacaactggccaagaaggtgaacctttcatatgaaaagatatgccatgccttgcgcaatgacttttttgttgaagagaaaatggacggtgaacgaatccaagttcattatatgaattatggaagatccataaatttttttagtagacgaggaattgactacacatatctatatggagaaaatttactatcgggaactatatcgcaatatttgaagttttcagacagcgttaaggagtgtgttttggatggtgaaatggttacttttgatgcaataaggaaagtgattctcccgtttgggcttgtgaaaggaagtgcaaaagaagcgctttctttcaatgacataaacaataatgatttccatcccctttatatggtgtttgatttattatatcttaatgggacctcattgacgccattgcccctttatcagagaaaagagtatctgagcagtattttgacacccttaaaaggtattgttgaaatagtacgatattctagatgctatgatgcagaatcggtaaaaaaggctttagaagttgctatttcactgggttcagaaggagttgttttgaaacattataattctggctataatgtcgccagtagaaacaacaactggataaaggtgaagccagaatatctagaggagtttggagagaatttggatctaatcataatcggcagagactctggaaaaaaagactcttttatacttgggctactcgtggtggatgaacaagaaacagccaaaacggatcaagaaggctcccccgaaattttaaatgattcaagtgtcgaacagcctgtaaaaaatccaaaaatgagtgttaaaaaagtcctttcattttgttctattgccaacggaatttctcaagaagaattcaaagagatcgaccgtaaaaccagagggcactggaaaaaaacatcaggattttgtcctccatcttctattttagagtttggctcaaaaacaccagccgaatggattgaacctagcgagtctatcgttttagaaattaaatcacggtcattagataacactgaaacaaacatgcaaaaatatgctaccaactgcactttatatggaggttattgtagaagaatacgatacgacaaagaatggacagattgttacacactcgatgatttgtatgaaaacaggcggactaaatctaatccgagccatcaagttgagaacctccaacttcaactggtgtctaagaaaaggaagagggtactagtttctgacccctttcaccaaagcagagaacaaaagccaatttcagacatttttgacggactgtttttttacgttctctctgattacatcaacagtgtcactggagtgcggattacacgggcagagcttgatgatgatattgtaaaacatggtggtaaattgatacataatgtaattttgaaacgccattgcattggagaagttcgtctaatcggttgtaaaattaccggggaatgtaaggctttaattgatcgaggatatgatatattacaccctcgttggataatggattgtacggcatataagaaacttcttccgatcgaacctagttattgctttagcgtctctgaaaaattgagggcagttgcaacaagaagggtggactgtgtcggtgatagctttgaaaatgatatctcggagagtaagttgtcttcgctacaaaaaagccagcaaaatttaccatcaacaagacaagttgacaaaagttttgagctccagattattccgttatttttgttttccaatagaatagcatacatcccacgcagcaaaatcggtctgaaagatgagaagcttctagaaatgaaaatcaggctgtttggtggcaaaataacggaccaacagtctctttgcaacctaatcatcataccatatgccgatcctgtttggagaaaaaactgtttagaaaaggtacatattcaaataaaggaacgggtaaaggcttcggactcggtgagtgtaccaagaatacccagaattgttgcccctgaatgggtggaccattctataagcgaaaattgtcaagtacctgaagaagattttccagtgtcatactgttga

SEQ ID NO: 3301 - DNA, 939 bp, Saccharomyces pastorianus
atggggaaaggtaaaaacaagactcacgagcccaaaaacggaaaaccacagagaggcgctaatgggcacagctcaaggcaaaatcataagcgcatggaaatgaaatacgataattcagaaatgacaaaatttcctgtcaaactggccatgtgggattttgaccattgtgatccgaaaaggtgtagcggtaaaaagcttgaaagattgggtctaatcaaatcattaagagtgggacagaaatttcaaggtgttgttgtctcgccgaacggtaatggtgtcgtctgccccgatgacctcgagattgttgaacaacaaggtgcctcagtggttgaatgttcttgggcccgtttagaagaagtacctttcaataaaataggcggtaagcatgaaagattgttaccttatttagtggccgctaatcaagtgaattacgggagaccgtggaggcttaactgtgtcgaggcattagccgcttgttttgctattgtcgggagaatggattgggcaagtgaactgctgtcccatttctcgtggggattggggtttttagacttaaacagagaattacttgaaatctatcagcaatgcaccgattccaactctgtcaagaaggctgaagaggaatggctacagaaattagaaaaggaaaatcaagaacgaaaatctcagtctaaggatgaagacatctggatgatgggtaacgtaaatagaagggataatggagcgcaatctgatgaatcggaaagcgaagaggattctgatcaatccgagttggaaagtgataaacaatctatagaatatgactctcttggtaacgccattggcattgataatgtaaagagccgaaaaatgctctctgaagggtcggaagatgaagaaagtgagtctggagaggacgaagaacctgttagttatgactctctaggtaatataatttag

SEQ ID NO: 3302 - DNA, 207 bp, Saccharomyces pastorianus
atggctgaaaagaagtgcgcctgtgaatgcgaatgctgcaaagactcttgcaaatgcggaaccacctgtgttccaaactgctctggtggtgaaaagtgtaagtgcggccacaagtctgaaagtacccaatgtaacagttgcggtaaaagttgcaaatgcggtgccacctgcagttgtgaaaagagtaaatgcacctgtgacgaatag

SEQ ID NO: 3303 - DNA, 1281 bp, Saccharomyces pastorianus
atggaagaaaaagatagcaaggatattccttcagttgagaagaaagaagctccaaaacaaattgatgaggatatcgcaaagactacagatgtcgatctcagcgccgatgagaaagaagatagtgatgctgcagacaaggataagagcaccccacaaaatgttaaagaaggagaaaccccctgtgaagctaatgatgatacaaaggcagtttctgcaaagaaaacagatgaaggagaggaaaaggaagaggagcagcctcccttaccggccagaaacaggtctgaagagcctgcgccaaaggagaacccaatattgcaggagttaaaggatgcttttcccaatttggaggaaaagtacattaaagcggtgatcattgcatctcaaggtgctttggaccccgctttcaatgctttattattcctatcggatcccgaatcaggtaaagatattgaattgccaacacaacccgtgagaaagatttccgaggcgccggtgagaagacgtcaaacccaattggaacaggatgaactattagcacgtcaactagatgagcagttcaaccggtcgcattctcgccgccaccaccgtgaccgtgcagctcaaaatacgcatgaacagcgtctaaaagacagacagaggaggcgtcaaaaccccttatctcctgaagaaaggagggaatattatggagatgctgaggaacaggaggattcgtggtctcaatttgtagacaaggacctgcctgaactcacggacagggctgggcgttctttgcaggacacagcaaataaagtgagcagctggattagtgatgcttacaagagaaactttgctcaaggaaacgaacaaaacaacaaccaatatggtcaccaagaacaacaagaagaatgggaaccagaaatcgtggacttctcggcccagaatgaaaagaagacaaggccccagcagcctgagagaaagaggttcaattcgttcggtgcccaagtcggtgaggattcgctagaaagccacggaatcgcactacacaacgaagacgcgtttgaagaagatgaggacgtcccaccccaattgcctacaaggacgaagtctggtgaatcagccggaaaagtagtggcggagacagcctatatcgatacacctgatacggaaaccaagaagaagtggcagccactgccaccggagccattggacacgacaccaaccaaggtgaacgccttttccagggacaagaagaagaaccccgatgaggacgagttcttgatcaatagtgacgatgaaaagtaa

SEQ ID NO: 3304 - DNA, 1239 bp, Saccharomyces pastorianus
atggctaaaagacccttaggtttaggtaaacaaaacagagaaaagaagaggaaggtggaaagcggtgaaaagacggatgatgagccttcaaaagaacctacaccagcaagaagccaaatgagcgtcgaacttgacgacgacgccgatctagacgacgaattggcccaactgaaaggtctgtggtccaaatacttccactctgatagagatgatgagtatgttttgaatggtatcgtccacggatgtgatagattattgcgtctttccgaggagaacgaggaaatcaagaaaactttgaacgatgtattccatggtatttatgccttggccctatccgaactgactattttcagagcaggggatgaagaagcaactcaagaaaagagaagagaagatgtatcttcattttttgacagtgccatcgaaagagttgaattaggtctttcacgttttccagactcccagtttttaaaattgattttggcaaagatcattttccaaagaattccattggaacatatctccaccctcgacttgaagtcaaaaaacggaaaactcaaccttgttgaacaattcgagcgcgctaaagagcatttctcagtctatgaaaacgatacagaactaacgtacgagattctacagatgatgaatgacttattggacatcatcgaaaacttcggccgtgagcaatctattcaagaaggtatagatagtgataacgaagaggaagaagaactgatcgagattgaattggaaccagaacatcctgtatacccactacaacaatcgttggaagaaaactacgaatggttaagagaacatttcagcaagttgctcgacaccatgaataccgacatggaagtatatccatccgttgccaatactatcggtgaactatacttgaaaaaagctgaagaaccaagcaagatcttcttgagcttacagtatgacgatgacagcactgaaaaggccagcgacaaagaagccaaggccgcccaaaagacagcgttagcgcacacaaagaaagctttgcagtatctggaaaaagccaaactggaagatgatccggacacctgggttcaagtcgctgaagcttacattgatctgggtaacttacttgacaacgaaagtgttgaacaagaaaaagcatacgagaccgccgaagaaatcttaagtaaggccaacaaggcatcccatggcaaattccaagatgtccttgacaacttcttgaagaattga

SEQ ID NO: 3305 - DNA, 1044 bp, Saccharomyces pastorianus
atgtcgaacttgactccgttattccagaaatacgtcgctgtgattgaagaaaccagaaaagaacaaaatccagatgatatagatgataatgtaaaagacgaaaaacagaacttggtgaacactgatgaaattcgcgaactggttaacgattctttcattaaagaatgtgcaaaactactaaattcgcttattgagttgaacaaagtcataaagcagattgaaaaaaactatttggatgatttgaatatgagtgatggggaaaaggacgaatttgacatggagtgtaggttgcaaattcaacagtatttcaaaaaattcgaattcctagaaaattatgaaatggaaaggcatagtttaatgctaaagaagcttcaatcaaaacctcataagtggtcgaatttactttccaataagaatacaccttttagaaatgtaatacatccgcatgatgttgaaaaaggggtccacgaatttagattaggtgttcttcgatgcttgaacttatggattaaatacgtatcttccaaattcacctcaattcaacaagagaggttgatattggagaacaaaatgaattttaattccacacctgtgcccacttcatctaagaatgtagaggatttccctgcagatgcagtagatatctcagtgtcacaaactgctccagtcgaaacagtacaagatgaagtaaagcattatgaagaaacgatctccaagctatctcagcagcaattacaagtattagaaacagaacattcggaactattgaatcaaaaaaacgagcaattgaaaaaaatagataccataaacaaaacaatcctggatgttgttaatatacagaatgaactgtccaatcatttaacggtacaatcacagaatattaatttaatgctaaataatcaagatgatattgaaataaacattaaaaaggggaataatgaactacgtaaagcgaagagagccgccgggagaactgctaaaatgaccacttatggtgccattatcatgggtatctttattcttctcctcgattacgtgggttaa

SEQ ID NO: 3306 - DNA, 3561 bp, Saccharomyces pastorianus
atgtcacagaaggaggataccggggcagtagtacctaaaaagcctgaaacggcgcaagtggccaacattaatggtgtagataagttgcaacctccaaagacaaaagaggagaccgaagcaagcaaaagtgtgtcatctgaaaaggcatctcatgccggtgatgacagcttcaaaagaagcatccacgatgcttcctatgtaggatggaagcagatcggtggctgggaggaaaaagacgaattgactttggatgatgaattgatggatatgagtaaggaaacattcttgaataacatcataccggataatctctatggtgattggtatcattcggtggcgattttctttatcggaggtgttctatcgtttgcattgggtcattacaaattctcaatgggctctgcctttttcgtgattgtaatcacttcactgctgtatagaacgtccactaagaaatacagaggttccataagagagttagttcaaaaggaatttactgtgcaaaaagtggagaacgattatgaatccttggaatggttgaatactttcttggataaatactggcccatcttggagccctccatgagccaacttatcgttcaacaagccaatgaacaaatggccaccaatgaggcaatccctaaatttataaccgaactttggattgaccaattgactttaggcattaaacctccaagaattgatctggttaaaactttccaaaatactgcctccgacgttgttgtgatggattggggtctctcttttacgcctcacgacttgtgcgatatgagcgctaaacaggtcagaaactatgttaatgaattagtggttgtgaaggctaaaatctttggtgtcacgattcctatttctgtgtcagacatcgctttcaaagctcacgccagggttaaatttaaattaatgacgccatttccacatgttgaaaccgttaatgttcagctgctgaaagtgcccgatttcgatttcgttgcttccgtaatgggccgctctatcttcaactgggaaattttagccatcccaggtctaatgacattaatacaaaagatggccaaaaaatatgtgggtccaattttacttccgccattttctttgcaactgaacatcccacaaatactatctggttctaacttatccattggtattttagaaattaccgttaaaaatgctaaaggtttgagacgcaccacatcgatattaaaccagtcaatcgatccttacttgtcatttgaatttaacgacgtatctattgcaaaaacaagaactgtgagagacactttgaatcctgtttgggacgaaactttgtacgttttattgaactcgttcactgaccccttaacaattagtgttttcgataagcgtgataaattgaaggataaagtcctaggcagaattcaatttaacttgaattctttacatgacaaacccacccagaggaacctaaaggctcagtttttaagaaattctaaacctgttggtgatttgacttttgatttgagattcttcccaactttggaagaaaagaaactaccggatggatcagtggaggaactacccgacttgaatactggtattgctaaaattgtagtggaagaaggttctcattttgctgaagaagacaaaaaagtgactgcttacgttgaagtttacttgaatgctaagctggtgttaacaactggtaaagccagtgacacgcgtactttaaaatggaattccaactatgaagcagttatcgcagatcgtcgtaaaacaagatacaaatttgttgtgaaggataacaacggtgaagagataggatcttctatccagactttgaacgacttaatcgatagaagccaggtcgataagaatttgattcctctaaaaaaccaaaagggtgatattaaaatttctacgtactggaaacctgttaggctagagattggctccaattctgtcgcttatacgccaccaatcggtgccatcagagtctttatcgaaaaggcaaatgatctaagaaatctggaaaagattggtaccatcgatccatactgtagagtcttagttaatgggctgtctaaaggtaggacagatttcaagaataaaactttgaacccagtttggaatcaagtcatatatgttgcagtcacttcaccaaatcaaagaatcactcttcaatgtatggatgtggaaaccatcaacaaagatcgttccgttggtgaattcaatgttaacgttcaagacttattcaagaaggatgaaaatgataaatatgaagaaaccgttgatgaaaaaactaaagttggccgtctagtgatgcataagaaaagacctaaaggtactattacatactctacgtctttctatcctgcattacctgttctcacgttagaagaaatccaggatttggacaaagttaacaagaaaaagaaggtgttagaatcacgtaagtcagtcatggacgaaaaaaagatgtccaaagaggaaaaggctaagtttgagcaggaatgcaatgaagtgaaagaactagaagatatgtatagtaatagacagaaattggatttacaagagctattgcaatacaatcaaggtgtccttgctatcactgtccttgatggggaactgtctgattctgggttatacgttcagtcatttttcgacgacaatggtcacgcaagatttgtcagtccacaaattccatccagaattattaagaatggatggacaggtgacgtgataatcaaagaattggacaaatctgtcaccacgtttagagtctcaaagaacaagaatttcaataagatggaaaaatgtgtctgtgaagtggaattacctactctggaactagttaagaactgttattacaagccatcaatcttgcacctttcaggtgagggcagtgctaaactaatgcttcaaatatcttggtttcctattgacaccaaacaactgccagaaaacgatttgattacgaattctggtgatttgacgattatatccaagagtgccgaaaacttgatagcgtccgatttgaatggttactccgatccatacttgaagttctacatcaataatgaggaagatcacgtttacaagaccaaggttgtcaaaagatcgttgaatcccaagtggaacgatgaaggcactattcaaattaacaaccgtttgaatgacacattaagaatcaaagtgatggactgggatgccacatctgcagacgatactatcggtacagcagaaattccattgaagaagattaaggccgaaggtaccactgaattagatgtgccagtagaaggattagaaaatgctggtgatggtggtatgttgcatttggagtttagtttcaaaccaaggtacacgatcagcgtgagtaaaagagaaaagaaagtcggggatatagcgtccaaaggactgggtactgggttgcgagccggtacttcggtgataggtggcggtgttggagccattggtaagatcaagaagggtgtgttcggtggattgggcagtatcacaaaccacaagaaaaaccacgaaaagggtgaagacgaaaccaagttctag

SEQ ID NO: 3307 - DNA, 1815 bp, Saccharomyces pastorianus
atggtaaaacattcattcatagcgctagctgaacaagctagcaaactaagaaaatccattctacctgtaaagttaacttacaagaacatgctaagggatccatccgaaaaatataaggcattcgtcccaccaaagatgaccaaaaggatctggccagataaaacaattcaaaaggccccacgttggttatccaccgacttgagagacggtaaccaagctttgccagacccaatgtctgtggctcaaaaaaaggagtatttccataaactgatcaatattggtttcaaagaaatagaggtttccttcccatctgcatctcaaactgatttcgatttcaccaggtacgccgtggagaacgctccagacgatgttagcatccaatgtcttgttcaatctagagagcatttgatcaagagaactgtcgaggcattgtccggtgccaagagggccaccatacatacctatttggctacaagcgacatgttccgcgaaatagtgttcaacatgtccagagaggaagccatttccaaagccgtcgaggccaccaaactggtcaggaaactaactaaggatgacccttcacaacaagctacccgttggacatacgaattctcccctgaatgtttcagtgatactcctggtgaatttgccgttgagatttgtgaagctgtcaaaaaagcttgggagcctacacaggaaaatccaatcattttcaacctgcctgccaccgtggaagtagcctcaccaaacgtttatgctgaccaaatcgaatacttctctactcatatcaccgaacgtgaaaaagtttgtattgctacgcattgtcacaatgatcgtggttgtggtgtcgcagccactgagttaggtctcctcgccggtgccgatcgtgttgaaggttgtctctttggtaatggtgaacgtacaggtaacgttgacctggttaccgtggccatgaatatgtatactcatggtgttccacctaatttggatttctcagatctaaccaccatctcagaaattgtccaacgttgtaacaagatcccaatttctccaagagcaccatacggaggtgacttggttgtctccgccttctctggctcccatcaagatgcaattaagaagggatttgccattcaaagcaagaaacaagcccaaggtgaaactcaatggagaatcccatacttgccattagatccaaaggatattggccgtgattacgaagctgtcatcagagtcaactctcaatccggtaagggtggtgctgcctgggttattatgaggtccctaggattggatgttccaagatcgatgcaagttgatttctctaacactcttcaaaaaaatgcagatgccttaggaatggaattaaagtccgaaggaatcacaaaactatttaaagaaacttacaactacaataacaatgaatacatatacgtcactttgttaaactacgaagtgaagaaattaaactctgaacgtagggccttagttggtcaagtcgaagtgaatgacaaagttgttgatatcgaaggttacggtaacggtccgatctcttccctgatggatgcattatccaacttattaaatgttaaattgagtgttgaaaactactccgaacactccctaggttctggttccgccactcaagccgcatcgttcataaacctttcctatataaggaaaaatgatcatgctaccactaacatgtggggtattggtgtatctgaggacactggagatgcttctgtcagagccgtctttgctacggtgaataacatcattcattccggcgacgttttattaccagaacaatag

SEQ ID NO: 3308 - DNA, 3024 bp, Saccharomyces pastorianus
atggcgtcaaccttgcccaacgaacaatttccctcgtgtgtgcggtgcaaagattctataaccactgggcacgcgtatgagctaggttgtgatagatggcacacgcactgtttctcatgctataaatgtgagaaaccattaagttgtgaatctgattttctagtacttggaactggtgccttaatttgtttcgattgttccgattcatgcaaaaattgtggtaagaaaattgacgatctggccattatattgtcttcgtcaaatgaagcttattgttcagattgtttcaaatgttgcaagtgtggtgataatattgctgatttgcgatacgcaaagaccaagcggggcttattctgtttaaattgccacgagaagctattagccaaaaggaaatattacgaggagaaaaaaagacgacttaaaaaaaatttgcccagtcttcctactcccgtgcttgacaatgattctattgatgtaacttcaattacggcagttgcacccaaaaggtcatctagtagacctgtatcaccggttaagaaaatatccttagagtccgaatctatgaaagatatagcaatagaaaccaactcgagcgatatcattccgcatttcatcactgggtatgatgatagcgacgataattctggaagttcgaaattcggttctaatatttcaatagacattatagaaccacagcaagatagcgcggagcatgcaaaagatgagaaagtagaagaggtgaaggtgcattctagaaacgcatcgcttgacatagcattggatgctactccaagtcataaggtcttgttgggcaacacggaacctccgagccgctctaagattttattaaacaaaacaccattaaggaattcatccggacaatatgtcgcaaaatctccaagttcttatagacagggtatagttgttaatgatagctttgaggaaaataaccaggtcgaacctccaaatgacggttcccgaaccgcaagtgagctgttgagctcggtattacatagccctgtttctgttaatatgaaagattcggaggggcttgatttggatcttttcaatgctaggtcggtctcccatatggctccttcactatcaatgaatggtttgaataatatccgtggagagaaaagccaatcacaaactgttggtgtaaaaggggacagaaatagcaatgatttgatctctacccaacaacagcaagcagcgaaatcttcttcccactcgaacgataacggaaataataagaaaatatcaaggtcactgtcacgaaggtctaaagatctgatgtataatctgaagtctaaagctacaagtaaacaagataatagcattaagctttcacctgcttctaaaccttcctcgagaggatcacaggaattacttagagagtttgatacgcatcctagtttgggcactacaagtaccaacagcaattatatagacaccttggtgaagaaccaaaaaaacttaaatccaaagggatctgctgacagtagtattcccaaaaccaattctgatataggacacagcgccgatgaactgaactatcttggaataaaatcaccgtcaccaattggtcatttattacaatcacctgccacaccaagtaatgtatccatgtatcgaaccccgcctttggaaagctcactaacattcgataggatgaatggatcttcatatagtaatcataatcatagtctacctagctggcaaaatactccaaagacacagttggaaaagaaaggcaatctcgaaggacaaagtaacgaatctaaagatagatcgtctttcgataaagaaatcacagcagctgagttacatttaaagaaactaaacataaacttaaaggaactcgaatctcaaagggagcaattgatgaaagagattaatgaaatgaagtctacaaaagaaacgctacgccagcatatcgaagcctttaatatcgaaagaagtaaattatatctagattcaagcgattcttcagagaatcctcctacaataaaggaaactggtctggacggattatcacctatgaggcatgttgcaaccacaagctctgtaacacgcagttccgttaaaccgaaattctggaagttcttttcatctaccaagccccaagccgagcaatctatacaaggtacaaataccagcaatctgaattccgtcatcaaagccgctccagttttgcattctgttcctttagctactagcagctccggtcgtatagaaatctcacctcctgtattgcagaatcctaacgaatttagtgatgtaaaattggtccctattgaaaatagtggaagcatggcactaaataaggataccgaagattattcggatggaagcaatctgtacggttcaactctggttgctaggtgtaattatgaaaaaaacaaaataccgatgttactatctgtctgcatagattttatcgaggcaaacgaggaaaatatgaagtcagagggtatatatagaaaatcagggtcacagctagtcattgaagaaattgaaaggcaattctccctgtggcaggtacaacatgataacgaaattcctaatattttaacagatcaagatctgaatgctgtcactggtgtattgaaaagatatttaagaaagcttcctaatccgatcttcacgttccaagtttacgaaccactaatgaacttggttaagtccagaaagatgatggaaactttaccatttacgggaggaaagctatctctagattccagaaattcggataattatactaccagtgtaagtgccttaaaaagcatattggaaagattgccaaaggaacatcatagggtattgagggtacttagtgaacatatcgaaaaggttacgaaatacagtgattggaatcgtatgacacttaataacttagccttggtttttgcgcctggtttgattcgtgattttagtggagaaaaggatattatcgatatgaaagagagaaattatatcgtagcatttattttagtgaactatagagagcttttggcgtag

SEQ ID NO: 3309 - DNA, 657 bp, Saccharomyces pastorianus
atgaccaagttgcaaggactagaagcattaaggcacatcaaagcagttgtattcgatatggatggtacgttgtgtctgcctcaaccatggatgttccctgcgatgagaaacgccatagggttgcacgacaaatcgatcgatattcttcacttcattgaaacgctgcccacagagaaggaaaggaaagaagcgtgtaatcaaatagaagtagttgaagccaaagccatgaaccagatgcaaccacaaccctctctgattgatttgatgaagtatctgacaaccaatggtattagtaagaatatatgtactagaaacgtcggtgctccagtggagactttcgttgcaaggttcatcccacaggagttttccaagttcgaccatattataacaagagatttcaagcccacgaaacctcagcccgatccattacagcatattgcctccaagctgaacctaagtccctctgaaatgatcatggtgggcgattcgtacgatgacatgaaatctggtagatctgctggttgcctgacagtattgctcaaaaatcatgtgaatggccatctagtgctcgagaacaaagatttagtagatgtctctatagaagatctttcagaaatcataaaactgattcaaaacctgaataagagtagtctctag

SEQ ID NO: 3310 - DNA, 1884 bp, Saccharomyces pastorianus
atgagattacattatagaagaaagtttaattttttacggaggatactttttatattatgcattttttctctgtatatatcaagagattcattaagtctgaatgcaaaaaatacgttactgggctctaatttttccgaatatcatggtggtttaatagacgatattcaggttttacgatgctactgctggtacaggcaatgtggttccctatatgctccaatattacagccttccggtgccagtaaactggttaaggaaaaaaagaacgtgttgtggaatagggtttctaagaacataagtgcagagccaatatattcacttgaaaacggaattttttacaatagctacttgtatgtccatgccaaaaataaacagagcaagttgaaaaattcgataaaagaattagctatagcacgagactcagcgttaattccattagaagtattgagagacatcaacaaaatggttaaatcgagtgacagttctgtcttccataaccacgtatatcagcgcgataaacctacctcaccttggtggaaactactttttggtatagcggtggattcagacgatatatccgtgtttggtgaggagtgggtatacaaaggaagtggcatatggtgcaagtatattcttaatgatgatgacaatgatccgcctatagtaaatttagaaatgtatttaggctcatcattcattgaatcaagaccttattggaaagaagttattcatgaattccacagaaataatataccatcgttgcccatatcaattacaagaaaaattaagactccgcgtgctcgtcgtgggcctttaaacggattatcagggcctttaaaatcacctgataatgaaaacaacattttaagattacttcaagtagatgaagattacaaaataacatctccccatatccacttttcgaagggacaaaggtcattcaaaatccttcaaatgacagatttccactttaaatgcacagaaaacagtatgacaatcattaacgaaataaaaacggtaaattttattgatcacatactcgccttagagaatccggatttggttgttattacgggtgatctgctagactccacaaactccatggactaccaaacttgcattatgaggcttgtacaaccaatgatctccaataaaataccttatgcaatttccctaggtgcatctgatgaatcaaaactggctgcattgccgcaaataaaagactttatcagcaacttaccttactcgtttaatcacgttgcaacagcagaggggcatatggctatacaagtttcattcacaaaaaaattgctgaagcatgctctctttgaaagagaaacagacattaaatatgaaccaagtccatcagaagctttattttttatttttgattccttcaatcctgtgaataacttcttgttaaagtacattgatcttattgggaaaattgattatggtttgacattccagtacttccccctatcggaatatagaccgcatggactgtttcctatcatcggacaatataatgaaagatcaactttaaccgtggatacgtctaggtctaaaggcgaggtttcgatgatgatcggcggtaaacactataatagttttcttgatatcctgaatctttggaatgtgaaaggtgtcagttgtggacatgaacacaataatgattgttgcttacagtcaaaaaatgagatgtggttatgttatggtgggtccgctggtatgggcgtgtcaaggatggagggtctctatccaaatgtcaggttatttaatttggatgacattatggatgaaataacatcctggaaaaggagttctaattttgttgacgaggtttacgattatcaatatatttataagggaaaacaacaataa

SEQ ID NO: 3311 - DNA, 1995 bp, Saccharomyces pastorianus
atgatggacaaccaggctgtgaagtcgctactggaaatgggtattccccacgaggtggctgtggacgcgctccagagaaccggtggcaatttggaggctgcagtcaactttatattttctaatgagctgccggagcaggcaagcacgggtcagcccatgatctctgagaataggatggtgtccgatgttgagaccagcacctacgacgttccgaactctggcgaccaggatattgatatgcctgacgtggtcggtggtgatggtgatggtgaggcctacgacgacctgaccgacgaccatagcggctccagcagctccaatagtcgcgggccggaccactactccatatcggatacctccttgccgcccccttcgtacagtatagtgcaacacaatcaattcaagtctgccgtggacgacccgacggtcgtcttgccgctgcccttgaactcgctgatcgagagttattttggcctgtttgcgctgcttgcgtccatgtacttcccgcatgtgttcttgaagccggacttccaggatctgaactataggccggactggttcaaggggtcatccttcgcagcacctaggtacaggctcgcctacagcgagtcaaatgacggctccaccacatcagaaattgtggtggccagcgggctgagcaaggatccgcagccgcacctgctgtggcagttacagaagctcatctccgtggtcaacgcgaaggcatgcgaaagagcctttgtctcggccaagctgttcacgctgtctttggaaccacaattgaggtccaagttggctgattccgagcatctttacgaagtgctccccacgttcatcaagtcattggcagtggacttggaaatgtgtccggggatcagagaccgagaaacaagaaacctctttatatcatctgctttacacactccagataagagcgaaccgcccatggagacctttttgtctctgttccattttctgccagaggaatacgattccaacctgtacaaaatgtttaatgtcctgttgtaccctgaggaagaggaggaggaagcgggaaatgtcgtatatggcggtgagggtgggcaccaagatggggagtactccgagcccgagaacacgttgaaggaagtggcacccgtgctgacaatactgttcaatgaactagaaactaatacagagacagtgacgcttcccaacggtgtggacgttccactggaattttacccgcaactttacacgaagcgttgcaaagaccaactaataagacacatcatttataagcggaagcaagcccgcatcaagtccagatctttactccaagagatcaacaatttgaaaagttaccaaggtaaaaacatatccaccatcttagattctacgctagcatatttgcaagcggacaagaaagatgctgataacgagacctcgaagcaaatcgcgtcattgaaagatacgctaaactcttccagggccgctaaaatggaggagtacaaggacttggcatctaagctgcacggggaatggaacctctcacacccagagatacatatcatcaacaccgccaaacagttggggttgattgaaaatccatacattctctcgatggcagcactatcgccttattcctatttcactagagacagagacggcgagtggtcatggacacagagtaacacattgggcacagaattcaaaataaacaaatgctcgccttctgcggttcaagaagccatcaggcgtggaacgaaatttgcaagtgaaatgcctctgatgttcatatactgtgaggaggggaaaatccccaccaacgacgaagtcgcgaaagctttagagaacaataccgggtgtgtaaagtttgccaaagatgaccaaaattcattgaacactttgcgtgcgcagttcaacgatagcactggcaatatcagtacaaactccgaccaaaatatcgacaataataatagtaacgataacgataacaacaacgactccgattaa

SEQ ID NO: 3312 - DNA, 558 bp, Saccharomyces pastorianus
atgaacaaaatatcactcaagttagggaacaaaaacttgaaaaaaaatgtttccaagaaaaccaagaagaagaattcattacaaaataccaatttgtttaatttggataatgcagaaataacaaatcttccacgcaagtctcaaaataagatcaagatcgaaagcattgacaagtttgaccttgatggaggactgctctccaaaaagaaactagtgatcaaactagaggaaactgccaatgatcaaaacaataatttagaagaatatgtcactgaaaaagaatatagtgaggtacctattgaagagtttggagatgcattgcttcgaggcatgggatgggaaagtgattccgagaaaaacgcaaaaaagggaaaggaacaaagtaaaaaaaacaatgtttcaaacgttttgcaaacacaccctgacggattaggaattggtgcaaaattaaataaggaaataaacgtgaaggaagatttatttatgcctgtcgtgaaaatcgacaaagtgacgggcattaaggtcgatagcaataaaaaaaaagaacctgagccatga

SEQ ID NO: 3313 - DNA, 1542 bp, Saccharomyces pastorianus
atgaagtaccgttggtggctttattcaatatatgccgttggactactgctggggctaggcccatcgtatattcacccagatgagcatttccaatgcatcgaaatcctggttatgtggttcacaaatagtaagggtaccgtaccgtgggagtttgaccctagttttgctgcaagaagctacgttcctttactgctggtctacgggccattgttcaccattttaaagttttttccgtactttcagaataacccaatatcaatcctatatttaatgagattacaaaattatctaatgatcatattgtgcggtaattttatcgtacccaaactaataagaggtgacacgaaagccgttcaatctttaaaaaaattcttgtttctaacctcctacgtgacctggacgtatcaaattcatacgttctccaattctgtggaaacaattattctgacgaacactctgatagtaatggaaagcatagcaaatgcgaaaaatgttgaaaagaatagctacaagaaatcggttttactggggtttatgattagtcttggtgttttcaatagagtcacttttcccgcatttcttttactaccgtgcttgatattattttggaaattttaccgcactcattggcggtctatagcaatgctttcactttcatttttgatatcatcttgtttaattgttcttatagatacaaaaattttcagtaacggaaaaggattcatcatcacaccttggaataacctgaaatacaatatcaatatcaagaatttacaactgcacggattgcattcaagatacacccatttattagtcaatttaccacaaatgctaggccctgcattgttactagcaattttgtccggttataagctcaatcagctatctacctactcaataatctcaggaatgctatttttgtcactattccaacatcaagaattgagattcttaataccactagtcccattgttcataacaaatttgagctggacacgctcgagttcgaaattagtcgataatatgtggttcaaaggggcgtggcttctttttaacataattatgggttttatcatgggaatttcacatcaaagtgggatagtccagtttttgggagattactccagatttcatagcgaaccgatgggtgtccatatatggtggaagacatattcaccgccaacatggatgtatatggataactcgctaactgtctcttccgttgttaatttacaaaatggtgctgaatcaatagatgagataccgttcaatgtaagcaatcatcatgtaatagaccttaaaggctgtgaccttcaacttttaaaagacacaataaaacgattactgtcgaaggggatccagaatccactgactttagtaacgtctgattctatgatatcaaaattgaagaaattggaggcagatgaagggataacgttaataccaaaacgtcattacctgtctcatttagatttggatcattttgattttaatgatttgacatcttttaagtcagggcttactgcgtattctatcgaatag

SEQ ID NO: 3314 - DNA, 492 bp, Saccharomyces pastorianus
atgtcacaaaaaattggacatagtgggttggcatttgcacgcctttggcatcacgtggatgttgcccgcgataagagaacgttgggtagattggcctcagctattgcaatcaccttgatcggtaaacataagccggtttatcatccatcgcaagactgcggagactatgtagtggtaacaaactgccagaaaatgcgtgtcacaggtaagaagttcgaacagaagacgtactggtcccattcaggtagacctggccagcttaaactacaaacaatggaaaaagtcgtggcagataaagggtttggagaagtgctgaaaaaagcagttagcggtatgttgcctaaaaataaacttagaaagcaaaggttagatcgcctgaaagtatttgatggtagtgagactccttataagcagaatattaccgcctttgctcatgaacaaccatcgttgccggattctattaaagaatccatttctggtcaaccgaattag

SEQ ID NO: 3315 - DNA, 951 bp, Saccharomyces pastorianus
atggggaaaggcgtggccaagtacggtttcaagagtggggtcttccccactactagatccatcctgaagaaccccactacaaagcagacggacattattaataaagtaaaatctcccaagcccaaggggattcttggtattgggtatgcaaaaggtgtgcaacatccgaaggggtcgcaccggttgccacccaaggtcgactttatcaacgtggatagccttattgaaaagaccgtggccgagcctcagagcatcaagtcgagtaatggggcagcccaaaaaataaggctacaaaaggctgaactgagaaggaattttcttatcgatgctttccgcaaggaggaaaccaagctactgctaaaacacgaatatttgcaaaagaaaacaaaggaacttgaaaaggccaaagagctggaacttgaaaaactgaacaaggaaaaatcctccgatttgactataatgactcttgacaaaatgatgtctgaacctcttttgagaaatagatcaccagaagagacccagttgttgagtttaaaaagaaactacaacagatcactgctaaattttcaaacccaccaaaacaaattaaacaaactattaaacctgtatcatgtcgctaatgaatttattgtcactgaagctcaattgcagaagaagatcgacagagtgttcaacgatgaaacgcaggagttttccgatgcttacgatgtaaattcaaacttcacacagtttggaagtaggaaatcgctgctttcgggtaattccactttccaaaccaagatcaataacgcaattatgggttctttgactaacgaaaagttttttgatgtttctttagtggattcattcctgaacaacgacttacaaaacatttcagggcggatcgattccaaattaaacggttcattcgatgaacctgaaaatggcaacaaagatacaacctccttgtaa

SEQ ID NO: 3316 - DNA, 2364 bp, Saccharomyces pastorianus
atggtcaagagaggtgacttacaggagggcatttcttcgtcggaggatgctgccaaaaatcggcggaaaaggcggaaaccaatcaaatcatgtgcgttttgcaggaaaaggaaactacgctgtgaccagcaaaaaccaatgtgcttaacttgtaagtcgaggggtcgccctgattgcctctacacacaggaattcacacacagtatagagccggatgagctatttggcagcactcctaatatcgaattgttgcagaaagtcgacgagttggaaaagaaactaaatggtaaaggattggagagggaaaatgtagcggagaagaggaaaacagctcgaaacccatatgccaacctttaccactttcaatgtagaggttcgggtaggagaatagcgtatggtcccacatctttgagaacgtacctcttcaatgataatgtggagtttgtgaagagatataatcaattacggtccaggaaagtcaaaatcgaaatcaacaagtggaaagctgcaaacacatggacgaggatgtcagaatttggggttctagaaagtacattagtcgaaaataacaattctaatgttttaaaacagatttgtgaatctctaccatcatatgaacagactttaaatattattacagactttttctgtaacgaacgggggactaatgacataaatcaggtattggataaaaataaagttattaatgatttcaaatcttcatttcttccaggcaacaaattgcaatcgaatggtgaaagacccattgaaactttattgctctcaataaataaaaactactacaaaatcggtgtcatcttaatgattctgtgcatatgtcatttctatgagaatacgccaccggaggttgaaaaatatgttgtcatgctgacaggatttaccacggccaaggcgtctttcattgagcatgctcaatttatcttgctgagataccatcaccgtgaattgttcttagcatgcggggatgattctcatatgatcagtctggttgatttattgtgtagctcagccgttacgctgggcctacacctagatataagagaagtttacaaggatcaagaaaatattgtcggaagtttaaaaagtctagaaaacttatggatttggattcttttatctgattttaatgtctctttgaatgtcggaagatgcttggccatcagctcctcatattttcaagctgacgaatacgaaaacgatgatgattcgcatactaaaacagtcaatggtttaccggccactttatttggtgaatctgatacatgtgtgagtaagataaaaaggtttctgagactagccaggccaatggtcgatgaaatttatgacaagagctgcttcccagatttagaaaaaaactgtaaaattctgatagattttgtagagacagaatttgctccaatttcatatttcattagcagtgatttaatatctaaggttcctttgggcgaaaccaaagtgcttttgcaagttttaaatttactgctaacattttattcgttgagatttttggtttcgagggaaaggggcgttgttttgaagaataatattttgcaaactatcttagtttcgttttctgtggttatcaatacaaccagaatgtgtttcgatttggataaagagcatttccctgaactctttgcacctgattgtcctaatctatcaccgtttatggctttatcattagcgtacacgaattttctgtttccaagggcatcctctgtattttgctcctttctttatcacaacttaacacttttcgaaaagggacactatctatcctccgataatatagatcaaaatctggctgattgggatttatccactttaaatattcccttggataaagacataaatatactctctgcgtttcagacctattcagagatttttgatggatggttaaattccaacaatcaggagttaagaaacatcatgtgccgttcttgtacattcgttgccattattgcgatggaaagcatttgcaggaccgttttgaagaaagttattgaatgtagaactagggttgaaaactcaaggttgcaacaattgcacaacataaatactcccatcgatcctagtttaaatgatttgcatgtcacaactaacaacgtaccaatgggagatgcgccagctgtgctcctcccggacgcacaaaataataataacactgtcaacggcgggagcactcaacaagaattgacaaacaaggacaacaccgatgtacaaaataacgaggctgggttggctcaaattatatcagatgaattttgggcggcttacaatactggttgggaagaattaatgaaccagccggactataaatgtttattcgacacacattag

SEQ ID NO: 3317 - DNA, 1338 bp, Saccharomyces pastorianus
atggtttcgtttacaaggttaaccacactagcgctgggctttacaaaattagtgaattgcaatccagtgtctcctaaaaataatgactctttgcggttcatttataaagaaagagcaaatgtatactccgacgccaacagccaatccattcgtgaaaaaattcgtggagttaatttgggtgggtggctggtattggagccatatattacaccgtctttatttgaagctttccgcacaaacccgcataatgataacggtatccctgttgatgagtaccgcttttgtcagagtttaggttacgaaaaggcaaaagaacgtctgtataaccactggtcaacgttttacaaggaggaagattttgcaaaaattgcttctcaaggcttcaatttggttaggattcctgttggatattgggcctttacaacactaagtcatgatccatacgttaccggagaacaagaatattttttggacaaggctgtcgattgggccaggaaatatggcttaaaagtttggattgatctgcatggagctgctggctcccaaaacggatttgataactcagggttgagagattcatataagttcttagatgatgaatatttaagcgccactatgaaagctttgacctatattttaagcaaatattccactgacatatatctagacactgttattgggattgaactactgaatgaacctcttggccctgttttcgatttggaaaaattgaagaacctctttttgaaaccagcttatgactacctaagaaataaaattatgagtaagcaaatcatagttatacatgacgcttttcagccttacaattactgggatgattttttaaatagtgacaaagaagagtatggcgtcataatagatcatcatcattatcaagtattttcgcctattgaactagcaagaaacatggatgaacgtattaaaattgcctgccaatggggaattggtaccttaagcgaaagacattggtctgtagcaggcgaattctcggcagctttgacagactgtacaaagtggctgaacggcgttgggtttggtgcgagatacgatggaacttgggccaagggaaatgagaagtcctatcacatcggttcgtgtgtgaacaatgagaatgtaggtttgtggtctgaggaaagaagacaaaacactagaaaatttgtcgaggctcaattggatgcctttgaaatgaccggtggatggatcatgtggtgttacaaaacagagaacagtattgaatgggacgttgaaaagctaattcaacataaccttttcccacaaccaattagcgacagaaaacacccaaatcaatgtcgctga

SEQ ID NO: 3318 - DNA, 1122 bp, Saccharomyces pastorianus
atgaattccaatttcacagacataaataccggtgctttaacgttcataaataaagaagctgaagatgaatcgtgggagcagttgagacgagagtttaacacattattcagtaatttgagaacagagaataaggaagaaggagaacccattcacaatgaaacggaagaagccaagaaaccaataattttacatgaccacgataattcaagttccctgaatcaaagaaaaactcttaatttttcatgtaatggaaattttaagcaagtggataattctaatgatatgaggaaatgccatatcaaaaaagttcttcaagcaaaattaattttcaatactcttgaaggcaaagaagttttcttgaaaatatctcagcatacattaggtctaataagtttactgttaaggaaggcgaaattccgagtaccaattctttcatctaaattacgatctgttgcattacaattgagtatatttcggtacttattgaggtttggaaactttgcggtaactttatatagatttatcaagacatttcgcgaatttagggagatggatagatcaaattttcaaaaaagattattttttttttgtcaaaaagggttcaagtttcgtgatgttattgaatttttttatagtttgactgatgagctaatattgttcgaaaaactaaaaatcatatcctatagagaacaaacacttaaaactagtgttagcaaacctacgctctttattaaacggcaacacaacattttgtgggaagtcctaaacatactcgatgcatccaaaagcattcttcaatggcaaaaactcatgaaagatgagatttatttaagcctattcaatctaagtgacaatgaaaagaaaaaacacaagtcagagtataaactacttgtcagtaacaaagtcaacttaaatttgcaaaaaaatatcgtgacatgggatttttacaagataatattcaatctgttatccaatctaattaatatcatgggtaaaaggagagaatttaaggcaggcctaacttatgaaatactttcagtaagttccggtatcactgatttcatcaggctatggaatcaggctagactggctctaactaaggactgtacaagcgtttgttaa

SEQ ID NO: 3319 - DNA, 1236 bp, Saccharomyces pastorianus
atgtataaaccatcggctagagtgctatgttttgaaagacatgcgagatggctgtcatcaagtattagacgtgggacaagcgcgactccgccaataggatccaacgaactgaacactgattcagatcgtggtaatgctagagctgcagctgatgttgaaggtgtggcaagtcggttatctgctacccccccagcgcgcaaacccagggagaacagaagaaggatcacagagtttaaagatgcgcttaatttaggcccatcctttgcggattttgtttcagggaaggcttcagacatgatcctggatccactagaaaaggcaagacagaatacagaggaggccaaaaaattaccacgttggcttaaggttcctattcccaaaggaaccaactatcataaattaaagggtgatgtgaaagaactaaagctaagtacagtctgtgaagaggcaaggtgtcccaatattggcgaatgctggggtggtaaggataaatctaaggcgacggctaccattatgctactaggtgacacctgtactcgtggatgtagattttgttcagtaaaaaccaatagagcacctagtaaacctgacccaatggagccggagaataccgcagaagccatcaaaagatggggattgggttacgttgtattgactactgttgatagagacgacttgattgatggtggtgccaatcatttagccgaaaccgtccgtagaattaagcagaaggctccaaagaccctggtagaaactctttccggtgatttcagaggagatttgaagatggtggatattatggcacaatgcggacttgatgtctatgcacacaatttagaaacagtggaagcactaacgccacatgttagagacagaagagctacttatagacaatctttaagtgttttggaaagggcgaaaatgacagttcccacactgcttactaaaacttctataatgttgggtttaggagaaactgatgaacaaattatacaaactatgagagacctgcgtgacattggatgtgacgtagttacttttggccaatacatgagaccaacaaagagacacatgaaagtcgtggagtatgtaaagcccgaaaagtttgactactggaaagaaaaagccttagagatgggattcttgtactgcgcttctggacccttagtgaggtcttcgtataaagctggtgaagcattcattgagaatgttttaaataagagaaacaaaaactag

SEQ ID NO: 3320 - DNA, 1290 bp, Saccharomyces pastorianus
atgtcagagccagtgattgagtcccttttggacacggacatgtacaaggttacaatgcatgccgcagtcttcacgtattttccagatgttacggttacctataaatatacgaaccgatcttcccagttatctttcaataaggaggccatcaattggttgaaagaacagttttcatacttaggcagcttgagatttacaaaagacgaaatcgaatatttacaaaaggaaattccatatctaccatcggcttatatcaagtatattagcgactcgaactataagttgaatcccgaggaacacatcactttcacctcagaagaaattgaaggcaacccctcccattatagtttgaaaattctggttagtggttgttggaaagataccattctttatgagattccgttattggctttgatctctgaagcatacttcaaatttgtcgataccgattgggactacgaaaaccaattagaacaggctacaaagaaagcccaaaccttgtttgaaaacgaaattaaattcagtgaatttggtacaagacgtcgtagatcattgaagacacaagatttgattatgaaaggaatcatggatgctgtggaagcaaacccagaaaagaatgaaaaattatttttgggtagttcaaatatcctttttgccaaaaagtatggtgttaagccaatcggtactgtggctcacgaatgggttatgggggttgcctccattagtgaagattatctgcatgctaataaaaacgccatggattattggattaacacatttggtgccaaaaatgctggtttggcattaacagatacttttggcacagatgatttcttgaaggcattctatccaccatattcagatgcctacgttggtgttaggcaagattctggagacccagtcgaatatactgaaaagattgcccatcattaccacgacgtattaaaattacctagattttcaaaaattgtttgcttttccgattcattaaatatcgaaaaggcaatctcttattctcatgcagccaaaaaaaatgggatgctagctacatttggtattggtacgaatttcaccaatgattttcagagaaaatcagatgcgcaggtcaaaagtgagccattaaatatcgttatcaaactattggaagtcaacggtaatcgtgctattaaaatttctgataacttgggtaagaatatgggagatccagctactgtgagaagagtgaaacaagaactagggtacactgaacgaggttggagtggtgacaatgaagcgcacagatgggcttag

SEQ ID NO: 3321 - DNA, 711 bp, Saccharomyces pastorianus
atgttaggattgtatttatcttcgcttttctttgcttttttcatggcccaagtgtttgctaccaaatactcaatcacattcacgtcagacgattatgaagagggccagacaggacagaacaaatctaatcctttagtgtttcatttggaaaaaaactcactaccatcagcactgatagatcaaatggagtttagtccctatttggtgttagcggacatgccagataaatctcgcgttttacattcgcaggaacaagttgatacggtgattgcatcaaaatctgtaattgattttctcctggaagatccactggcaatagcagaacacaaaaagttttcacaaattgaaagtatcttgtatgaaatcatggaagacagcttaatggagaaaaacgggactgaggggatagtggagcaagagccggaactgaaaatatatgcaaacaaagaaattatagctactcccagtaacgcaaccagcaataatgaaaatccaacaactaccgtgaccttggtcagcacaatcccgaatttatatagctcgacaagtattgctatgcccacgggcggtacaagtgttggaatattgccgactacggcaccagcaaatatcacaatcgttggaggatatgaaaattcctccccatttttgatgccatcgatcagggtgttatccattatcttttgtgcgtacttgctactctactcttaa

SEQ ID NO: 3322 - DNA, 909 bp, Saccharomyces pastorianus
atgatagagttgcaggaaatacctccagaaccaatagatcctactagtcttcctcaatatgatggtacgggcgcccccaaaggggagagtgattctgacgggaggaggaagatatttggcattccgtatccaatttctaagaaatcatgccaaaacttcctttggaactgtcaaaagatttcggttctgcctatggcgttatatttcccattgcacgcaataaacactttggttacaccagccatttcgcctgactccgctcctgacgatgtgctaatgatggtgagggagattttaccgtcaataaccaccaaactgctagttagtgctctaacactccatgtttccgctggtgtcttactccgtattgtaaggaactggaacaattcgtcaaggaagacagataagcacttaaagatatctgctaagcaagatctatcccaagacaaaattggattaacgggtggagtgtatggctatttgttcggattgtacaagaatttccgaatatcaccgcaagtaattagcggttatatccttactccggtactgatatatcacctattgattatgaaatggattccatgttctctttccactgaagttaatttcgcctccataaagcagctgctatctcgcaagaatgggtggtggaaatggcttggaggctttattccattggccgttcttattgagtcaagcgtatatcatataggttcaggattctgccgctatctcggtatcaaaaaaatgagtagtagaaagaattggtccacagctatcaacctactgtcgctagctgggttcatttccgtgataagattgatgagagcagattctacaagattgggacctaaccagtttgaaagtattttcaagaagattggattgttgctgcggaaaagatag

SEQ ID NO: 3323 - DNA, 903 bp, Saccharomyces pastorianus
atgagtgaaaatattgaactgattttggtaccatgccactcgatatggaaatcttcagcacaatcaagcaatggaaccataaatttaggtcaattgcctgactactggcatttggcaccttttcaatacgaaggtaacgatcatttggcgttcatcaagcatggactaacagccatcaaactactgctgcaaagaatgaaccatgcaactgtcatattcagtggatcccaaactaaaaagcaagccggtgtcatatctgaagcacaaagctactactttctatgcgaaaagctgatcaggtatgcaatgtgcaatgataatatttcaatccctggtttcgatgacgaactgcgccttttgctacaagatatcaagaggtttttgatcggaaagcgtatagatatagacgaattgttttatggcggttcaattaccacggaagagttctcactagactcgcttgataatttaatcttttctatgtataggttcaaagaggttaccaacagatttcctcagaagatcactatcattggttttgcgttcaaaatggaaaggtttgttaactgccatgcaatggctatcgactatccacgatcaaacatacattacattggaattgaccctaaaccaacaaattacagcgaagaacagttagaaaagtattatggcgatctggtcaaactggagcattctaacgcactgaacttattcttttcagattggtacgctacaagggaaccattagtcgccaaaaagaaatcgcgtaatccgttcaacaggactgcgccatatactcattcggatctactattcaatagctatatgaggacagaagatgacaagaaatactttgagaagaatatcaaggacaaaatgccgtggtcatcattcgataaatag

SEQ ID NO: 3324 - DNA, 693 bp, Saccharomyces pastorianus
atgctacaagccactaccattttcgctattttagccttatttacaggttccgtctcggccatctactcaaacagcacggtttcagccaccactaccttggctccaagctactccttggaggcccacgaaacgactgtgtcatactctgacgagactaccaccttcttcgccacctccactgtctactccacgcactggttcaccttaaacacggccaccgtcaccaacgaggcctcttcaacctccgcctctggaccggcagcaactgcatcgactcaggaaaccatctccaccgttaccaaagcggcctcatccttctccgcttctggatcagcagcaactgcatcgacccatgaatccatctctacctcaaccattacttccactttgttgataactctgcatgacaccaccgtcttggctccatcgtcatctgcagcagccagtatcggcgacgacggctcgaacaacaagggcgccaacatcagatcattggaccaaacctcgacttcttccaatggttgcgtcccgatcaccaagttcgtcaccgtcaccaaggagcccatcacccagtacgttacagtcactcccaatatgactactcaatacgtaactgtcaccggtgctttctcggccgccagtgtgtctaccggcaacgtgcaatggttcaacaccaccaccattactaattag

SEQ ID NO: 3325 - DNA, 843 bp, Saccharomyces pastorianus
atgagagcacccccatcaccaagaaaatccagatctggttacttactttacttctacttccgactccgtcaatgttttagctgccagagattgaagagaaggtggcacattcacaaattgcacgtccgtcagtacagtactcgctggaacttgagtcctctttcgggaatacagattgaagacatgataaacgagccttctggcttgtgtcccggaagcgccaaaaagaaaccactgctgatagcaaggttcccaaagggctgtcaggaatcaccaagggtatacgtattacaaagaaataacttgtctcgtttaaagttaagcaaaaggaaatatgccttaaggttttattacaatgatttttttggtaagggctttaacaaaaaccctgagtttataaatgagagccatcaacactgtgcagaaaccgttagaaagatcaagaaagccacagcaaagcatgcggatgtaaaaataatttatcatgacaaaaacacgataaggagctacagattgagcagtaagaatgacaagaaactaattgtccacgatgtccttgaagaagaaaaggaagaagaagactcttcctcattgtatatcagattcggtgatgaccattcactaagagtcaaagactaccactccttacacaagcactctcagaagattccatcgcagcgccgtaacaacgctgtaggaggaaagcccaagttgctggaaaaactttttgaagaagaaccattaaaaaataataacaacacggtgaaggaaagtggtgtggttatgaatcaaggatttcgaaattctccccttatctccttctcacacattattcaacaataa

SEQ ID NO: 3326 - DNA, 1278 bp, Saccharomyces pastorianus
atgccaagaaagtttttgggagaaagaattgacagaaatgtggatgcggttagaccatcatcactaacgctatcaccagacgacttgaagcatataccagtaataccaagcgattttactgatgatgatagagtcttgagtaacggcagttttgaaaagaggttatctagaaagtttggcggtacgatggtgctgaagaaaagactagagtctgttccagaattgttcttacacgacttcaagaaaaaaccacgttccaaacttgacgtaattaaagaaagagatcctaaatactcacctgctcctaaagcatcagctatgcctaagattgatagggtacggttacaagagagaaaaagggtgggatcgtcaccgattcaaagaaagggactgcgtaggtcagcaatgccacaaattacggtgacgcgacccatagagcatgaagaacgcccggctgatattattaacagggtgtttgtttcgcaaccagccccaattgtaatgcctgtacagactatcactgcggtagatccggtgtccgtaatgcaaaagcaatcacaacatggacatgggaggaataagtatggtaaaagtaacagcgagatattatttgaagaaattctgtcagcttatgaaaatacccctacaaaaagttctaccgcactaaactcagaaatcgatagaattattgatatatgctcttccaaacacatggctaaaaatacagaagcgttccaaacaacgcagattgcgtgtccgtatgatacagagactctcttttcatcagcaacaccgaaactaaagcctgtgcatttcaatgcattgaacgacatgatttctagcccggaatattccacatccggcggcagcacctattctgaacattggagttcaggcgaagagctgcctgaagtcgaaagcatagcatggaacacccgcaaaagcgcaatgagatcatccatagcgtcagagagtaccaacgagcaaggctattatactgccgctgaaacgttgccctcaacgatatcggtggaagacctggatatacacaatgcactgccagtacctgcacaaaaaccaccgcatacggctcttctagaccgacttccaatgagaagattaaaaagagtgactctcgattctcccaagataatgcatatgttggattctgatgatgatagcggtgagcatgaagaggatatgattttacgcgctttacaagataaaattgacaacattgaaatcgcaagttgcagcagtagtatatacagcagctaa

SEQ ID NO: 3327 - DNA, 2529 bp, Saccharomyces pastorianus
atgtcggagaaggaggaagcgatttttcgctctgctgaaatggctttggtccagttctatatccctcaagaaatctcaagggactcggcctacactttagggcaagtgggtctggtgcaattccgtgatttgaattctaaagtgcgtgcatttcaaagaactttcgtcaacgaaattagaagacttgacaatgttgaaagacagtatcgttacttttattctcttttgagtaaacacaacataaagctttatgaaggagattctgacaagtatttggatggctctggtgaattgtacgctccaccaagcggttctgtgatagacgattatgttcaaaatgcctcttatttggaagaaagattgatacaaatggaggacgcaactgatcaaatcgaactgcaaaaaaatgatttggaacaataccgctttattttgcaatcaggggatgagttcttcttgaagggtgacaatatcgacagcacttcctacatggatgaagacatgatcgatgccaatggagaaaacattgcagctgccattggtgcatctgtcaattacgttactggtgtgatctcaagagagaaagttgcaactttagaacaaattctttggagagttctaagaggtaaccttttctttaaaactgttgaaatcacggaacctgtgtacgacgtcaagaccaaagaatacaaacaaaagaatgcctttattatattctctcacggtgacctaatcatcaaaagaattagaaaaattgcagaatctctagatgccaatttgtacgaagttgattcttccaatgaaggcagagctcaacaattgatgaaagtcaacaagagcttgagtgatttgtacactgttttgaaaaccacttccactactttagaaagcgaattgtatgctattgcgaaggaattggactcttggtttcaggacattactcgtgagaagtccgtttttgaaattttgaacaaatctaactttgatacgaacagaaagattttaattgctgaaggttggattccaaaggatgaattggccactttacaagcccgtcttggcgaaatgatttcaagattgggtattgatgtgccatccatcatccaagtattggataccaaccatacacaacctactttccatagaaccaacaagtttacttctggtttccaaaatatctgtgactgttatggtattgcgcaatacagagaaattaatgctggtttacccacaatcgtcactttcccattcatgtttgctatcatgtttggtgatattggtcacgggttcttgatgtttttagccgcattagctcttgttttgaatgaaagtaaaattaacaaaatgaaaagaggcgaaatctttgacatggcttattcaggtagatacatcattttgttgatgggtgccttttccatgtacaccggtttcctctacaacgatgtcttttccaagacattaacagttttcaagtcaggttggaaatggcctgatcattggaagaaaggtgagagcattaccgctacttctgtcgggacatatcctattgggttagattgggcttggcatggaactgagaacgctttgttgttttcaaattcatacaagatgaaattatctattttgatgggtttcattcatatgacatattcctatttcttttcattggcaaaccatctctactttaattccatgattgacattattggtaactttattcctggtttattatttatgcaaggtatttttggttatctttccgtttgtatcgtatacaaatgggccgttgattggatcaaagatgggaaggccgcacctgggttattgaatatgttgatcaatatgttcttgtcaccaggaaccattgatgatgaactataccctcatcaagcaaaggttcaagtgtttttgttgctaatggccttgatttgtattccttggttattattggtgaaacctttacatttcaaattctcgcaaaaaaagaaatcgcatgagccattagcatcaaccgatgcaggtgctagttcagaagacttagaagcacaagatttaattaccacaatggacgctgatgatgctgaagaagaagaagttggttctggttctcatggtgaggaattcggcgatattatgatccatcaagttatccatactattgaattctgtttgaactgtgtttcacacacagcatcctatttacgtctatgggctttgtcattagcacatgcgcaattgtcaagtgttttatggacaatgacaattcaaattgcttttggatttagaggatttttgggggtgtttatgacagtcgcacttttcgccatgtggtttgcactaacttgcgcggttctagttttaatggaaggtacatctgccatgttacattccttacgtttgcactgggttgaatctatgtccaaatttttcgtcggtgaaggtttaccatatgaaccatttacattcgagtacaaggatatggaggtagctgttgctagtgccagttctgctgctgtcgcttccagctaa

SEQ ID NO: 3328 - DNA, 483 bp, Saccharomyces pastorianus
atgaagtatactattgacgaactattccaattgaagccaagtgttgctttagaggttaatttcgatgcggtggaattcagagccatcattgaaaaagttaagcaattgcaacaattaaaagaggaagagtttggcactcaccatgctggccacttcagccgtagaagatcttcccaccatcatggtagaccaaaggttaagcacaacaagcctaaggtgaccaccgattctgatggctggtgcacatttgaagctaagaagaaaggcagtggagacgaagatgaggaagaaggtgagactactccaaccgccaacgtaccagctgtcactattgctcaagagactttgaaagtcaagccaaacaataagaacatctcttccaatagacctgctgatgccagagatattgttgcggataaaccaattcttggtttcaatgcattcgctgctttggaaagtgaagatgaagacgatgaagcatga

SEQ ID NO: 3329 - DNA, 825 bp, Saccharomyces pastorianus
atgtctagccacaagcaaaccagagtgatactacttaagaacaaaaccgttcccattgacaaatacgaatctgagtgtaagtgtaaggcattcgagccagtatttataccactaattaaacatacccatgttatagaagattttaaaggtgttctagatagcattccaaattatttggaaaccatcaactacattatcatcacatctcaaaggaccgtagaatccctcaatgaatcgatcatccctactttaacaagccaacaaaagtcgactttatttagtaaaacggtttatactgtgggcccggctactgctgatttcattaaaagatcaggtttcttcgatattagaggtggcaaagatgctggtaacggttctgttctcgcagatatgatcataaatgacctaactacagataccgtggctcagccacctaatgaactattatttctcgtgggcgaaattaggagagatatcatcccaaagaagctttttggcaaaggtataaaagtaagagaagtagttacctacaaaactgaagatttagatgataatttcgttaggtttaaaaacgttgtaaaatcggatgatgaggacgagaggtctttgaactgggtggttgtcttcagtcctcagggtactaaagaaataactcagtatttaagtgttaagggccatttgtcaaatgctagaatacgaattgcatccatcggacccactaccaaaaagtatttggatgataacaatatagcttccgacgtagttagcccaaaaccggatcctaaatcattattagatgccatagaatcatacaaacgccaataa

SEQ ID NO: 3330 - DNA, 3366 bp, Saccharomyces pastorianus
atgacgacccatcaggaggaagatcaggtacataactccgaagatgacgaataccaatcctcggtagagagtccgtccgacgcatctgactcggattcaggctataacaatgatggcggtaatatcgaccaaagtgaagacttatccggtaaagaagcatatacagttgcagatagacctccggaatattgggctcagaggaagaaaaagttcgtgttagacgtagacccaaaatacgccaaacaaagagataagtccgatacgtacaaacggtttaaatatttattgggtgtcaccgaccttttccgtcattttattggtatgaaggcaaagcatgacaaaaacattcaaaaacttttgaaacacctcgattctgattcaaataagctctccaaatcacaaaacgacatcaattcttcttcgcgtcatcatagaaaaacagaaaaggaggaagatgctgaattgatggctgacgaagaagaagagattgtagatgaataccaagaagacatattcgtctctgaatctccatcttttgtcaaatcggggaaattgagagactatcaagtgcaagggttgaactggctaatttcactgcatgaaaacaaactatccggtatcttagcagatgaaatggggttaggtaaaactttacagacaatttcgttcctgggctatctaagatacgtaaaacaaattgagggcccttttttgattatagtgccgaaatcgacgttagataattggagacgagaatttctcaaatggactccaaacgttaatgttcttgtattacacggggataaagatacaagagctagtatagtgcgtaacatcatattacaagctaggttcgatgtattgattacatcttacgaaatggtcattagagaaaaaaatgccttgaaaagattggcttggcaatatattgttatcgatgaagctcacagaattaaaaacgagcaaagtgctctatctcaaataattagattgttttactccaaaaatagactattaatcacgggtacacctttacagaacaaccttcatgaattatgggctctactgaacttcctattacctgatatatttggagattccgcaatattcgacgattggtttgaacaaaacaattcagagcaagatcaagaaattgtagtccagcaactgcactctgtgttaaaccctttcctactaagaagagtgaaggcagatgttgaaaaatcgctattacctaaaatcgaaacgaacgtttatgttggaatgacggatatgcaaatccaatggtacaaatcgctgttggaaaaggacatcgacgccgttaatggtgctgttgggaaaagagaggggaaaacaagattactgaatattgtcatgcaactgaggaagtgctgtaatcatccgtatctttttgaaggtgcagaacctggtccaccatatactacagatgaacatttaatttttaatgccggcaaaatgatcatattggataaactacttaaacggttaaaggaaaagggttctcgtgtgttgatttttagtcaaatgtcaaggctgttggatattttggaagattattgttatttcagagattttgaatattgtagaattgatggttctactagccacgaagaacgtatagaggctattgatgattttaatgaaccagattctgaaaagttcgtctttttgttaactacacgtgctggtggtctaggtatcaaccttgtgacagctgacaccgttgtactttttgactctgattggaaccctcaagctgacttacaagcaatggatagagcacatagaatcggccaaaagaaacaagttcacgtttacagatttgtcacagaaaatgctatcgaggaaaaagttattgaacgtgctgcacagaaattaagattagaccaattggttattcaacagggtaccggcaagaaaaccacatctctgggtaattcaaaagacgatcttttagatatgattcagtttggcgctaaaaacatgtttgagaaggaagcaagcaaaattactgttgatgcagatattgatgatatcttgaaaaagggagaacaaaagacccaaaagttaaatgccaaataccaaagtttagggcttgatgacctacaaaaattcaatgggatagaaaaccaatccgcttatgaatggaacggtaaaagtttccaaaaaaaatcggaggacaaagttgcagaatggattaatccgtctcgaagggaaagaagaagagaacagacgacgtattcggtcgacgactactataaggagattattggtggcggatctaaatcagcaactaagcaaactccacaacctaaaatgccacgtgccccgaaggttatccatggtcaggattttcagtttttccccaaagaattgaacgctctacaagaaaaggaacaacttgcatttaagaggaaggttaattacaaggtatcctcctatgatattacaggaaatacccctaatgaaggcagtgatgctgaagaagaagatgacgaatatgtagatacaggggatccagaaggtcgtgcagcccatgaagatcttaaaaaaaaaattcaagaggagcaagaaaagatcgattcagcacctgattttacagaagaagatgaattagaaaagcaaaggctaatatcacaagcatttagtaattggaataaaagagatttcatgtcgttcatcaatgcctgttgcaaatatggtagagatgatttggagaatatcaagatatctatagattctaaggcaccagaggaggttgaagattatgcgaaagtattctgggaaaggctgaaggaaattaatggttgggaaaaatatttacataacgtcgaacttggcgaaaaaaagaatgaaaagctaagattccaagaaaccttattgaggcagaaaattgaacagtgcaaacatccgttgcatgagctagtaatacaatatcccccaaacaatgcaaggagaacttataatacattggaggacaaatttttgttattggcggtaaacaaatatgggctgcgtgctgataaactatacgacaaaataaagcaagaaattatgatgagtgacctatttacttttgactggtttatcagaacgagaacagtgcatgaactatcaaagagagtgcatacgcttctaactttaattgtaagagggtacgaacaaccagacgcaaacaagaagaaaagaagtagaaccaccgcaactagagaagatactcctctatctcaaaatgaaagtaccagagcctctacggtaccaaatattccattagcgattgtaccgaatcaaaaggaaataagcaatcacgttgacaaaaagcccaaagtagagcaagaagtatga

SEQ ID NO: 3331 - DNA, 1317 bp, Saccharomyces pastorianus
atgaagcttggaagcaaagaaataaggatcatatccttgctgttgcttgataccgtgtttttcgcaatagaaataaccaccgggtacatgtcccactctctagcgttaattgcggattcgttccacatgctaaatgacataatttctcttgtggtggcactttgggccgtaaacgtcgccaagaacaaaaatccggattccacgtatacatatggctggaaaagagctgagattttgggtgcgttggttaacgccgtctttttgattgctctgtgcgtctcgatcatgattgaggcactacaaaggcttatttcccctcccgcgattgacagtccaaagttggttttatatgtgggcatcgcagggttagtatcgaacaccgtagggcttttcttgttccacgacggcgatgaagaacatgggcacggtcattcgcacagtggcatctttactgatgacgaggctcatatgccctcgtcgcactcgcactcacactcgcatgcacacggcgacgaaatagaggacacctcccgtatggatagtaccgacaacatcagcgagattctacccaatgctgtagtgaacagcgtcatgaacgaaactacaaggctactggaacaagagggtgcttccaagacaccatcctacacaacgtctagtcacacggttgccagcgccggcaatgacgcagaacacaaggggagcaagaggtctatgaatatgcacggtgtgtttctgcatgtcctgggcgacgcccttggtaatataggggttatgatctccgcacttttcatttggaaaaccgactattcttggaagtattacacagacccacttgtctcattgttaatcacgggcataatattttcatctgcgcttcccttatcatttagagcttctaaaattctgctgcaagccatgccttctgctctgtccgcggagcagatggaaaaggatcttctgcaaataccaggaatcattgctatccatgacttccacgtttggaacttgacagagtccatttacatcgcatctctgcatgcccaactagatatcacaccggaccagtttactggcttggccaagatagttagaacaaagcttcatcactatggcgtgcactcggctaccttacagccggaatttatacgcaaagaactcacctcggctgcaagaaccacgcatacagggtctgctggtggctcccaagaggatacacattcttcaagacaaatgacatacgatacaacactatccaactgtcttatcgacgatgctgccaattgtaacacggcggattgcttacacggcccttaa

SEQ ID NO: 3332 - DNA, 1812 bp, Saccharomyces pastorianus
atggatttgctcatcaataggatggagaatcctgggtcaagaaactgtacccttttgcctccatcgttctcgaggagcctttgtgggcgaaggagaaattccggtggtgacaaggtgatgattaaggagtctacgccacaggcacagccgcagccggagcagtccagcacaagtatggcacacttttcgtcatcgtctccaaggctgcccgtcatagcagtaaatgataatccggtgttgttgaggcccagtacggaggtcaatcttgggttgctgctacagaaagagaaggaggacgaggaggaagagaaggggacgaagcccgctgtgcatgacaagaaacacctacatgtgacgaggaacagactgcttaggacacggcaccggttgatggagatgtctagtttgcctgttttaggatccactaagacggggaagttcagcgagtgtttgttcgaagatggcgtcgataatagagtgtaccgccacagtcggtcgtatagtggagagtcgagtctcgatgacccattcagaatatctcccaaaaacgactgcaagtccagtagggcccgggcgtcttgtcttaacaagggacaccgggggtcgacgcccgctttccaaagttgccatgcggggctggctttcaaccaaatacagggctcctcctcttcacagcgaagatcatcggctagttcctttgattacgaaaggaaaagactggtgaaccagtttttacagtcctctacaggggtgtcagacccgttcgatgcattgaaagagtctgcggtgcttgagcccgcactatctgctggtaacattaaaccggggaacatgcattcgcaatcagaagtttccgttaactcttcgcccaacacatctttgttttatcatgatttagatggttcggccaataacgactcttcatcttttttgtattcacggtctaacgtgctaactttttcgtcatcatctgccttttcctccatttcatctgcatcattggattcagtagatgcagacaggaggggttccaatggtatgtgtccctcttctggctatttgaataataggagaaaggcaaggaactcatcgagctcctcgactacctccggttcggatgtcttggcattcaagtcctcgttgaatcggcaaaagtccgccgagtctcttacagggaccaaaaatacagcgaaactgaacagcatgagttactctgcagtgactttggactctagcccaaactcaatttctaaaagcaattcgaacctggacgacaacatcgatgagctgaattattatcaaaaccacatttccacgctcctagtaaaaattgagaacgaaatgaggaggagtctgaatgatacaataatcaagaacgaaaacaatgtccaaaagacaatacagaaatacgatctgttatcgggagaattgaccactctactggacgaaatgaccactttacgaaccacagtggttaacgaatttttggtcaagttgaaatcagactttaactacgatgatgacagggcattcattaatgaattgactacttcggtggaagagagcgtgggccagctacaagagctggaaaaaagaatggaagtttgccaagggagattaagcaagcaaaaatcttccttgagagaaatggatagtttattagagttgaagaccatgttgaacaaatcaaaaaaggatacgaaatcgatatatctatacagatacttcatcgtagacattattgcattggtcttgatgggtggcttcatcatttatctcaaaaatatgatagttcactattttgctcactga

SEQ ID NO: 3333 - DNA, 1107 bp, Saccharomyces pastorianus
atgctagataacatgcaatttcactcacctgcgccggaacatccccgattgaatgaaagcataaacggaaatcccgcttcgcatcgtttgggttacaaactccaccagaaggtacagagactgaatatggtcaaggagaacattgagggggaattgaactcgatgggctctgcacatggccaaatatccgtcggtagcagtatccatgctatcgattcaagtgtcgatgactacctgataccttctccgccattgtcgcccaaactgagacattctcctatagtaagccagccgcaagtgattggtatgaaagccgactgtcgggacttgatcatgttgacccctgtttgggaaacggggttggattcgcagaggtacaattacaacactaggaatttcttatcgcagtatagcttctttcgggatatgaagattacgaaaaggttgcctacaaaggattttaaaaggtcgaaaatggttagaccggtaaacaatccagaaatactacccaagagaagaaggtacgataggaaaattaagagaaggtcaagagagatagatgacgatgacggggtcggattggaaaactatgacgaagaaagtagccctattcgtgaggttcctgtcagatcagtgacccctatacgtcaaatcaaaagatcacttcatactatttcttccccattggcatctcaaggcgtgattaacagtgttcccaagtatgttccgagtatgtcatgggaaaggttacctgattactctcctaatttatgtactttagccaatgacaatagcaaagctctaagagtggaatggaaaggttctccaatggatctgagtcaggatccgctcaagcaacatttgcatccggcagagttggtgctggcacagattttaagactaccatgtgatctttatttggactccaaaagaagatttttcttagaaaaagttcaccggttcaaaagggggttgccatttaggagaacagacgcgcagaaagcttgtagaatagacgttaataaagcatcgaggctatatgctgcttttgaaaaggtgggctggttacaggatacgcagtttgaaaaatatctccaagaaaaatga

SEQ ID NO: 3334 - DNA, 471 bp, Saccharomyces pastorianus
atggcagggcaagagggcgcttgcgtaacgaaacgtctacagaatgagttgctacaactactatgttctactacacgaagtatcagcgcgttccctgaagatgacaatgatttgacatactggaccggatatgtaacgggcccccaaggaacaccatacagcgatctcaaatttaaaatttcattaaattttcctgaaagctaccctttccacccaccaaaagtcaagttcgtaagtccaatgtggcatccaaacgttgatatgagtggcaatatctgtctagatattttgaaggagaaatggtccgcagtttataacgtggaaacaattctactatcattacaatcattgttgggagaaccaaataatagatctccattaaatgcggtggccgcagagctttgggatagagatatggaggaatacaaaaaaaaggttctggcctgctatgaagagatcgaggattgctag

SEQ ID NO: 3335 - DNA, 1989 bp, Saccharomyces pastorianus
atgaaatccacttttaaaaggttttcatctactcatataggtaaattgatcaaagagtctttaaatacccctgaaatactaccacagctggagcggaagtcatcattgcataaacatttcctgaacgccaagagaacaaactcaattactgataagtggttgaaggatgcattgacaagaaaagataaactacatgaagatgaacttcgaaatgtaaatctacgattgaccgtagtactgactactttacagaagctccgaacaacttataagccggcctcatatttcgcattgttgaatcgcattggtacaggccatataaaatggctaaataaaagcggccaacaaatcgatacaccgatatatggtcgcttgcccttagagttttatcacgaattatctaacatgctctatagtatatcactccgacgtgcaaatgacaaaattgcattagctaaattttcactgcagttactcgatcgttattattaccttaaaaccaattctttcactggcaaaaagaaattccaatcgaaccccaagtttttgagaaactgtggcctattagccgttaaatcagagtcgatctactatttaaaggcgatgcaagagctatttagggaaaacgcggaaggtccgttgttgacaagcttaactcagttggcattttatgtggagacgcaccagtggacaaatgtattggactgtgtgtattcgtgtattgtggattttgattcagtaatctcgaaaactcatgatagggatattcaaacgttagaattattcagttcatatttggttaaaagtttagaactattaataacacaagatatggagaacgaagtttgccagattttgacaagcttatcttctaggtggaactttcatttcgacgagcacgattcttcgaatttgttacaactatgtgaaaaccattcctgcttcaaaatcattgaaactttgaacaaaatatcatttgtctctgttgaaactaggcatcttgaaatgataaactcatcatccgagatgagtttgaaacaatgtgtgaatttcctggccaaaaggaactttcagcctttcgagcaaaagtcatttcttcattcattatcgttcaaattaaaggagttacctttgagcgtaaaagtatgggaacagtacatcgatgaatttgatgcgtatatgcaggcagaatccatttctcttccgttacgagcattttttgttgatattttactcaaacgtctatctacccatagaggttttaatttcacgttatcaattgtagagcatatgatatatgaaagaaatttttggcagccattcttaatgacagagaatataattgataacaaagaaaattccaacttccattatctctttcacgctatgtctcgagccccttccaccaagatttctctgctgacactgttcaaccgattgaaggaaactggctatcaatttagcatacatgattttctttcgatgttaaagccttgcaaacgctattctgattgcgattatttctatttcgttttctataatttgttgtctatacacagtcacaaattcctttacttcgacaagttaagtggtaagtatttatggagactgccaaaccagattgtagatgcgatttctggatggctttctaatttggaaattggtctacaggaaaatactgatagggttgtgcagataacagacgatgttaatgaatggtatgtcgcagagagattaaatcatttagaagaaactactattcgaccaatagacaaaattaaattgcgtaatgtttttggggagcaagagacatttttcgatatggattctgaaacttttcaagattgtgaagagaaaagaggtgaagaggtaagaccgcaacattcatttagcgcaaaggatggacagtatagtctagagttagatctctcatattcagaaagaatagaagacttgctttgttatataagctctcaaaaacagcaatga

SEQ ID NO: 3336 - DNA, 1014 bp, Saccharomyces pastorianus
atgtccaaaccaaatacacctttacacgctcaaccgaatgaacagctagacttgagtaatctgaacgatctggacgaaaaagacattgacgatttaaacttggatccagactctgacgtagagataatcacagactccgacgctgtcgcgagttcgaatataaatgatacgatatggaaatgtaatcccaataagaaaaggtatcatacgccagaattcaatgacgtttacagtgaaactaacaacgccataaacgacataaccatgcttgatgacgttgatgatttccagcctagaattaacgtatcctctccgttttcatccactacaaaacttaatgacttattgtcaagtggccacaatgaagttacacatccaagaagattatcgatgtcccaacaatccaagtttatatcctatgttgatgaccagcttttacaaatccagagaaaatttgtccaatccaggggtttgaatgtgaaaaatggttatgctagtcttactcccttattgaaagacttgaaaactttgattgactttatttggtattccatcgcacatgttcccaattcggactatttacttcagtcagaacaaaagagacactgcccttgtgcccgaacgtcaagcaccacatctgaacattccagttatttcggacagggatcttatttaatcaaaattgcagacgatctcattgattatgcggaaaagttcacgtttaaagatatggaagattcagagatcaacgatacattatccaagctattcaaactatttttcatccttgataagatattcgtaatcttgatcgataacaacgactgcaaagaaacggcagcggtggcttcaaaaaagaaattgaacggaactgaaatcgttagattaaaaggtatcgcagaacgaacaagagttcgcttacccatatttttagaatctcaacttattcacggctaccattacgaattaagtagaatttatgaggggtttttagacaatgccaactcgatctaa

SEQ ID NO: 3337 - DNA, 2079 bp, Saccharomyces pastorianus
atgctttcccgtaatgctttaaggacttttggccattcaagggtgattatttcacaaaggtgtatctccttctcagctttgatattacagcagaataatgttcagttagataaaagcaaagatgaactcttagaaagcaacgaaaaatacgtttcaccatttgagagggtccaaaatgtcgcagctgagttgaaaagtgagttaaaagctccaggttcggatattaatgaagtttttcatgacttcaaagataaaattgaacttttaaaacagaaattacggaatccctcaaccatggaaagatcgcatttattggctaacttctcttcggaacttttacaggaattaagtcataaaaataaagacatggccacagatccctatcaagttttgaatacattgtgccaatacaaattagcacgttcacaacacttcaccattgttttaaggtaccttttatttaatgcatctccacaggacgtcattgctctttgggtaaaatatttggaaactatatcagagaactctgtgaatctactccaaaatagctcctctaatgcacatacacaaaacatagccattaccaccattgcttatttatccctaacaggaaataccgtggatattaagattttgtacaagattttacaaatcgatgacaaaacgggccaaactttgcccttcaacattgtaaagagaattttaaacacagaatgcagttcccttgaagggagggacctggccatgaaaaacctgaatgacctatattatcagtatacagtacaggatacagaccactttttaaaccaaatcgaaaacgcccctagatggatggatctaagagacctatatactcaatatgataaacttgaaggtaaaaaagatattagggtcatatcccagtttatggataagtttattgatttgcaaaagcctgatcaggtggtgagtatctacaaccaatatagtaaaatcttcccaaataattctttcctgagcgatcgtttattaatatctgtagggcgcctaagagccaactcgactaaagagaaattggacaggattttagccgtttggaatagtatcatcaaaccaggagacgacattaagaatacatcttatgcgtcgctcgttaatgctttatgtgactcgggtaattttaatcacttgaaggcattttgggaagaagaacttcctgaaaagtttaagaaagatccgatagtgaaggaagcgttccttttagccctatgccaaacctcgctattaacatatgaacaagtcaaggcagaactaggagagacggttaaaactacaaagctgtttaataaagttctcttgcttatgttggacgatgaaaaagtaagtcaggagcaattcaacacattttactacaaaaattatccaactaatggcgcattgtcccctactttggaaactttgagcattaagatgtatgccaactataaatatgaagcagaggatgtgcgtccagagtttaaactcttacaaagtatttccatgaaaccaacagattatgaaaaaatagaaaggattacaaaggttttcatttctgcgtgccctactattgagccaattcgtcaattttacaaacaattgggggctcgcttgaacgctagaaactatgcagattttatttctgcagagttcgataaggctggtggttcggttaccgaggcagaaggcatatacaacgacttcacagcatatcgaaagaccagaaaaagaaacgtggataatacgccactgaatgccttgttgttaggattctgtgataaactgttcaaaaccaaacagagtaagtacatttcttctattgaaaagtactacgctctggctaaggattcgagtatcagggtgtcgaacttggctgtttcgaaaattctattcaatttggcaacctttgcacgtgattctgagcagctggcggatagcgacatacgctttgttaaccaatttttgcaagatttaagcagtaatgaaggattccgtccgaaccctaaagatgtgcaaattttgaaggaatgcgatggaattatagtccctgaaaaacttgcttga

SEQ ID NO: 3338 - DNA, 498 bp, Saccharomyces pastorianus
atgcaaactatgccaagagaatttaaatcgtttgggtcaacggaacagtctttattatcgaggggtcatggagaacctagcttcagcgaaatatacgctgagccagagaacttcttggagattgaggtgcataaccctaagactcacataccaaatggggtggattcgaagggaatgtttacagattatgaaatattatgccgtacaaacttgccaagttttcataagagggtgtccaaagtgaggagacgatactctgactttgaatttttccgcaaatgcttgatcaaggaaatttcgatgcttaatcatccaaaggtgatggtgccccatctgcctggaaagattctcttgagtaatagatttagtaacgaagtcattgaagagagaagacaaggtttgaacacttggatgcaatcggtagcggggcatcccctattgcagtctggctctaaggccctagtgaggtttatcgaagctgaaaaatttgtcggttaa

SEQ ID NO: 3339 - DNA, 390 bp, Saccharomyces pastorianus
atgctggcgctagcagctggagtggcttctttgctttcagtatcgacgttgtctagaccagccttggctaattccttttcgaacgcgtctacgctactgtccttagtcttcttctttttcttcttcaaggacaactcacccaaggcttcggctatgtcgtcggtaggctccgtttcaggctcggcgtcagcggaagcactcttggacttcttctttttcttctttaatccagcaaatagatcatcacctgaaccattttctttaccgtttactgcagcatcaaaatcatctggaattaccttcttggtcttcttcttcttctttaaagtagggtcaaatcctaattcagcagctaaatcagaggacatcgtgtgcgtgctttctatgtga

SEQ ID NO: 3340 - DNA, 2073 bp, Saccharomyces pastorianus
atgatgaatgagagaagcaccataatcaatgcgctgaaaaattcagcaacctcgcgtttcatcaagaggttgactccggacacttccctgtcctctgttgcggaggcacttaatgccgttcagcaacacagtgcaacagatccggtgagattgaagctcttccatacgcctcggatggtctcgcagggggcacattttgcgttcagtttgccaacgaaaaagccccattacaagccgttgctgctttcgcacaaggctctagatgagttcagtttgaaacaggaccgtgatttggagaaaattttggctggcgaaaaagtgtacttctccgatgatatctttccctacagtatggtgtactctggattccaattcggttcgtttgctgcacaactgggggacggccgtgtggtgaacctgtttgacctgaaagacaaaagcgatggtcaatggcaaacgttccagttgaaaggggctggcctgacgccattttcccggtttgcggacggtaaggctgtgttgaggtcgagtatacgtgagttcataatgagcgaggcgttgcacagcattggaattccctccacaagagccatgcagctgaccttgctaccgggcaccaaagcgcaaagacgcacgcaagagccgtgcgccgtggtgtgtcggtttgcacccagttggattcggctgggcaatttcaacttgttcagatggagacacgatctggaagggttgatcaagttgtcggactattgcatcgacgaggtgtttgacggaggcaagcagttcgaggggaaacccgacttgaatgtattcaaaagcgaccttttccctgataaggaacagaaaatcgaccagcaagtggaacaggatgagaacgacgaacagggagcctccctggatggcgaaatttctgcgttgagtaagtacgacaagtttttcagacatgtagtcactttaaatgcaaacacagtggcgcattggcaagcatacgggttcgccaacggtgtcttgaacacggacaacacttcaatcatggggctgaccatggactacggcccgtttgcctttctagacaagttcgacccgagcttcacgcccaaccacgacgacacgtccaacagatactcgtttgccaaccagcccagtatcatatggtggaacctgcaacagttcgccaaggatctggcatgcctcatggggcccgagggacgcgaccttgagtccttgctcaagggcgagttgaacgaggtggacgacgccctggagaagaccatgatcgagagagtgcaaaagctggtggaattgaacgccaatgaatacaagtacgtgttcaccacgaggtacgcgcagctgatgtctcaaagactcggcgtcgatctggacctggcaacgtgcatgagctcccccaagcgtgaagacatcgagcgtgccgcggagaaagcccgcgagttctgtaccgccatcgtcgagccattgctggacgtcttgaagatcacgaacattgactacaacaacttcttcatccatttgcagaactacagggggcccttcttcgtcaaggataagaccgaggcaacaacactcttcgcagcgttcgaccaagaatacctacaaatattcttcaacgcaagccaactagaccaaatgggggaacacgaaaaaaccatcgcggctggtaagaaggtgttcgacaccgacggcgaagttcgcctgctggacgagaacctggagaaaatatacgactggacacaagactacttggcactagcgccccccacgaacgccacggcaagaacctctctcgccaagaaatccaacccgctgttcgtaccccggagctgggtgctggaagaagtggtagacgacctgatgtacaaccaaagggacggcttgcgggatcccgcctcgacgctggacacctccgcgctcaagaagctatacctgatgagcgtgaacccgtacgaccgcgctgggtgggacgccgcgctaagacccgagctggagcagaaatgggccgacttgtcgcaccaggagggtgccaagttcatgaaacaggcctcctgcagcagctga

SEQ ID NO: 3341 - DNA, 1623 bp, Saccharomyces pastorianus
atggtgtttgctaaagaagatgttaattattcattatatctggtgaccgattcgaccatgcttccacccgggacgaccttgtattctcaggtggaagctggcttgaagaatggtgtgacgctagttcaaatccgcgagaaggatactgagacagggagtttcattgaggaggctttggacgttcaaaagatatgtaagaaatacaatgttcccttgattatcaatgatcgtatagatgttgccatggcaattgatgccgatggtgtgcacgtaggccagcaagacatgccaatcccaatggttagaaaacttttaggcccttccaagataattggttggagtgtcggaaagccctctgaggtagagacattggctaaatgggggccagatatggtagattatattggtgttggtactctcttcccaactttgacaaagaaaaaccccaagaagtccccaatgggacctcaaggagcaattgctgttttggatgccttggaggaatataaggcttcatggtgtagaactgttggcattggtggccttcaccctgacaatatccaacgtgttattagccaatgtgttgccactaatgggaagagatcgttggatggtatctcgctggttagtgatatcatggctgcgcctgatgcttgtgccgctactgtaagattgagagagatgatagacaggactaagtaccaattcgttgattgcgaattaaacgaatcatttcctaccgcagtttccattaaaagtgtcatctctcaagtctcaagcaaccgcccactggtgcagcacgtcaccaacaaggtacatcaaaactttggtgcgaacgtcactctagctctaggctcatctccaattatgtctgaaatccaaagcgaagtatctgaattagcaagaattccaaatgcttctctactattaaacactggatcagtggctcccatagaaatgttgaaggcagcaatcaatgcttataatgaagtaaacagacctataacctttgatccagttggatacagtgccactgaaacaagactctgcttaaataacaatctgcttacttatggccagtttgcctgtattaagggaaatagcagtgaaatactatttctggccaaactaaacaatgataaaatgaaaggtgttgacgccggcagtgggaaaaacgatgatgcattactcgcacgcgcgactcaaatcgtggcattcaaatacaagactattgctgtctgcactggtgaacatgattttattgctgatggtacttttgggggtgaatgcaagctttcttcaggtacagcaggggttactgctgaaggtctcccatgtgtaatgattgaaaatggttcgatccccattatgggtgatataaccgcaagtggatgctcacttggttctaccattgcttctttcgttggtgggttagatcctaccggaaatctgtttgatgcagtcgtcggtgctgttctattgtacaagacagctggtaaactagcttctactcgttgccaaggaagtggttcgttccacgttcagttgattgacgcattgtaccaattattccacgaaaacaaaccagaaaaatggtctgcttctttaaagaaattcaattaa

SEQ ID NO: 3342 - DNA, 1707 bp, Saccharomyces pastorianus
atgtcagaagagaatttgagacctagctacgatgatgatcaagtgaacgaggatttctacaaaaggggcgctcaaagtaagttgaccaaggctcgcaaggcagactttgatgataatagcacagaggaaaatgaaaataaaaaggttaacaaaaaagacaagagatcaaaaactgatgacagacatgtggataaaaggccaaagagcggtccacgtttggatgaaaatggcaatccgcttcccaaggagcctcgtcttccaaaaagaaaagtggctgttatggttgggtactgtggtactggttaccacggtatgcaatataacccaccaaatccaacaattgaggccgctcttttcaagggatttgtcgatgcaggtgctatctctagggacaactccaatgatttgaagaagaatgggttcatgagagctgctagaactgataaaggtgttcatgcaggtggtaatttgatttcattgaagatgattattgaagatccagagatcaagcaaaaaatcaatgataatttgcctgaaggaattagagtgtgggatatcgaaagagtgaacaaagcatttgactgtagaaaaatgtgcagttcccgttggtatgaatatttattacctacgtattcacttattggccccaagcccagttctattctttacagggacattgcagaaagtaaaatcgaactacccggtgtgttagatgaggacttagaatccaaggaattctgggaagaatttaagaaggatgcggacgaaaaattcactccggaagaaatcgaggccatactggcatatgttccaccagctagggatgaattcgatcttaacgaaaaattgtatcagaaagtgaaaaagtataagcaattagaaaacactcaccgtagaaaatatcgtatatccgacgcaaaactggccaaattccgtgctgccacggagcaataccttggtgcacacaattttcataatttcacattaggcaaagattttaaagagccaagcgccattagattcatgaaggaaataacggtatccgatccgtttgtcattggtgaagctcaaactgagtgggtttccatcaagattcacggccagtctttcatgctacatcaaattcgtaaaatgatctcaatggccacgctaatcacccgttgcggttgtcccgtcgagcgtattagtcaagcttatggtcaacaaaagatcaatgtgcctaaggcgcctgctttggggctactgttggaagctcctgtttttgaaggctacaacaaaagactagagcaatttggttacaaggcaattgatttttccaaatacaaagaagaagtggacaagttcaaaatgaaaaacatttacgacaagatttataaggaagaagtggatgaaaatgttttcaacgcgttctttagttatattgatagtttcaacaaagttactggagcacaaggggaagaaactgctgaaaaatctggagtcgccgtacaaaggagcatatttgagtttttaactgctagaggtatcccaggtcttgttgatgcacccgaaagcaacaagaaaattaagcaaagaaaaagaatggaagagaaagaagctgagagtaaagttgcagcaagtcctattgccactgagactgaagttgcagcaagtcccgttaccgctgagattaaagagcaaaaggtacagaaatctgcagctaactga

SEQ ID NO: 3343 - DNA, 1107 bp, Saccharomyces pastorianus
atgaagcgtaatagcctggtaaatgtcaaactgaatgcaaattcgccatcaagaaacccaacaacaagaccaaatacgtccaagattaataagccatggagaatatcccattccccacaacaaagaaaccccaactcgaagataccttcacctgtacgagaaaaattaaacagactacctgttaacaacaaaaaatttttggaaatagaaaactctaagatcccatcacctataagaaaaatgacctccgccaaggtgacacacgaagaaaagaagaagttgctcaagtataaatcactgtcactcgatgattttgaactgggaaagaagttggggaaaggcaaattcggcaaagtttattgcgttcggcacaaggctactggatacatatgtgccttgaaagtaatggagaaagataaaataatacaatacaaattacaaaggcaattcagaagagaggtagaaatacaatcgtcactgaaccatccaaatttaacgaaactatacggttatttccacgatgagaaaagagtgtatctgttaatggagtatttggtcaatggggaaatgtataaactattgaggtcgcacgggccttttaacgatattttagcatcagattatatctatcaaattgccaatgcgctagactacatgcataggaaacacatcattcacagagatatcaaacttgaaaatataataataggatttaataacattatcaaactcacggattttggatggagtataattaaccctccggaaaacagaaggaaaacagtttgtggcacaattgactacctctcgcccgaaatggtcgaattcagggaatacgatcacaccgttgacgtttgggccctgggggtccttacttttgaactactaaccggcgctccgccgtttgaagaagaaatgaaagacaccacgtataaaaggatagctgcattggacattaaattcccaaacaacatttcccaggatgcacaagacctaatactcaagctgcttaaatatgatcctaaggatagaatgcgacttgaagacgtcaaaatgcatccttggatactaagaaacaaaccgttctgggaaaataaagggtcataa

SEQ ID NO: 3344 - DNA, 1245 bp, Saccharomyces pastorianus
atgacggcgaagtccattaaaagcataacgtccgttccaatatcaatgtcaaaaactggaaagatgaggttgacggcatctccagataacctggcgtctatgatgtccagagaccaaaataagctcattcatctggaccccgttccatttttcaaagacagacatgaaatcaaaccatggttacaaaagatcttttacccgcaaggtatagatattgtcatcgagaggtcagattctgggaaagtcacttttaaatgcagatcagtacgatctaacatgaggctgaatcctgaattcaaaagtacatcttcaaggtcgcacgcatgcccatttagaatcagggccgccttttctgtacggttacagaagtggaatgtggttgtcatgaataatatacatgcgcatgagctgaggtttgatttgatcactaagacagatgactataaaaaatttaaggaaaccctccgccagaaacgtgatgaaaaggcaatcaaaacctttgatgagctggaatataaggccagtctaaacttaccgctcgtgacaccgattatctcctgtgactgtggtctgaccaaagaaattgaagcttccaataatatatttcttccgatatcaaatccttctttgacctctaaaaaaagcgtgctcaaagctaataagaattccgtctctaaggcaaaatctaaacaaccagaaaattcaaagcctgggctaaggctgaaaacgcaattagattcaaccctagatgcaactggatttttagatgatatcaaagtacaaagcgcttttgtatcgacaggaaacgccgagtcactaatggacttgaacgagatcgacttcactaatatgtttaataacaatagtgctatcccaaattccaatcaaggtctgatggatttctcagtggatcccattacaggaccttcttcttccctatttccttcaacgcccatagagcctttttcacaaaacaatgtgacattagctatttcggagtcaatagcatcttcttctccaaatttcatggaaatgaaggctccttacgaggacgagatcatggatcttctcaaagataataaaagcaatgcaccaacctctgacacagatatcaatacagatttagggaaggatataagcggtagtcttggcatgctaaactataattatgaagcattgcttcagtttaatgataacgaatttagtgaattgaagtctatcgatccagcactaatatcaaagtaa

SEQ ID NO: 3345 - DNA, 717 bp, Saccharomyces pastorianus
atgaacggagcaggtggtgtggctgtctgggcacagcacccagtcagggactataatcatagtactgaccaagagtaccaaagattgagaaagctagctgacgacgcatataagaaaagagaccagttaagccatgaatcgcaaactgcttaccaacagggtgataagaagtcggctcatgagctaagcgagaagagtaaggcgcaactgaaagttgcagaggattacaacatgcaagcagccgaatatgtgtttgtggaaaacaacgccgactcttctagcaacgagattgatttgcatgggctatacgtcaaggaagccctatttattcttcaaaaaagaatcaaattcgctaccgatcacaatgaaccacaactgaacgtcattgttgggaaagggttgcattcgcaaaacgggatcgctaagctcaagccgtcgattgaagaatattgtgctaaacatggtatcaggaaccatttggaaaagggcaactctggagtgttggtacttgagttgcaaggtgtgcaaatcccgggaagtagtaccggaatggctgcacccgccaataattataatgctcaacctcaaccacaatacaataacaatggaggtcaaccccaaggtcaagccaataacaacaataacaataacaataaggacagtactttggctagtatatttaaaatattttgcagctgtatacaaagtctgacatga

SEQ ID NO: 3346 - DNA, 1509 bp, Saccharomyces pastorianus
atggaaacaacagcagtagtgcccatacactctgcaatgggaaatgaagatatggagaaagcagatgccaccacagtgagccaacccatggatagaacaacagcaacaacaacatcggctatgcatgaaagtgcaccggaggaaaatgtaaatcaagaagatctccatgcggaagaaggggatggggaagaagaagaaggcgaaactcgttgtatatgtggggagcttgatacacctgatgactctggattttttatccaatgtgaacagtgtagtgtttggcagcacggctattgcgtaagtattacacaagataatgcccctgataaatattggtgtgaacagtgtaggccagaattacaccagctttttactacagacactggtgaaccaaggtcattatacaaacctgttcaagaaaagaaaagacaatcaagaagaagggcacgcaatgctgctacgcctcaacctgtggcagacaatgaagttgagaaaagccccaagaacatcagcaatactgaagacaatatggacgatattggtgatgaagaagatgaaatagacgaagacgaaggttcagcttcagctaaagacggtaattcccgagctagtagaaaaagaagaaggaattcaacagatgatacctccatggaccaatattcattggaagctggtgacaacgataaaaaactgcaagataggaaaagagccacttttatggcaagagaggagaaacaataccaaagaatgttagaaaaagctctaaaagaaagcaggagaacatcccatcaagaagatcctgaaattgatggcgacgaagataatgatgatgaagacgatgccgaccttcaaaatggtgctggtgaactacctgagggtgtcgcacctacagaagacgatccagattcgataatgaacgaggatgtgaaagatacacccaagttgtcccaagaagaatcatcgttggagaaaacaaaagatttagtgaaggaagccagtcaggagaaggaatcttccatgagttccacgcaagacgttgaaaaaacagaagaacctatcccaccattgaattccatatcttcatccgaggatgactcaaggaaagctagttcttcaaggagctctagaaaagtttccaaaccagtaagaaaaagtaacagaacccgtcgaagtaatacaagctctgaaattaaccagagtagaaaaagtgccgatataggtaccgacaaaccagttaaacctagaataccaccgcaaagaacttctttgaatgagatgaaaagacgagtatctgccatcctggaattcatttctagaactcaatgggagttgagcgaagaccaatctgaccgggaagaatttgtacgatttgttgaaaatcagcatttcgtagaaaaagtagattctatttacaatggctataaggaaagtctatccatgatggacgacttgaccagggaactgctactgtgggagaaaaaatattcaaataattccaacgctacctaa

SEQ ID NO: 3347 - DNA, 2631 bp, Saccharomyces pastorianus
atgcacaatgcgcgtgttcaagataatgttcatgaacaagaaatatgtttacaggattgggtttgggttaatgagatgaaggggcaggtgaagtttattggggagacaaaatttgctaaaggtatatggtacggcattgaattagttaaaccattgggaaagaatgatggaagtgtgaaaggtattcgttacttctttatggatgaggctaaaaatgctttaaatggtgcttattacggtcttttttgtaaaagagaggcattacaattgtacaatctaacctataacgcaaacggtatgctaagggatgatggaacattgcaggaaacaattaaagagctacaaacagaacgtgaattgttgatctctaaactgaaagaaggtgaatcggggaaaaaaaagatggccgaatataaagccgccattaagaggctaagtatgagtgaaactgatttattatccaaaatttacaaactggacagattagtcgaagctttaaaatttgaaaacaatgatatgaagatccgtttagaaaatttcaataaaattctagatcctccaaatgaagcggtagtaccgaatgctaacgagagcgcattatgggaaagaaaccgtattcttcagggaatgcttgaacaaacgaagatgtcatataacgaaaacatgaaggtccaagaggagttgcttgaggaaaatacccagttattggaagaaaatgcagtattatccaaaaaaatatcagatttaagttcaaaactgcaacagtccaataatatgattagcgatctcacccttcaagtcgaggcccaaagcaaatcctctaatatcgttgaaaggctgacgaacgataatgttttacttacaagtaatttgaaagctttaaatgttcagttggaggaattgcgcacaagagagaaacttgatgaaaatttaagaatcacctatgtagaacttgaacaagaattgacactacaactgattagtatgcaatctgcgttggaaaagaaacagaattttgcagatcaatgtactgaagaaaatgaaagattgaatgctatgttgaagtcgtcagaatcacaggcaactcataaatttcaaagtcttgagttaaaagtgaatactctacaagaagaactgtatcaaaataaactgcttaaaagtctttacaaaatgtatgagccatttacgcaacaaaatatgtgggctctttcttctcagttacagtatttagccgaagtaatagatggcgaaaacattagaagttcccctattgaaaatattgaagcctatacgattttgaccgttttgagttatatcagttatgcattatacactcattcactggaaaatgctatcaaaaatctggggacaataacccaaagcttcaaggtaaataacgttcaactctctatgtggcagagtgagtttttacaacgagagttttcacccaaacaagaaatcatttcttctattaatagttttttaaaagaaaacaagtttctggacaatgacgtgacgttgatactcaaaacacttcactcgatctttgaaattatcactccgaagctgctggcagttttaaaagatagtactaattcaaatgaggatgatgggctgtctcttattagttcattatatgaagcgtcattctcagttacagccaatattgacacatttcttgaaaaaaacgaagcttcaggggaaaacaaaactttgcttctaagtcctgcttgcgacctgactttgtcatctattttatcgacatatttttcaaatccggttttcttaaatcaggattttgaacgtttacgtgcatgtgctatagaagaattgacgacattcttttcccgaacagaggatctcctagaaaataaaattgtattcactgaacatgtcagccaatcatcagctgacgcagaggataccaatgatagtacggaggaaaaatctccaaattccttagtaagtggccgtttggatgcagagaatatttatctcaaagaggaattgcttcaaaaggaaaatttgttaactgagctgaagactaaaattgaagtcatttctggacgggattcggaaaggaaaaacctggaacggattatcactggattacagaaagagttgaatgataaaaatgaggagaatcgttgccattctgaaatgctcagtgaacttaaagatgaaaataccaatctacgaagttgtttgaaaaatatggaactagacctttatcaagtagagggcaataacaacctaaatcgaatgtgcctagatagagagaaagttgataggatgaacttggtttctgagatcatgggattaagagaaaccattaaacgacaactaaaagatactaaacccgcaactattgatctaagctggttggaagagtccccaagtctcaaaaacgaggggcgatcgaaaggtgatattcatcgcggattaaatatttacaggattgaaatggcagattctgttaataactcgcgggtcttggatttaaactctggtcattctttgaaaggagatgaactatcatatgaaattgattgctcttatattgcttatttgaaacacaagaggaaaaacatacgccttaagctacagaacattgttacaaaaaaagaatga

SEQ ID NO: 3348 - DNA, 1392 bp, Saccharomyces pastorianus
atgagttactttcctcgaacatctgctcatttgatgagaaatgttctggctcaaaataaaggaaacgtatatctgcgaatcaccacatacgcgaccgatatcccgatacagatccggttcagtggagttcgctatattagcgggaaccgtgggggaaaacagcaacaacatataaatactgcgccaatagaattcactcccaattttgggtacggtgatagggttccgaaactcgacaaaaaggtagaatccactgccttgaagactctacgatgcacagatgacgtttcaaacacttcggaagcgggagccttgcccgatccaagcacacagcttccattcaaagtcaaactagtagacccaaaggaaaggaaatcaaaaaggtcatcacaggcaaccggccaaggtttcgacttgcagactttaaagaaaaaaattataattccctatcttcaattgaccaaacctcggctcaccattctggtgatgttgagtgccatatgttcgtatgccctatccccgtatccggcttcggtcagtgaattactatgcctaacggtgggcactacgttatgttctggttccgcaaatgctataaatatgggcagagaacctgaatttgataggcagatggtcagaactcaggcgagacctgttgttaggggcgatgttacacctgtgcaggcatttgagtttgccgcacttatcgggtctttaggtgtgtctactttgtactttggcgttaaccctaccgtggctatactcggtgcttcgaacattgcgttatatggctgggcctatacgtctatgaaaagaaaacacatcattaacacatggctcggtgccctagtcggaaccattcctccattaatgggatgggcagctgcaagccccctttcccatccagggtcttggtgcctagctgggctattgtttgcctggcaattcccacatttcaacacattaagtcataaccttcgaaacgaatacaaaaatgccggatatgttatgactgcctggaaaaatcccttattgaatgcccgggtttcgttgagatattcaatactaatgttccctctttgctttgggttatcttactttaatattacagattggtactaccaaatagattccggactcataaatgcatggctaacgttttgggctttcaagttctactggcaacaaagaataaactattccgcaaaaacattgaaggacaacgttaagttcaataagggtttgagtgtagccaacatatatgcaagaaaaacattcatggcgagtgttttacacttaccggcgattttaatacttgctattattcataagaagggccgctgggattggatatatcccggtgaggcaaagcggccacaggaacgtttatag

SEQ ID NO: 3349 - DNA, 636 bp, Saccharomyces pastorianus
atgaatagtagtaatacagttatctatgttaaaattaaaggaaaaacgccagatgggtttgtagatcctccaaaattcgagtggaatagtgcaaaagagcgccaactttgggcaatggtatcaaatctaaattattcgcgagatcaaatagattggcaagctctatccgaagtgcttgaagcaccagggtttttcctaaaaaaaaggacgtataagttgtttgctaaacatttggaacttttacagatacaattggaaaagaagagagatcttgagaagttttcaaatgaccaggtaaacgacagaatgtttgaggtgttaaataattatatccccactttacaaaacgaaaacttattgactgtaccgacaagcccatcggagacgaagggggagactttggaagaagtcgatgaagaagttacaaccgaggcattacaacatttgcaaacctctaaaatcttaaatattcacaaggcaaagtcaaacagtgaaaggaaatttgaccgtaacacgcctaacgatggcgctgaaaaagaatctgaacgaggtacttctgacgatgatttgtcttcgagcttaagcgtcagcaagtccgcattagaggaagcattaatggacagattgcaattctga

SEQ ID NO: 3350 - DNA, 2115 bp, Saccharomyces pastorianus
atgattcaaaaaatgagtccaagtctaaggaggccatctacaaggtctagttcaggttcaagcaatatcccacaatcaccctcagtacgatcaacttcatcgttttctaacgtgaggaaaaactcaattcgcaatgcgtccaattcaggttcacaatcagtttctgcatcctccacaagaagcagttcgccattaaggtctgtatccgctaagtctgatccctttcttcattcaggtaagataagggtcagaagaagcaatagcactaacaattgcttgagaaaaaatgacatatatacaggttcaatcactgtaactattcggcccaaaccgcggagcaccgtggcatcacacgacagcgtggggcttaaatcgcctagatattctcaaccaagacccaatccacaaagcggcggaaatacatttattagagatccttggtttatcactaatgataagacaataatacacgaggagatcggagaattcgagtttgaccatgtttttgcctctcattgcaccaacttagaagtttacgaaaggaccagcaaaccaatgattgataagctattggtagggttcaatgctacgatttttgcatatggtatgactggatcaggtaaaacgttcacaatgagcgggaatgaacatgaattaggtttaattcctttatccgtttcatatttatttagcaatgtaatggaactttcaatgaatggcgataagaaattcgatgttattatatcataccttgagatttacaatgaaagaatttacgatttattagagagtggattagaggagtccattagtaggccaagcacgccttcaagactgtacatgggtaagggaaatagtaatggattaagtgctgagttgaagattagagacgacacccaatacggggtgaaagttattggcctcactgaaagaagatgtgaaagcagcgaagagttactaagatggattgctattggtgacaaaagtaggaaaattggggaaactgattacaatgcaagaagctcccgatctcatgctatcgtcttaattcgtttaacgagtacagatttgaatagcggtacatcaaggtcaagtacgttatcgttgtgtgacctcgcaggttcagaaagagccacgggacagcaagagagaaggaaggagggatcctttatcaataaatcgttacttgcactggggacagtgatatccaaacttagcgctgataaaataaatccaacaggcccaaacatactcacgacaccgacgagtaccggcagcaatagtactggaaccgccactagtaataataatattccaaacaaccacattccatatagagactccaaattgacgcgtttgttgcaaccagcactcagcggggatagcatagtgacgacgatatgtacagtggataccagaaatgacgcggcggcagaaactatcaatacgttgaggttcgcatcgagagcaaaaaacgtcgcattacatgtatccaaaaaatccatcataaacaacgggaataatgacggagataaagaccgcactattgagatgctaagacgtcaattggaagaccaacgccggccgatatctgatttgaaaggccgctcaagtccaggtgagggctcaagtcacttctcgagtgacggcaacatcaaaagcaatggggccgtcgatccaaatttggcgctaatgagagcggaaaaccggatattgaaatataaactggagaactgcgaaaaactgctggataaagatgtggtcgacctgcaagattctgagatcatagagattgttgagatgttaccattcgaggtcggcactctactagaaacgaaattccaaggacttgaatcacaaataagacagtatagaaagtacactcaaaaactcgaggacaagattatgacgctggagaaacccgggcacaccgcaacgtcgctaaccggttgcggcgacactgaagtcacggaactgcggaagatgctcgaaaggaaggacaagatgattgaggccctgcaaagtgccaaacgattacgggacagagccttgaaaccgctcactaatgcacaccaaacctcgcaccctattgtaagaaacgataaattgacttga

SEQ ID NO: 3351 - DNA, 1530 bp, Saccharomyces pastorianus
atggcttcgatgttcaggccaccagcatccaacaggagccaccaaaagacaccaaaattaacgcttccagcgactttagttcaaactttaaaaccggctcatgaaggacaaaatcccaatcgatcaccttactcttccgtgaatgaaagcccatattcaaacaaccctacgtcggccacgtcggccacctcatctatggcttcaaattctactctactgtacagccgatcaactacgtctacaaagtctactttgacaatgaaaaatagaccgataccaccaccattaccaccctcagtcttaacacaaaaggaagacggcaaagaacacataatagctgacgattttcacatttctgaaagattctcaagtttgcatgttgacacaacataccaggaacctctgttgagtggttcttccaacaagttagctgatatagatacctcttttttcagaagggacctgagcacaccaggcggtgatgattcatatccttcgacacttctctcggcatacgatttaagtagcagtggaagcaatgccacccctataagtgccaccaacattacttcttgttcctccttagtacaggggaaagatgtagatcaactagaggaagaagcttggaggtttggccatctcaagaacgaaatcataacactgggcatcttaggagagggtgcaggaggatccgtagccaagtgtcgattgaaaaacggaaaaaaaacttttgcattaaagacaattaataccctaaataccgacccagaataccaaaagcaaatattcagagagctgcaatttaataagagtttcaagtctaattatattgtacaatactacggtatgtttactgacgaacggaattcctccatatacatcgctatggaatatatgggaggaagatcgctggaggcaacgtataaaaacttgttaagacgcggtgggaggataagtgagaaagtgatgggcaagattgcggagtcagtattgagaggattatcatatctacatgaaagaaaagttattcatagagacatcaaaccgcaaaatatccttctcaatgaaaagggagaaatcaagttatgcgattttggtgttagtggagaggctgtcaactccttggcgataacattcaccggaacatcgttttatatggccccagaacgaatacaggggcaaccgtatagcgtaacatgtgacgtatggtctttaggcttaaccctactagaagttgctgggggaaaattcccctttgaatccgacaagataacacagaacgtggcaccaatagaattactgaccatgattctgacattttctccccgcttgaaggacgagcctgaattaggtatcatttggagcaagacattcaaatcgtttattgaatactgtttgaaaaaagatgccagggaaagaccatctccacggcaaatgttaaagcatccatggattgtcggacaaatgaagaaaaaagtcaatatggaacgttttgtcaagaaatgttgggaaagtgaagaagacgagtaa

SEQ ID NO: 3352 - DNA, 3813 bp, Saccharomyces pastorianus
  modified_base (2826)..(2871): a, c, g, t, unknown, or other
atgataacgaacaccgagtttgatgtgcccgtggactggctgtacaagggtaagagcaggcggaaggtgaatacaaagccgtcgaggccgtcttcatctgcctctgcaccaaaggtggtggacagtagcaacaacagcaacagcaagccgcgtgcgaggtcttcgtccatatcgaatgcggccctttcaaataacgagaagtcgaacttgactgacggcgatggaagcgggtttggatcaggcactgagaacttgccgctccttactcctgttagcagtagtggccgtaccagtttggcggccgcagacgatggagatgccgatgatgtgataaatggtgacgatagcaaggctagcgtccctctcgtgaagaagaaacgctccacttccatatccaatgctgtggtctcgtccaagccaaggctatcaaattcaaacataagcgcaaccggaaccccttctcctgccaagggaaagctccctctaccaatctcttctttgtcaaatgccaatatcaagaggagcaactcgtcagggagcgaaaaatccaaacgatcgatcttcgggtctctgtttggcaaaagatctgccccttccactgtttctgcagtcaaaaaagcattgcccgcggtcaataccgccgcacctgtagataactcatctaagaaggaaccatccagtaacggtaacaacatcaacacaatccctcgtgtgaaggagctttcttccccgaaggtagcatctcctaccgtgagtaaaccgcccactcctatctctccctccccttcagcattaccttctcccgctctctcagtgaaggatttatctacggtttcgttgaaaagagtgtcgtttgccgttgataaattcgaagcggaccctccccagcaactcccttcaagaacgcccaagaagggcaatatcctgattccggacgatatgataagcgaagcaccgtctatatcggtgggaatatccagcattaatcaatcactcaaggtacccaaccccaactccaaggggccattgtatactaggaagtccaaagaatacatcctcgcattggagaaccagaaactggctctcagggaggctgccaaacatcagcaagaggcacatttcgctgctaataggatagctcacgaagtggctagtttcaaaacttccgcaaatacgggaggaaagcttgctgcaaagtcaccccggaactccatttcaaaacaaaacgaagaggcgtcacagtcaaacgttgaccaggattttgacaataacgcatttgcagaaaatctttcaaaagtaggcatcgataaacctattcacatgcatgagcaccatttcgaagctccaaatcatgaaaaaaacgacaccgactccaccttggaaaataaagaagtcaccctggatgtcatctacacaagatgttgtcacctgagagaaatcctacccatcccatccactttgagacaggtcaaggataaaaccgcccctttacaaatattgaagttcctaaaccctaagcccaccttaattgacatcctttcgttttgcgactttataaccattgtccccattcacaccatcattttcgacaatgtcgctttaaaccaagacatgtttaaaataattgtttccgctctagtaaactccacagtgttggaaaaattgagcttgagaaatgttcggatcgatcaagatgggtggagactattgtgtaagtttctcttattgaataaatcattaaacaagttggacatttctcaaacaaaggtcaaatccgacctagccgaatcattgtaccgtcacaatatggattggaacttgttcactcaagtgttaacacagcggtctcataagcccctggaagagttgctattgaatggtattcaattcagtaaggtctcttactcgtgctttgaacgtctgttgacatcctatgcgacccagaacacgttgccggaatccggtattaggcttggtctagcaggtgctactacttctaatatatcccaggactgtttaaaatttactttcaattggatgtctcaatataacatacaaggtgtggatctagcgtttaatgagttatctactatggttaaacccatggttagtaaattgtctgctttaccatatgataatttgagatactttatcttgaacagtaccaatatttccacttcttatgatttggctttgcttttgaaacatctctcaaagctgcctaatctgaactttctggacctaagcaatttaccacaatgcttccctgatattttaccatacatgtacaagtatttaccaaggttccccaatttgaaaagagtccatttggataacaacaatctaacatttaaagaattagccgtggtttgtaacattcttatcaaatgcaaatcattatcacatgtgtcgatgactagtcaaaatgtagaaaatttctacttgacgagtgacgactctccagttcaagcaaccaacacagatggagaatcggacaattccggtttaatggaaattagaggccaatttgctaagaacagtttatcttctacactttatgcatttgctagagactcccctaacttgatcggtttggattttgactatgatttaatatcagaagaaattcaatcaagaattgccctatgcttaatgagaaatatgcaacggactatggattctactttccagttagacgagttggattctcaagatgatttactgttcgatggctccttagttaccatgacggctgaaagtgtcctagaaaaactgaacctattgagtgacaggaacgcaaatgtcaaaaaagacgtcaccaaaagnnnnnnnnnnnnnnnnnnnnnnnnnnnnnnnnnnnnnnnnnnnnnnaatgttcagcatacgattgatatcatgtttgagaaaaggaaatccggtgaactaccattacaagaaaaggaaaatttggtaagactgctacttttggagcagaatttatgcaacattctcgaattgttttctcataatccaaacttaaatgatgttttgggctccggtaaggacgactccaaagaaagtgttgattcgagcgaggattcgaaattaccagctttgaaacacgttgaatccggataccatgtctctgaagaaaaaacacaacctgaaaatgaagtaatcacagcaagaccacatttgatggccactgattctggtaagactattgatgttttcacaggcaaaccgttggtgttcaaaaatgcgtcatcaagcacttctgtaggctgtaggaagcaagaagaagaagaaggtgaactgcataagtgggggttctttgtccaacaacagagatctttgtatcctgaaaatgaatctgcaaggcaagcgccaccaacatcacgtcacacatccaacaatttacaagctatcgataattcggcttcatcatcttcagtttcagcttccaccaacgaaacagctgccacgagtttatccactccagtaactccgaaaatcatgccaaagatcccatcaggtgcagccttgagatcagcaatcataaaagctaaaggtattgactctattgaagacctgattcaaaacgtcagttccaataacatcgaactagaaaacatttatggtaaatccattcaaaatagtgcttcgatgccctcatccggcttgctttccaatgtttctgctcctgtttctggcaaagattctctaaaagcatcgccttcaaacccgactactgacaactgtgagggtaaagttactgctacttacgagaagttattaaacaacttgtccatggagaggtcaaccaaaccgtaa

SEQ ID NO: 3353 - DNA, 894 bp, Saccharomyces pastorianus
atgataagattctgccccgctggtaaccttactcgtccattgattagaaactttgtcacatcaagctctcagtttataccacatacgcttgctttaaggcgggtcctttcaagaaatgtactagcaagaacttattcgatggaaagtgaaaagtcggcaccttcatttgatatttcaaaacttacaagaaatgaaatcaaacaattacgagacttgaaaagggcaagggaaagaaaatataaagatcgtacagtggcgttttattttagcagcatagcgatactcttcttaggtttggcatacgcagcggtaccattatacagagccatctgtgcccgtaccggcttcggtggtactcccataacagatagaagaaaatttaccgatgataaattgattcctgtagatactgaaaagagaatccgtatttcgttcaccagtgaagtatcacaaattctgccctggaagtttgttcctcagcaacgtgaggtttacgttctaccaggcgaaacagctctagcattttataaagcaaagaacaacagtaataaggatattatcggtatggccacctatagtatagcgcctggagaggcggcccagtacttcaataaaatccaatgtttttgcttcgaagaacaaaagctagctgccggcgaagaaatcgatatgcctgtctttttctttattgatcctgattttgctagtgatccagctatgagaaatatcgatgacattatattacattacacattcttcagagcacattatggtgacggatctgctgtaagtgactcgaaaaaagatctggagatgagctccgacgaaaaagccgcatctttagccaatgcagctatcctgtccccagaagtggtggacgcaaggaaagactaa

SEQ ID NO: 3354 - DNA, 3099 bp, Saccharomyces pastorianus
atgtccactacacttaatgagttaagcttggttcaagtgctggaacaagcaagtaacccacaacatctcagatctgaagtccaaaaattagctgaacagcagctaaagcagtgggaaactcattctggattccattacttactacagtcaatatatcttaatttatcaaattctttgcaaattagatggttggcagtgattcagttcaagaatggcgtagacaaatactggagatctaccaggattaacgctataccaaaggacgaaaaggcctctataagaggtcgcctttttgaaatgatcgatgaacaaaataatcaactttgtatccaaaatgctcaggctgcagcaaggattgccaggctagattttcctgtagattggccaaacctgtttgaagatctagagaacctactgaataatgatgccattaggaatgattcaatcaaagtgcacaatatattaatgcatataaaccaaattgttaaagtgttaggcacagcaagaatagggagatgcagaccagcaatgcaaagcaaaatccccttaatatttccactaattgtaagaatctacttacaatcattcgaagaatggacaacatcctcaaatcccaactatgaaaacctctccagtttacaggtttcttacctatctctgaaagtaataagaagaatgatctgcgagggatatgagcgcccacagatcgatcaatctgtgtgcgattttattaaactatccgtctcacattttgaaatgttaatttcaaaccatgaaaacttcagaaaatttgacatttacgaaaaatttattaaatgtctgggcaaattatattttaatttagttaccggatctccagcaaattttatattactcccatgctctactcaaattttgattagttatactaggttaatttttgataaggcccctaaagtatatagagaaaattctgatgttacaggagacttttgggaacaaactgcgatcagagggcttttaattttgaaaagagtcatcaatttcattcacaaaaagggtgcaattactttaaaagcaaggagtgataagttaactatagatgcttctatcaacaaaataaatacagagttcttgaatgacaatttgataaccaggctagttgacactttaatggaatggtatttgagattaagacccactgaattggaaagttggtttatggacccagaagagtggattaatgaacaaatggctacgagctatgaataccaaattaggccttgtgcagaaaatgttttccaagacttaataaataccttttctgaactgttagttccatatttattagaaaaaattgagaataatgcttccaaactttcaaattcattggacgatttcttgaaaaaagatgctatttacgcaagtttccaattgagtgcatctgccgtcagtgaaatggtagattttgacagattgttggtccaggttttcttgccagaaactacaaatgcaaatatatcaggtgacgaacttagaataatcagaaggagggttgccttgattattaatgaatggtctactgtgaagtgttcagaggagtctaaaaatttatgctacaagctgttcaccaatttcttaatgaatgaggatgacaaagttgttttgttaaccacagttcaaacattaagaactatgatcgatgattggaatttcaataaggacactttccagccatatttaaacgagaacgttcatttgctgttaagaaagatcttaccgtccgtgtcattaacagaaacaaggttgtatgttttaaacaccttgagtgacatcataattcaaacaaaaccattgatcagcagggatctgttggtcgaaatactgcaaataataccaaatctttgggaaatagcaacaaacaacgcaagcgaagctattttagcaaacgcattattaagattattgagacatttggtatcatctttgggaccacaatcgtacttaacgtgggatatcgctgtacctgtagttgcattatcgtgtgatccgtcttctatgcaatatcaattgttaagcgaagatgggtatgaactatggggcatgcttttacaaaacttttcatctcaagaacaagaactcgacgataaattcactgagctgataccatttttgaaatatggtgttgaaacacactcagaaatactaccaactttactggaaatcatcaaaagttatgcattaattttgaattctgaacaattcttcgcaaacatcacgttccaagatatttttaaacaaatgtctaaatatcttttaaaattaagagaagattcgtttcaattagtgctggaaatttgggaaattttgatactatcgaatgagtcagattacgagaacctcttattgcagaattttttcgagactggagtattgtcggctttatttgacgccatatttttggaggaagctccttcatcatatttgtgttcccaaataattcaagttgtcgccaggatctcctacgtaaatccagatgccttaatgaattttctaggtgcctatcatgaaaacttgccaagttctagtgaaaacgcacacttgccagaatccatgagaaaaattgtatccaaggaccaaccgtatgatcttgttgtgaacaagcttcttgctggatggattgtatgctttagggacatatttgaccccaaattcaaaaaagttcatattttaggcgtctcgagcttattaaggaccggcttggttcctattttaacagagttttcatcaattgcatctttatggatcgaaatgctggaagaaatcaacgagactaatcgtggagactgtgaaaaataccacttaaatgatattgtcacagaacagtcgcttgccttccatcctttaactaccgagcaactaaggtatcatgaactatgcaaaagcaatgatcccgtacacaacataagtataaaagattttatttcccaaacaatggaatatctggaatcacatctgggagtggaaaggtatcaagaattcttgaaaactatcaaccccagcttgttagaaaacctacagatgtttttatccatccaaccacaagagcatcattcatag

SEQ ID NO: 3355 - DNA, 669 bp, Saccharomyces pastorianus
atgcaaggtcaggaagattgggtagataaggataaaactttggtggaagaagaagaagaagaaggcgccaacgatgaatctcacaaaaagaagagcaatgatggtaatcgggtctgcaagaagagtgttaaggagctgaagaaacatctggacaagaaggaaattgcaatacagaatagagaatcgacgaagcaactcaccattttaagacaagaaaatacccatttacagcaggcctgtaagatcctcggcgaggacaagattaccaagaataaacaattcatagaaaaatggaggaccgtttgcgagatggagctttcattcatcctgaactccaccttaattaagattaacagaatgggcggttataaagattttctggaaaaagaaatggaagctaagaaaagaaggctggaataccagatagataacggaatggaagaccagctctatgaagtaagggatagcgaagactttaagcagctttctgaagttgagcaagagcaatgggagagtcaaatgaatgaacaactaaaagaagtggaaaagagtaaagaggtggagttggaaaaactaaacaagatgttactcgatagtgaggggaaggaattcgatatggcagaactatgtaatagattaaagcttgattataaactaatctttccctaa

SEQ ID NO: 3356 - DNA, 1491 bp, Saccharomyces pastorianus
atgaaagtattacagttcaatcaagacgcgacatgctgtgtggttgctgcgtcatctcatcaaatttcgatttataactgtgacccctttggtaagtgttttgaaattgatactaagaattcaaagagcaaaaatgggaatagtagtgacataattacaaattcggaatcacgaaataatgaagatagcatattgataagtaatggttctcgtgacaatggcgatgcggaggaagaggaggaagataacgacgacaatgcccttgtctcaggaaatatactaaaagaaggagagtttgtcattgaaatgctattttcaactagccttatcgccatagcagacagaggacaaggtttgaacaagggtaaaaagctaaaaattgtcaacaccaaacggaaatcgactatctgtgaaattgtcttcccacatgaaattatcgacgtagtaatgaataggaaacgaatgtgtgtgcttctggagagtgatcagattttcatctacgatatatcctgcatgaaaccactggaaactatcgacctttgggaagatcattataagaggtctcaagccgcttcatgcataaatacttcgaatacgggcgcttttgatggagattctgcgaatttgaacagaactgctagtaatctactatcaaacgccacgcagaagaacgcaagtagttccaatgggagtgtgagaagcaggagaaactccttgagaagtcgaataaggccaagaatggtactaagtaacgatgataggagcatactgtgctttactgcatatagctcacccaaaaataataagcccaactcagaggtattgcatgatgtggtgatatatgatactttgaacgtgacaccacttaactacttgaatactgtacataagggaaatgttgcatgtctagctgtgagtcatgatggtagactacttgccaccgcctcagataaaggaaccatcataagagtgtttcataccggggtcgattcagattatgcatcttccaggtcgttgtttaaagaatttaggcgtggcaccaggctatgcaatttgtatcagctggttttcgataagagcatgactatgattgggtgtgtaggcgatacagacactattcatcttttcaagcttgatgaagttgctagccttcccggagatgctattggcagtggtcagtggaatgaagaagaagagatattagcagcaaattctaatcctagtgtgggaagtcctaaagaaacatccataccgaaaccaagacttgcaaactatttctctaaaaagataaaatcttcaattcccaaccaaaatctgagccgtaatttcgcacacatatcagtcaatgaatcgaataggaattgcttggggtttccagacgaatttcctaatcaagtttatgtcgcctcggatgatggaacattcagtatatatagcattccatcaagacctggtgaatgtgtgttaaccaaaaataacaaatttatgtaa

SEQ ID NO: 3357 - DNA, 1482 bp, Saccharomyces pastorianus
atgctggaaatacgaaattgtagtcatttggtaaatagtgggaagaggattgtacctttagtgactcaccatagaataaatacgaaagtatggcataagacccgactttattcgtgcacgactagttcttcagaaacgcaagaaacacccaattctcgaagtaataatgttttggacgaactcaaacaaagaggtttagtatgtcaggtctcacaaccagaaaacgacctacggatgaggttaaattgcaatgaaaagatcaaactttattgtggagtggatcccactgctcagtcattgcacttgggtaatctagttcctttgatggttttgttacacttttacgtcaaaggacacgacgttgtgacggttataggcggagctactgggaaagttggagatcctagtgggaggaaaaccgaaagagacgttatggagaatgatatcagacaaaacaacatccaatcgatatcggaacaactacagagatttttccaaaatggattaaagtactacaccgatcgacacgacagaagagggatcaagccttatgggaaatacacgccaagaaataattataactggtggaaagatatcaaaatgttggattttttggctgattttggtaaacacatcagggtgcaatcaatgctagcgagagattcagtctcttcgagactagaaagtcaaaatagtcttggttttaatgaatttacttatcaaatcttacaagcttacgatttttatcatttgtataaggaagagaacgtcagtgtacaagttggtggcaatgaccaatggggaaatataacagcagggattgaccttatcaatcggttacagcctacacagaaaaagggcgtgccatttggtgttacagtgcccttattgacaacggcaacaggtgagaaattcgggaagagtgcaggtaacgctgttttcattgacccttcaataaacacagcatatgacgtttaccagttttttttcaatactttggacgctgatgtgtccaagttcttgaaaatcttcactttctcaagttcaaatgaaatcgattctgttatggaaatgcatatcaaatcacctaatctacgtcatggccaaacgctattagccaaagaagttactgatatgttatatggagttggatccggtacagactcagagacgctttctaacgttatttttgggcattatgacggcactttatctgctgccagattgaaagacctgtgttacaaggccaagatcctacaacatgcagataagaaggacaacttagtcaagttaatcgctaaactaggggactgttcaatttctgaagccaaaaggaaactttctcaaggaagcatctatttacatcattcaagaatcaaagtcaaagaggacgttgccgagtggggtccttatttaatagacgatcaagtattgattttgaggataggaaagcaaaaatgctttataatagaaatgcattga

SEQ ID NO: 3358 - DNA, 1377 bp, Saccharomyces pastorianus; identical to SEQ ID NO: 1

SEQ ID NO: 3359 - DNA, 1029 bp, Saccharomyces pastorianus
atgggtttggttaagcaagtaagactgggcgactcgggtctaaagatatcgcccattttgattggatgtatgtcgtacggttctaagaaatgggcggattgggtcattgaagataaagcccagattttcaagatcttgaagcactgttacgataatggtctgcgcacttttgacacggcggatttttattccaatggtttgagcgaaaggattataaaggagtttctggaacattatagcatcaaaagagaaacggtggtcattatgaccaagatttatctccccattgatgaaacactggatttgcatcacagatttacaatcggtgagtttgaagagttggagctctccaatcagagaggactgtctagaaaacacataatcgctggtgtgaagaactctgtggaaagactgggcacgtacatagatcttttgcaaatccatagattagaccatgaaacaccaatgaaggaaatcatgagggcgctaaatgacgttgtcgaagcaggcgatgtcaggtacatcggagcctcgagcatgctcgcaaccgaatttgcagaactgcaatttattgcagacaaatatggctggtttcagttcatctcttcgcaatcttactacaatctgctcaaccgtgaggacgagcgcgagttgatcccgtttgctaagagacacaacatcggtttaatcccatggtcgcctaacgcaaggggtatcctaacaagacccgtggacaaacacacagacagacacgtgagtgaccctaccatcaaagcgttgaaattggacgctctcgaagacgaccagaaggaaatcatcaaccgtgtggagaagatctctaagaacaagaatgtctccatggcaatgatctccatagcctgggtgctgcacaagggctgctaccccattgtcggcttgaactccacatcaagggtggatgaagcgattgccgcgctacaggtcacactaacagaggaagaggtcaaataccttgaagagccctacagacctaagaggcaagtaagctag

SEQ ID NO: 3360 - DNA, 846 bp, Saccharomyces pastorianus
atgagtaagatgtctccttggaaacgtttattatggctaaaacaagagtatccggataactatacagatccgagctttattgagctaagaataagacaaaataacgaaagcggtaagaagtccaataggaaattatctgaagccgcaagctctcaaattagattggactttataagtttttaccaaaccgttttaaacacatccttcatttacattacttttacttacatttattactacggttacaatcctatcccgccaactattatcctttctttcctaacattggttatctcaaggaagaaagttgaccctttattatcctcattcatcgacatcaaatcttcattaatcatcacgttcgcaatgttgacgctctccccagtcctcaaatcgctttctaagaccactgcatctgattctatatggacgttgtcgttttggctatccgtatggtacgttttcgttatttcttcaacaagttctaaacacaaaccctctaatctctctactaatatacttgttgccctagttgcggttttatcatcaagactatcaaccacgattgacgtattttgttttcttttaatttgtattcaattgaatatcattttacccagttatctatcagtgacaagtaaggcggtaccaataatttcaaatatcattgtttactccttccttaacgttactctcggttggatctatatgctgttggttttttttgcttctgtattttatattatagttttacctaggtggttcatttactggaaaatcaattatcataaaaaagataacgatttactcagtacatgggatgcaagagctccgattttggattag

SEQ ID NO: 3361 - DNA, 471 bp, Saccharomyces pastorianus
atgagttcccggtttgcaagaagtgatgtcaactcgaatcatattaggaaaagaaaccattctccagatccgataggaattgataattacaaaagaaaaagactgattatagacttagaaaatttatctctagatgagacaggccccaaaaacgcacgcacagacgatagtaaccttgttcataacagcatagcattctctgatgccatccacgacaaggctctgaaagacatcatcaaatcctcaacaggcaataatcatcacagtgggtcgatatatgacaagatttgggaacgcctaagagaggagagactacaagttataaaatgggctgactacaaggaagttgcttattcgaattggtggaggtggtttcataatcagtttgccccaaagcccacctatgatggagaggctgacaccgatgttgatatgttggtcatagatactgacgtggatatggatgagtaa

SEQ ID NO: 3362 - DNA, 4542 bp, Saccharomyces pastorianus
atgtcttctactgacgaacatcccgagaaagacatttcttcgaattcgaatcatggcgatgatcattcatacgctaattccgtacaatcgtacgccgccttagatgaccaagctgataatgaggatatgacggctacttcacaactatcgcgtcacataacgaatatcttatctaacgaggatggtatagaaagattggaatccatggcaagagtcatttctcgtaagaccaagaaggaaatggactccttcgaagtcaacgacttagatttcgatttgcgctcgctactaaactatttgagatctcgtcaactagaacaaggtatcgaacctggtgactccggtgtagccttcaaaaacctaacagctgttggtgtagatgcttctgctgcgtatggacccagtgttgcagagatgcttagaaacatcgccactatacccgcacatcttataagtaaatttaccaagaagtccgatgttccattgagaaacattattcagaactgtaccggtgtcgtcgaatcaggtgagatgctgtttgttgttggtagaccaggtgccggttgttctactttcctaaaatgtttatctggtgagacctcggaattagtcgatgtccagggtgagttctcttatgacggtctggatcaaagcgaaatgatgtctaagtataaaggctacgttatttactgtcccgaattagacttccatttcccaaagattaccgttaaggaaactatcgatttcgcgctaaaatgtaagactccccgtgtcagagttgataaaatgactagaagacagtacgttgataatattagagacctgtggtgtaccgttttcggtttgagacacacatatgcaactaaagttggtaatgatttcgtaagaggtgtctctggtggtgaacgtaagcgtgtttccctagtggaagctcaagcaatgaacgcatccatttactcttgggataatgccacaagaggtttagatgcttccactgctttagaatttgctcaagctatcagaactgctaccaacatggttaataactctgccattgttgccatttaccaagctggtgaaaacatttatgagttattcgataaaaccaccgttctatataacggtaaacaaatctatttcggtcctgctgataaagccgttgcatatttcagtaatatgggttgggtgaagccaaacagaatgacatccgcagaatttttgacttcagtgactgtcgattacgaaaacagaactttggatattaaacctggttgtgaagataaagttccaaaatctagttctgaattcgaacaatactggttaaactcggaagactatcaagaactgttaaggtcttatgaagattaccaagatagacatcctgccgaagaaacaagagacagattagatgttgccaagaagcaaagattgcaacaaggccaaagagaaaactcgcaatacgtcgtcaactactggacccaagtctactactgcatgattcgtgggttccaaagagtcaaaggtgattccacttataccaaggtttacttgagttcttttttgattaaagctttgattatcggttctatgttccatagaattgatgacaaaagccaatcgaccaccgccggtgcttattctcgtggtggtatgttattctatgtcctactgtttgcttctgttacttccttggctgaaattggtaattctttctccagtagaccagtcatcgtcaaacataaatcgtattccatgtatcacttgtcagctgaatcattacaggaaattattactgaatttcctaccaaattggttgccattttgatgttgtgtttgatcacttactggatcccattcatgaaatatgaagccggtgctttcttccaatacattttgtatttgttgaccgtgcaacaatgtacctcttttattttcaagtttgttgctaccatgagtaaatctggtgtcgatgcacatgccgttggtggtctatgggtcttgatgctttgtgtttatgctggttttgtcttaccaattggtgaaatgcatcactggattagatggattcattttatcaatcctttgacttacgcctttgaaagtttggtctccactgagttccatcatagagagatgttgtgtagtgccttggttccgtcgggccctggttacgaaggcatttctattgctaatcaagtgtgcaatgccgctggtgcaatcaagggcaatttgtacgttagcggtgactcttatatcttgcaccaataccatttcgcatacaagcacgcatggaggaattggggtgtgaatattgtgtggaccttcggctatattgtattcaacgttatcctatcagaatatttgaaacccattgaaggcggtggtgatttgttgttatataagagaggtcacatgccacaattgggtactgaaaatgcagatgctagaactgcttctagggaagaaatgatggaagctttgaacggtccaaacgtcgacttggataaagtcatcgcggaaaaggacgttttcacctggaatcatttggactatactattccatacgatggtgctacaagacagttattgtcagatgtttttggttatgttaaaccaggtaagatgacagccttaatgggtgagtctggtgctggtaaaactacgctgctgaatgttttggctcaaagaatcaatatgggtgttattactggtgatatgtttgtcaatgccaaaccattgcctgcctcattcaatagatcatgcggttacgtcgcacaagccgataaccatatggctgaactgtccgttagagaatccttgaggtttgctgccgaactaagacagcaaagatctgtttcattagaggaaaaatacgaatatgttgaaaaaatcattcttttgctaggtatgcaaaattacgctgaagctttagttggtaaaactggtaggggtttgaatgttgaacagagaaagaagctgtctatcggtgttgaattggttgctaaaccttcattgctgttattcttggatgaacctacttctggtttggactcccaatctgcttggtctattgttcaatttatgagggctttggccgattctggtcaatctattttgtgtactattcatcaaccgtccgccactttgtttgaacaatttgacagattattactgttgaagaagggtggtaaaatggtttacttcggtgatattggtccaaattccgaaacattgctaaagtattttgaacgtcaatccggtatgaaatgtggtgtctctgagaaccctgctgaatatattttgaattgtattggtgctggtgccactgctagtgttaacgctgattggcatgatctatggcttgcctctcccgaatgtgccgcagcaagagccgaagttgaagagttacatcgtgtgttacctggtagacctgtcaatgatgatcctgaattggctacaagatttgctgctaaatacaccactcaaattaagtgcgttttacggagaacttttctgcaattttggagatcacctgtatatattagagccaagttcttcgaatgtgtcgcttgtgctttattcgtcggtttgtcatatgttggtgttaatcattctattggtggtgccactgaagctttctcctctgtcttcatgctgttattgatttctttggctatgatcaatcaacttcatgtcttcgcttttgatagtagagaactatacgaagtcagggaagccgcttctaatactttccactggagtgcgctgttgttatgtcatgctgctgttgaaaacttctggtctaccctctgccaatttttgtgtttcatttgttactactggccagctcaatttagcggtcgcgcatctcatgcaggtttctttttcttcttttatgttttagttttcccattgtattttgtcacgtacggtttgtggattttgtacatgtctcctgatgtgccatctgcttctatgatcaattctaacttatttgctgctatgttattgttctgtggtattttacagccaagacaaaagatgcctgccttctggagaagattgatgtacaacgtatcgccattcacttatgtcgttcaagcattggtcactcccctagttcataataagaaggttgtttgcaatcctcatgaatacaacatcatggatccaccaagcggtcaaacatgtggtgagtttttatctacttatatgaacaacaatacaggctatctggtaaacccatctgctactgaaagctgtgaatattgtccatactctgttcaagatcaggtcgtggagcaatttaatgtcaagtgggatcacagatggagaaactttggttttatgtgggcttacatttgtttcaatgttgctgctatgttattctgctattatattgcaagagttaaggtttggtccttgaagtctgttttgaatttcaagaattggttcaatgggccaagaaaggaaaggcatgaagatgataccaatattttccaaaaggtaccaggtgacgaaagtaaaatcacaaaaaattag

SEQ ID NO: 3363 - DNA, 1341 bp, Saccharomyces pastorianus
atgcatatcctcctgagcaaaaaaatagcacgttttctattgatatcggtcgttttcgtgtttgcactaatggtgactttgaatcacccgaaaacaaagcagatgtctgaacagtatttgacgccatatcttccgccatcgctgtaccctatcgcaaaggttagtgtggaggaacaaagacgtatgcagcaggaagaagaagaagccgaaattaagcaatctctagaggaagcagctattagaaatgccactaacagtgccattaaggaaaaaatcaaatcatatggaggtaatgaaacaacgctagggtacatggttccatcatatatcaaccacagagggtcgccaccaaaagcttgttttgtctcattaatcacagaacaggattccatgacccaaattctactgtccattgatgaagtgcaaggcaagttcaataaggattttgcgtacccgtgggttttcattagtcagggaaagattgacgatacgaagaaggaaatgatttaccaggccatgaccgattccatgaatggtaattctgaagtgatcgacattaaatttgcagaaattcctgaggacgaatggacgtaccctgactggattgatcagaataaagcggcagactcactaattgcactagtaaacatcccagatggtgactctagagccgttagatataaagcaagatatttagccgggtttttctggagacatcccattttggacgagtttgattggtattggagagtggatcctggtatcaagttgtattgtgatatcgggtatgacttattcagatggatgcaggattctgggaaagtattcgggttcacattgagcaggagtgaggctaaggaagccaacgacaagatctgggatactacaaagaaatttggtaaagatttccccaagtttatatcagaaaataatttcaaagccttcattaccgaaaagggctctgacaatttcaacaattgtgaatttacgtcaaattttgaaattggaaatttgaacttttatagatcacctgcgtataaaaaatttttcgaatatattgacaaagaaggtggtatattttactggaaatggacggaatctattattcatacaattgggttatcgatgttgttgccaaaggataagattcatttcttcgagaatatcggatttcattatggaaagtatgacaattgccccatgaacgatgacatttgggagcaatataaatgtaattgtgatcaaggtaatgattttacctttaaaaaggagtcgtgtggtggacactactttgatattttgaagagggataaacctgaaggatgggatcatgtatcatag

SEQ ID NO: 3364 - DNA, 2574 bp, Saccharomyces pastorianus
atggaccaaaaggaacattcaaagaccttctaccatccttataagccatatgatattcaaatacagttgatggaaactgtatacagggtacttaccgaagggaagaaaatagctatcttggaaagtcccacaggaacaggtaagaccctgtcattaatttgcgccacgatgacttggctgagaatgaataaagcagatattattacccacatggaagctaactctaaaaataaagagaatggaagtgagagtgagagtgatgatgaaccagactgggtcaatgacacgtatagggaatcgctcctgcaagaaaagctgacttcgttaaatgagtacgaaaagcatttgaatgaagttagcgcaactagtcgtaagcaacctaaaacagcgcatgacctaaataaagaaaacagaagatacggtataacaaactcatttaaaaaaagacggagaagtactcagcatgttaatgtatcgcttgaagaacaagatttcatcccacagccttatgagtctgattctgaaacggatgaagttagctcaaagaagggagatctgtctgataaacatcatagattaagtgatttgaattcagaaataaaaacgcttctaaataaaatcgacagcaagactataaaggatctaaacaactacgatcaccttggagtcgtaaaccaaaatccagtgaagatatattttgcgtccaggacttattctcaattgaatcaatttacttcccagctgagattgccctcatttccatcatcgtttatagataaagttcctgatgaaaaggtaaaatatttgccacttgcttcaaaaaagcaactttgcattaatccaaaagtgaaaaaatggaaaacgctggaggctattaatgacgcctgtgcagatcttagacacagcaaagaggggtgtactttttatcagaatacgaatgaatggcgtcacggtcccgatacattggctctcagggatagaatattttccaaaattcaagacattgaagacttagttccactgggagagtctctagaaatatgtccatattacgcatccagagaagctcttcctattgcagaagtcgtaactttgccatatcaatatctactttccgaatctacgcgttcgagtcttcaaataaatcttcaagacgctatagtggttattgatgaagctcacaatttgatagaaacgataaattccatatattcttcagaagtctcattagttgatttgaaaaactgtcataagggaatagtaatatattttaacaagttcaaaactaggctcaaccccggtaaccgggtgaacctattgaaactaaattcgcttttaatgacgctaattcagtttataactaaaaattttaaaaaggtagggcaggaaatagacccaaatcatatgttcgcgggaagtaatattgatacgctcaatattcataagctattaagatatataagagtatccaagattgcttacaaaattgatacgtacatccaggctctaaaagacgcagaagtgctaaaaagtgaaagattaacaaaagaggcggataagccggtatcttctcaaccactgcttttcaaggtctctcagtttttatcttgtttgacaaatttgacgtcggaaggccagtttttctttgagaagagttacacgataaaatacatgcttttagagccaagtaaatcttttgaatcgatagtagatcaagctaaatgtgtgctcctggcaggagggacaatggagcctgtcactgactttttgaccaacttgtttcccgaaatccctacagaaaaaattacaaccttttcatgcaaccatgtcataccgaaagaaaacttgcaaacttacattacaaatcaaccagagcttgaatttacatttgaaaaaagaatgtctattcctcttataaacgatcatttatttcaatttcttattgacttaagtagagcagttccccaaaagggtggtatagtggcatttttttcaagttaccagtatttggcacatgtcatagaatgctggaaacaaaacgacaggttcgcgaagttaaatagggtgaggcaagttttttacgagtcaaaggatagcgacgatatactagctgggtattctgactcagtagcggagggcagaggatctattttatttgctattgttggtgggaagctttctgaaggaataaactttcaagataatttatgcagagctgtggtgatggttggcttgccgttcccaaatatctttagtggggaattaatagttaaaagaaagcacttgacggagaaaataatgaaatcaggcgggacaaaggaggaagcttcgcatgcggcgagagagtttatggaaaatatctgtatgaaagctgttaatcagagcgttggccgtgctatacggcacgcaaatgactatgcaaatatctatctacttgacgtacgatatggtaggtccaactttcgggacaaactgtcacattgggtccgggattcgatcaaatccgaacacttaactcgccaagttatcccatccacaaaggcattttttgcagctcacggcacgaatttatag

SEQ ID NO: 3365 - DNA, 1557 bp, Saccharomyces pastorianus
atgtttctagctaaaaacctaaaaaataaaagaattgcggtatatttgccaaaagagatatcttttgtccaaagacatttttttaatacagcaagttcacaaactaatgaaaggccgaaggcagacatagttttgagggatatcgcaacgtatgttcatgaaactcctataacgtcaactttggctttgaatactgctaaattatgtttccttgacacccttggttgtggcttagcggctttaaagtttgagcaagctcgaaacattatcaaaccaattgtagaagatacgatcgttcccaatggaaccaaaatattagggacatcctatgtgatggaccctgtaaggggagcatttgccatcggtactttgatacgctggttggattacaatgactgttggttagctgctgaatggggacatccatctgataaccttggaggaattttagctgttgcggattacttgaccagattaaatagatctactcatggaaaaaacgggaaagaatttcttgtgaaagacgtattggaagcaatggttaaagctcatgaaattcaaggtataatagcacttgaaaattctttcaacaaagtaggtttggaccatgtagtgttggtaaaagtagcaacaactgctgttgtttccaaaatgctgggtttgagccaggagcaaactactgaagcactatcacaagcatttgtagatgggcagtcattgcgcacttatcgacacgcaccgaataccggatctaggaaatcatgggcggccggtgatgcggtctcaagggccgtgaatttggcttatttagtcaagaacgctagtgttggtactataccttctattttgacagccaaaacttggggattctatgacgttttattcaagggcaaacctttcacctttcatcaaagatcagcatatggttcttacgttatggaaaatgtcctatttaagatatcgtttccagcagaatttcatgcacaaactgctgttgaggctgctgtgaaagcgtataacatccttagcgaacaagggaaaacattcagagatattaaatctatcagaattagaactcaggaggcggcaatgaggattatagataaatcaggcccgttatataattatgcggacagagatcattgtattcaatacatgactgcaattccgttaataaccggcaatctcacagctaccgattattcaaacgaggttgcaaagaatcctgagattgataacttgaggtcgaaaatgtattgcgttgaggatatccaattttcccaaggttatcaagatcctactaaaagatcaataggcaatgcgctactcatagaactaaatgacgggtctcagttagaagaaattgttgtagagtaccctgttggccataaatttagaagagaggaaggaataccactattactcaataaatttgaaagacatttgcgtgaacattttaccgcttctcctgaaaaggttgacattatcatgaaggtaagttcaaaaatagattttgtggacatgccaatcgactcctatatgaatttgttcgtttaa

SEQ ID NO: 3366 - DNA, 1029 bp, Saccharomyces pastorianus
atgtttagatcactgattaccggtttgccaaaagttagtaagaggcatctctttcagagaaattacgcatctactttagctttcattgaaagttcgaaagatggttcagtctcaagatcctcattaagtcttttggctgcagcacagaagctatctaatcctattacagccgtgatcacgggtagccaagctgggaagaccgctcaagcgttgaagtcttccttttcctgcaacagtttggaaaagctcatcatatttgaggattctaagttagacacctgtctacccgaagaattaactccgttgttagtgaagttgttaaaaggcaatgactactcgcatttcgttgtctcaaactcctcggtcgggaaaaatgtgttgcctcgtgtgggtgcactattggatattcaacccgtttgtgatgtcactgtaattaaagctcctaagacttttgttaggccaatttatgccggaaacattatttcaacaatagagtgtccggcagagaagaaaatattgagcattagaacctcttcatttgcaccaattccagagggaagtacggactctgttgcgatcgagaaaggaactgatatccccccttgtgatttggacgtcacctgggttaaaaccatcgttactaagagcgaaaggcctgaacttacttctgcgttgaatgtggtaactggtggaagagcgctcaaggataaggacacatttgataaattactctccccattagctgacgttttgcatgctgctataggtgctacaagagcttccgttgataacgggttatgcgataattctctacaaatcggccagaccggtaaggtgattgcaccaaatttgtatatagccgttggtgtctccggcgctgtccaacatttagcggggatgaaggactcaaaagttatagtcgccatcaacaatgatcctgacgctcctatctttaacgtggctgactatgggttacaaggagatctttacaagattgttcctgaactgactgaaaagcttcgtaactaa

SEQ ID NO: 3367 - DNA, 861 bp, Saccharomyces pastorianus
atgaaggagatgtatttgaaagcgttgggattgcacgattacacccttaaaaatctaatgtacgaaaataacttctgcaagttttacgatgctgtcgatgaaaatgacacttcgtatgttttgaagtttattccctcgaatacgcaatcagatgaggatccttttccattcatagactgctttcaggttgaggagggcatgttttttgtatatgcttcaaacaactttgcaaaagaaggcccagattactttacgtatggtagtagtagtagtagtagtagtagtgaggagaatatcagtattccaagtacacagagtaaattgcaatttatcgaaataaggcatccaaaacaccaaaaactagacgtaaaagaacagagaaagaaagacgcaactactgaccatttgggtaaaaagacgccaaacccggacgctcgaagcattaaagaacagaagagagaggtacacactaaaaaagtgaaaatcgaaagtaataagactgattcggcaaagatacgaagtgaattcatttgtcctattaaaacaaactatgcgctaggattgccatctatactgtcaaaagaaaatatcacgtacccgagtaaggtacatgaaaaacatattagtatcgtgaatccttccctacaaatatatcactcctcccataaacagatcgtcaaaacgcctgtccctaagagtggccgttctccggtagaaaagttttcttttaacgatttcaaatgctattctccaagacctctaaagcataaaagttctgagtgtgatgttaagaataatattgagctgagattactgcaaagttcaatgttgcagaggagacagttagcacactcgaaatag

SEQ ID NO: 3368 - DNA, 2706 bp, Saccharomyces pastorianus
atggagcaaattaattcgaatagtgggaaaaaaaagcagcaattggaagtattcaaacaatttgcgagtgtgttaacaaaagagggcacacctgttagtattgctaatgataagtctgaacgaaccacagtgaactacaataactttgaaatagcaagtaggaaacccaggatggacaaagttacaggagaaccaattctaacatatgatgatttcattgaattgatatctagctcaaagagtatatacccgaagttcacagaccattcatttaatttgaatcaagtacctaaaaacgcgtttggatgtattttctttgctattgacgaacaaaataaaggatatttgacacttaacgattggttttacttcaacaatttattagaatacgataattatcatcttatcattctctatgaattctttagaaaatttgatgtagagaacatcaaagcaaaacagaagagaaagtttggtaattcctctttcagtttaaaggcggcagatgacaggatcaagtcaatcaattatggaaatagattcttaagtttcgatgagcttcttttaaatcttgaccagttcaaagataccattcgactgctgcatgagtcgattgacgatgattttgttaaggaaaataatttgctactcgactgggaaaacttccgatttttgaagttctataaatgttatcatgaaaatgaagcattcttaagtttaaattccctagtgacgattttacagaacgatctgaaaaacgaaaaaatatttataggatttgatagattagcacaaatggactcccaaggacatcgtttagctttaagcaaaaatcagctcatatatcttttgagattgttttattctcatagagtttctgcggatattttctcctctttgaatttgtcaaatacgaaattattaaaagcagataataattccataccatacaatgtgttcaaggatgtgttttatttatttcaaaatttcgatttactgaatcaaatattgcacaaatatgttactgaaaacaatttaaccgagcaagatattagagaacagataattacgaaaagggactttatgacagttttgaatgcccagtatagcaaggtaaacaacatcgttgagttttccccatcccagatcaacttgttattttctatcgttgcaaattcaaaggaaaacagaagattaaggaagaaaagtaagcgagacaacgagcttcttaacgaccatcattacgattcagatattgattttttcattcacaacgaatatttacatggagtaagcaaatcaagaaaaaacttgcaaagttttaatgactactaccacgatctgtcagatggcttttcccaggactctggggtcaaaaaagcttctaaagcaagtactggtctatttgaatcggtattcggaggaaaaagggataaagcaactatgcgctctgatttaacgattgaagatttcatgaaaattttgaatccaaattacttgaacgacttagttcaccaaatggaattgcgaaaaaatcaaaacgaatcactttatgttaactattatttttatccaattttcgattcgttatacaatttttctttgggctccattgcaggctgcatcggggcaactatagtatatccaatagacttcgtaaaaacaagaatgcaagctcaaagatcattatcccaatacaaaaactcaattgactgtcttttaaagactgtatctcgtgaaggaataaaaggcctttactctggtcttggacctcaattgattggggtggctcctgaaaaagcgattaagttgaccgtcaatgactttttgagaaacaggttgaccgataaaaacggtagattaagtcttctacctgaaattatatcaggtgcttcggcaggcgcatgccaagttatattcacgaatcctttagaaatcgtaaagattcggttacaggttcaatctgattatgtgggtgaaaacatacagcaggctaatgaaacagcggttcaaattgttagaaaattgggtttgaaaggcttgtatagtggtgtggcagcttgcttgatgagagatgtcccattttctgctatttattttcctacttatgcacatttaaaaaaagatcttttcgattttgatccaaatgataagacaaagagaaatagattaaaaacgtgggaacttttaactgctggtgccattgctggtatgcccgcagcctttttgactacgccctttgatgtcataaaaactagattacaaatagatccacgaaaaggtgagacgagatacaacggtattctccacgctattcgtatcatcctgaaggaagaaagtttcaaaagtttttttaaaggcggaggagctcgtgtcttgagaagttctcctcaatttgggttcacattggccgcttatgaactgttcaagggctttattccttcccctgatgataaaatgaagtccagagggaataacaagaaattcattataggcgacaatacagagaataaaaaaataacagccaataatgataatgagctcccactgcagaagctctattcccgtgacaggaagcatgccaactattactataaaagctgtcaaattgccaaaacatttattgacctagacaataacttttctagatttgacccttcagtttacaagaagtttcaagagtatttaagagatattagtaaatag

SEQ ID NO: 3369 - DNA, 1173 bp, Saccharomyces pastorianus
atgactgatgttcaggtaattgaagaaaatgctgccaacgctgttactgcggaagtagtagaaaaagacaaagaagccccagctaaaccgcctgcggagaacaataagccaccgaattataaaagaatatcagatgatgatctctatagacactcgtcgcagtacaggatgtggtcgtatactaaggagcagcttgaggagaagagggtggacacaaattctcgagcggtagcctctattgaggaagatttattaaaattcagagaagctcacaatctaatagaagaagaggtaaaaattctagaagcaaaggctattcccctgacaatggaagaggagttgagtttggtgaatttctacgcgaagaaagttcaagtaatagcccagcatttaaatttgcccactgaagtggtggccacctcgatatcattttttaggcggtttttcttagaaaactcggttatgcacattgatcctaaaagtattgtccacactacaattttcttagcttgtaaatcggagaactatttcattagtgtagattcctttgctcaaaaggccaaatcaacaagagaaagtatcattaaatatgagttcaaattactagagtcgttaaagttttcattgttaaaccatcatccttacaaaccgctgcatggcttttttctagatattcaaaacgtcctttacggtaaggtggacttaaattatatgggccaaatttatgatagatgtaagaaaaggataactggcgcattgttaaccgacgcagtgtatttatatacccctccccaaataacattagcaacactgctaatagaggatgaagccttggtgacgaggtacctcgaaatgaaatttcctagtgacgaaaaaatccaggaagaagaaccaaccgaaaataaagaggctcaaaacgacggcagcaaggtagagaaagatgaggaccaaggcattgaagatgataagacttcaatagattcggcaaaactgctagcggtcataatggcgtgcaaggaacttatcgaggaaacagcgcctttgagtactgaagacgccaagagaatcgcagcaaagaattattactgccaaaatccatcaagcctaattcagaaactaaagagaaagatgaacgaagacacttccgctcctgaaaaaaggcaaaaaatataa

SEQ ID NO: 3370 - DNA, 3642 bp, Saccharomyces pastorianus
atgatgaaaagaataagatttccttggtccgatgaggaggcttcctattccaatctcaacaattctcctagcttgagaaataaaaagagtggtaataattacatccgctccaaatattattacacttttacgagatttgacttaatcaattcaatcttactatcggtgatgctatttttgttagctatcctcattactgcattatatttcacaaggaactctaggcagtcgatttcgcatgcttcgagagccattctgtttaatcctctaggagttatatcacagtcacttggaaatcatacattgaactatgacccagaagccagagagtcctccaaaaagctgtacgaacttctttccgatttcaatacggcatactatgatgacgataacatgattttaggtaccaacctgttttcgcagaatacatattcgagacagccgtatgttgctaacggttatataggtagccgtattcccaatattgggtttgggtacgcattagacactctaaacttttatacagatgctccaggcgctttggataacggttggcccttgagaaatcacaggtatgctggtgcgtttgtatcagacttttactgtctagaagcaaaattaaactccacaaacttccccgaattggatgacgtgggatactcctccgtcatttcctctattcctcaatggaccaatctacagttctccttagtgaatacttctcaatggttcaacccgcaaaatgttacattggatgacgtaactaactatagtcaaaatttgtcaatgaaggatggtattgtaaccacagagctagactggttagatagccaaatacacgtcaaaagcgaaatttgggcacatagaaatatccatccgttaggagtggtttctttggaagtttctttaaatatggaccacttacctgctgattttgattcattagagatcaatatatgggacatactcgatttcgactcatcccacaggacagttctacaggagttgggaacagatgaaaagaacaacgctgttttcatggttgttcagccagacaatgtgccatcctctaattgtgccatttattctgcgtgtactgtgaagtttgaaaattctacagagtcaatcaatgctggtcaatcatttgaagataacgacagccatacatcatcaaatgtctatcatgttatattaacagagggtcaacccaaaataatcgttcataaatatgtcggtataatgtctagtgaattcaacaggaacaaagagcagcaaaacgatactaacgttgaccttgctaaaatgatagcactcaacagcaaaggcaattaccaacagcttctgtcaagtcacaagcgtgcgtggtatgacctttataatgatgcatttattgagattccttctgacagtcttctggaaatgactgcgaggtcttccctgttccacctgctagcaaacacaaggaactacaatgtttcaagcgatagaggactgccagtgggggtgtctggcttatcttcagattcttatggtggtatggtgttttgggatgcagatatatggatgcaaccagccctattgcccttttttcccaatgtcgctcaaaatatgaacaattacagaaattccactcatgcccaggcaattttgaacgcagagcaatatggttatccaggagctatatatccttggacatctggaaaatttgctaattgtacttcgacggggccctgcgttgattacgaatatcatatcaatgtcgatgttgcaatggcttccttttcgatatatctgaatggccatgagggaattgacgacgagtatttgagatatactacgtggccaattatcaagaatgcagctcaatttttcactgcctacgtcaaatacaattcttctttggggatgtatgaaacatacaacttaacagaccctgatgagtttgcaaatcacgtaaataatggtgcgttcactaacgctggaattaaaacgcttttgaagtgggcaacagacgttggcaaccatcttggcgaggtcattgatcccaaatggagcgaaatttctaaagatatatacatcccaagatcttcgtctaatattactttagaatactctggaatgaatagttcagtggagattaaacaggcagatgtgaccttaatggtttatccactcgggtatatcaatgatgaatcgatcctgaacaatgcaatcaaagatctttattactactcggaaaggcaatctgcatccggacccgcaatgacgtatcctgtttttgctgctgctgctgccagtctactgaatcatggctcttcctctcagagctatttgtacaagtcggtccttccatatttaagggctccgtttgctcaatttagtgagcaatccgacgacaacttcttaaccaatgggttaactcagccagctttcccctttttgacagccaatggtggattcctacaaagcatcttgtttgggctaacaggtatcagatactcttatgaagtggatcctgacactaagaaaattaaccgtttgttaaggttcaatcccatagagttacccttgctgcctggaggtattgctattagaaattttaagtacatgaatcaagtccttgatattataattgatgatcataatggcacaattgttcataaatcaggggatgttccgatacatataaagatacctaacagatctttaatacacgaccaggacattaacttttataatggttctgaaagtacaaaaaaggcaaagttagagcgtcgagggctcgaccgtgttggtgaaccaatgcggatggatcgctatggtacctattatattttaaacccaaatcaagagctcacggttcagttatttaaacctggtttaaatgcagaaaataacatagcagaaaataaacaagtaacaaatttaacagcaggcgttcctggtgacgttgcattttctgctttggatgggaataactacacacattggcagccattagagaaaactcaacgcgctaagctattgatcgatttaggtgaatataaggagaaagagattaccaagggaatgattctttggggccaacggcccgcaagaaatatttcgatttctatcttgcctcattccgaaaaaattgaaaacatttttgctaatgtgacagaaattatgcaaaacccggggaataaccaaattcttaatcaaacaattggccaacttctagatgatgctggagtaccggtcgagaatgttattgatttgagcgacattgaaccggaggatgaagaatcttttggtgaagttcaagccttattacattggaagaaagaggacttggcgaagctaatcgagcagatacctagactaaactttttgaaaagaaaatttgtcaaaattcttgataacatgcctgtgaacccaagtgagccatattacgaatcaagtcgtaaccaatcgctgattgagatattgcccagtaatagaacaacttttactattgattacgataggttacaagtgggcgataaaggaaatacagagtggaggaaggcgagatatatagttgtggcagtacaaggagtgtacgatgacgatgatgatagcaagggagctacgatcaaggaaatcgtgctcaacagttga

SEQ ID NO: 3371 - DNA, 834 bp, Saccharomyces pastorianus
atggttgctatttacaaagtagttgcttcttttgttccactcctaggtttcattttagcgttcgaagaagatgacatgataaatacgattactgcaatcgaaattgcctttgaaacggtcacaatgacttcaaccgtacctgcccctgctgctacaaaatccgttagtgagaaaatgttggatgacactaaactgtctctacaagtaattcaaactatggtgtcgtgtttctccgtgggtgagaacccagctaatatgatttcttgtggactaggtgttgtaattctaatgttcacaattatcatcgagctcatcaacaagctcgaaaatgacggcatcaatgaaccgcaaaagttatctgacttaataaaaccaaagtatattgaattaccttcgagttatgttaacaagaaaataaaaaatacttttgaacctttggatatatatttaggagtaaactccaacacattagcagatagtcaaaatcaaaactgtctgattctcaaactcggcggggaatcagttttaccattccctggcttggctcaaaaaatatgctatacgaaaggcgttgcaaaagagttcacagactatagtttatccagtatacacgacaatttcagtgaaatcagacaagggatctccaatgacgttttccaaaaaatatcaactattaagaaaatgtctagagatttaaagtctcaactttattacatctcggaaactatcacagacgaaagttgggatggttctgctattggctttaaagccagtgaaagagaaaaagatccaaaaaaatctcaattatccgtcacattttatagagatcaataa

SEQ ID NO: 3372 - DNA, 2244 bp, Saccharomyces pastorianus
atgaatagagggtcagtagatgatgggcccaaactacgtgaagaaaagcatttccaggatttttatccagaccttaataccgatactttactgccgttcattgttcccttaggcgaaacaaataatgacaacaccattgacagtttaaatgatatccctaacttcaaagacagaaaaaacgagaatgctaagagcgtgcagacaaaagagttgatcttcaaggggaaagttactattgaaccattactattgaaaaaaaatgaagtggagtttcaaaaatgtaaactttcggcaaataatttggatgttaaaaaggcttcgtacattcctaggcccaatgacaattttatctccaaatattaccacatgaataggccaagaggtagaaaagctcataggttacagaaattagaatttgatgagttagaaacgccttatttcactaagttttctggtggaaaagtcacaagcagtaccgattcgacgcctttgaagaatgcaatccaaaaatttggtgaaatttcatccaatttggcgaatttcaagccgcagtatgatatggatgagcaagatgaattatatttacattacttaaacaagaaatattttaaagatcaaatgtctcatgaagtatttgaaatcttaatgaccatactagaaattgaatggcttcatattgaaaagcatatacctacaactaatacccttattgcaagacacaacgttttaagagattgccaaaattttgaactttatggttctgatgatgggacaggcttatctatggatcaagcatgcgcagtttgcttaggtacagacagcgataactctaatacaatcgttttttgcgatggatgtgatattgcagtgcatcaagaatgttatggtataatctttattccagaaggtaagtggttgtgtagacgatgtttgatctcgaagaataattgcgttacttgcctaatgtgtccaagtcacacaggtgccttcaagcaaacggacaccggttcctgggtacataatatttgtgcattatggcttccagagctatatttttcaaatttacattatatggaacccatagaaggtcttcagaatgtcagtatatcccgttggaaacttaattgctacatctgtaagaagaaaatgggtgcttgcatccaatgctttcagaagaattgttttacagcataccatgttacatgtgcccgtcgagctggtctctacatgagtaaagggaaatgtactattcaagaattagcaataaatcaatctccgcaagagtactcaatcgagagtttttgccacaagcatgcacctaggggatggaaatctgacatggaaggtattactaaaacaaggaaatatttctttctactttcgaaatttctaactgaaacaccccggtacaatagaacacaagatgactcaaaatttaagaaaacagtttggaaaacgtctagtcagacgcctgtggcgccgtacgtttttgcagaattactacaaaaggctcttgatttttttgatttggccaaccctccatcggcttcattggatatttgcagatattggtcgatgaaaagagagtttacgggaggtactccattgattacctcttctgaaaacaatccgtttggctcactgactgaggagcaactacaaacaagaatggattttgccgatgatcaactcaaagacttacacagactgaaagaactgaccagtttggtgaagaaacgggcacaaacctcgacaactatgtgcaaaactcaaaagaagatttgtgacataattgaatctccgcaaaaatatcttctgaaatatagtgtgttagatatttttgtcaaatcagaacaatttaaagctttggaaagacttgtcactgagcctaaattaatcgttattttggaaaagtgtaagaacaacagctatgataccgtccaacactttaagacagaaattacgtattttttctctactttagaaaaccttcctaacacaccaagaatacttcaaacaattttgttcagggcgaaagagcaagtgtcaaatttgactgagcccatagagcatatgaatatgaaaaagttactagccagagattttataataactgacggaaatcaagtagaagaaaggccttggagtgggccagtgatcatggaggaagaagaactaagtgatgcggaagaacttagtgcaggtgagcgtcgcgtactgaaactcatcctcaataacaagtga

SEQ ID NO: 3373 - DNA, 1221 bp, Saccharomyces pastorianus
atgtccgttaacatttgtagagacaaccatgatccattctaccgttataaaatgcctccaatccaggccaaggtggaaggtagaggtaacggtatcaaaacagcaattctgaacgtggctgacatcgcccatgcgttgaacagacctgctccatacatcgtcaagtacttcggtttcgaactgggtgctcaaacttctatttccgtcgacaaagatcgttatttggttaacggtgttcacgaacctgctaagttgcaagacgtgttggatggattcatcaacaggtttgttctttgtggaagttgtaagaatccagaaaccgagatcataatcaccagggatagcgatttggtcagagactgtaaggcttgtggtaagagaactccaatggacttgagacacaaactatcgtctttcattttgaagaacccacctgattccgtttccggctccaagaagaagaagaaggcagccacagcttccgccaatgtccgtggtggtgggctatccattagtgatattgctcaaggtaaatctcaaaacgctccttcggatggcactggttccactccacaacatcatgacgaggatgaagatgagttgtcgcgtcaaattaaggccgctgcttccactttagaaaatatcgaagtcaaagatgacgaatgggccgttgatatgtctgaagaagccatcagagctcgtgccaaagaactagaagctaactctgaactcagccaattagatgaatacggtgaatggatcttaaaccaagctggtgaagacaaggaaaaccttccatctgacgtggaactatataagaaggccgctgaactagatattttgaacgatccaaaaattggttgtgtcttggcccaatgtctttttgatgaagatatcgtaaacgaagtcgctgaacacaatgcatttttcactaaagttttggtctctccggaatacgagagaaactttttgggtggtattgaaagattcttaggtttagaacacaaggacttaattccaacattacccaaaattttggttcagttatacaacaatgacatcatttcagaagaggaaatcatgagatttggtaccaaaacatccaagaaattcgtacctaaggaaatatccaagaaggttcgtagagctgcgaaaccattcattacatggttggaaaccgctgaaagtgacgatgatgacgaggaagaagacaatgaatag

SEQ ID NO: 3374 - DNA, 528 bp, Saccharomyces pastorianus
atggaaatagtgtacaaaccattggacatacgcaacgaagagcagtttgcaagcatcaagaagctgatagacgcggacttatcagagccgtattcgatatatgtatataggtatttcttaaaccaatggcctgaattgacgtacattgctgtggacgtcaagagtagcacacctagtgcaccaatcgggtgcattgtgtgcaagacggatccgcacaggaacgtcagacagagaggatacatagggatgcttgccgtggaatccacgtaccgtggtcatggcatagcgaagacgctggtagagattgcgatcgacaagatgcagagagctcactgcgacgagattatgctagagacagaggtagaaaatgtggcggcgctgaacctgtatgaagggatggggttcattaggatgaaacggatgttccggtactacctgaacgaaggagacgccttcaagttgatcctgcccttaactgagaggagctgcacccggtccacgttcctaatgcatggccagatggcctag

SEQ ID NO: 3375 - DNA, 1029 bp, Saccharomyces pastorianus
atgaagaaaggagagagtcaagcacctgatgctatttttggccaatctcgtgcatttgcgttatcagactcttcagtaaatcctgatgtcattagatatcttaacgatgtaagagaacaagcattaagaaccaacgccatatcgattagtagtcaagtgaatctccagaagaggacacgacacaaatcgagcatgtacgacgatgaggatgaagaggtcaccaataagcgcattgtctcgccacctttaatcagacttcaaaagaacgcagatatgttggtaaagtggttcaattccgcaaaatatgtggttttgaacaatgcttacgagtttacgggttatgatgacgagacgttgaatcatttactattctgtctgatgaattatttaaaagacgtaccgtgcaagaattctaaagttgaaaaaattattaatgttttaaatgagcatacctttccagaaaatgaggaaaatacggaacagaaactagagttcgatgaagaatgggcgaagagtatcttggtacgactggggaaggcaaatattaataattatgaggatatcaaaaggataatcgcagaaggcgatacgcatacacttagcgggtacaaccaatggttcaaatatattataggtaatgacccacgacacactatgttttgtgagaagatcacatccaaagaactttgggttctcatgaaatttatgtcaaatacttggataaaagaaatctataaaaaaggaacaaaccaccgccgtttccaagattggctattttatctactgatacacacacctgaaaggcttacggcggagtgcacgagcacgttgagagacctgggtaagaaatgccgtgaattgattctaaagaagcccgttcaggctcacaatgatgataaaatcactcttccgatggagatgaaggagttagatgtaacggtaccacctgcgttggagaacatggcaataatcgaattagccatctgtatcatagctgttaactatgggcaaaaagacttattaacataa

SEQ ID NO: 3376 - DNA, 1122 bp, Saccharomyces pastorianus
atgcaaacagtttcgggaatcctaccaacaacattaagtccatccgagcttaaatctgatgatgaaagaactttccagtttgacgaagagaccgaggtggcaaagcttgtggacgaaagtgaagatttacgaagactgattaacaagactacccagctgggtatcaaagtcgaccatattcacagcaaaacagatcaagagattgccaggttggaaaaagtgatcgaagaggttgctaaaaatgatagtctctttaggtcttgttctagtaagctcaagcgaaagaatgcgtgtaaacatgcttcagacagtgaaagcagtacgaacactcaactgaagagcctttctcacttgcatggccgtcacgaccatgattggaagcaaaagttaaatagatggttccgaaagaataaaagtaaatttgccatacgatcggccagcgatctgaaaatgacagatgtagataacctgtttcactcgcagactagatttgtagaagatagcaagtcgccatactttagtgaaacagatggctatatgaacggtttggacatcatatcaccattaaccccggatgatctcgacgataatgaaaagtgtgttaaactcgatgaacctagtcaagcatgtcccaattcagacctgaagaagacttcatcaagtcccacatttggaaaccatgcaaacaatgagctggtcgtgaatggtacagagagtatcgttagtgaacctcccttgcaagaaagtaaaaagatcattctaaaatatcgaagcgttagaacatctcttagcgccataggttctgcgaaagcaacctccaaaaacaatagcagtgtgtttcgcatcttccacaaaagctcaggccttattgacaaaaatcaagaagacgtgccacgaatgtgggatgtggtcagaaataacttggagaaagaggtttttcttttacaagaaagattcaaaaggtggacttcaaagcacaaagatactggaaagactcaagtccttaacagcaactgtgtaaccatccctttatcactatccgaatcggggccaggaacacagtcggaatctggattctgttccatgcttgggtcagaagccctgcttcaagtacaagcttga

SEQ ID NO: 3377 - DNA, 1845 bp, Saccharomyces pastorianus
atgacttctttaggcagggataagctagaaagtacgttgagaaaaaggtttttctacacgccatctttcgagatatatggcggtgtgtcaggtttattcgacctaggtcctcctggttgtcagttgcagaataacgtagttcagctgtggcgagaacattttatagtggaggaagacatgttacagattgacgggccaatgctaaccccctacgatgttttagacgcttccggtcatgttgataaatttacagattggatgtgccgaaatccgaagactaaagattactatagggctgaccatttgattgaacagacgttaaagaaaagactactcgacaaggatgttgatccactggaccataagcgtatggaggatgcattggccacaattgatggatttacgggttccgacttggttcgtactatgcaagaatataggatcaacgatccagtcactaacgatgttttagatgcaccgactccattcaatttgatgttccagacaaatatcggggcatcgggtcagtcgaaagcatttttacgaccagaaactgctcagggacaatttctaaatttcaacaaattgttagatattaatcaaggtaaaattccgtttgcctctgcttcaattgggaaatcgtttaggaatgaaatatcgcccaggagtggattactgagagcgagagagtttttaatggcagaaattgagcatttcgttgacccgttggacaagtcgcatccaaaattcgatgaagtgtcagatgaggaggtaccattactatcacgccaattgcaagaaagtgatgaacctcacctacccgttagaatggctattggagaagcagtaaaaaccggaaaagtagaaaatgaaactctgggatactatatggcaagggttcatcaatttttgttgaggcttggggtcaacaagaacaaatttagattccgtcaacatatgaaaaacgaaatggcacactatgccactgattgttgggacggtgagttattgacctcatatggatggattgaatgcataggctgtgctgacagagctgtattcgatttgacagtgcattccaaaaagacagggaaaagtttgacggtgaagcagaaactaaacactccaaaggaacgaaccaagttggttttagaagtaaataagaaacttttcggacggaaattcaaacagagggcaaaattgatcgaatccgctctattaagtttatcacaagataagctgtacaataagcatgaagaactgaataagaacggtaaacttaccttccaaacaaatggtgagaccgtggaaattgaccagaacttggtttctattgaaatgaagacaactttacagcatacaagagagtacatccccaacgtcattgagccctcatttggtttgggtcgtattatttactgcatatttgaccattgctttcggacaaggctggatgatgacgaaagaacttatttctcattcccgttatcggtagcaccaatcaaggtttttattacaacaatatcaaataacgagaaattccctagtgtgatgtcgcaaattgtgcgcacaaaagaaatatatttcaaagtcgatgattctaatacatcaattggtaaaaaatatgcacgtaacgatgagttgggtacgccctttggcatcaccatagattttcaaactttgcaagatgaaactgtaactctgagagaaagggattctatgagacaagtaagagggaccgttgaagaagttatttcggtaatcgacaagatggttcatgaccctataaacgaattcacgtggaacaagtccacagcaggattactgcaggtagcagtaccctga

SEQ ID NO: 3378 - DNA, 2283 bp, Saccharomyces pastorianus
atgactagcttgaaggtgtttttcgccgtctacttgctaggtggtatcacgtttttgcccttggtccttttcaccgcttataaagtccatttattgtacagtaactttaaatccgcattagaagaagaggaagatcgtgatgataaagataggctattgactcgcggcatacgcccggatttcaaagctggtaagctagaagagctgtccggtgtaaaagtagttaacaagggctggatcactttgactaagcaatattactaccattcttcagaggtggccataattctgaaaaattctaacaacaacaaggattctgatgttgttcagcaagaacagatcttgcaaagaacagaactgaaaaaaaagcaacgattcttcgcggtgctaagacacggtaatctgtttttatacaaagatgacactcagaatgcaaatctggttcatgccatatctttacaggataaattcgtaaccatttggccccgttacgatgaaacgggtaaaaatgaactacccgatgcttcccttttcacaaagagaacctgtattgccgtcttcaaaaacgacctcgtttccatagattccaaaaaccataatgtcatcttgccgcatttcgacccacttaccagtgtggaatcgaacaatggggatatatccaacaacgatgccacacacgaaaatcagtcaccgtttcataactcgaatcagttcttcttgtatttcgaaaataacatggataaggaaaattggtattaccaattgatcaatacctcgaaaaacaataatactgccccaaccaatttgctgaaccctaatgtttctgccaacaccgcccatttaaaaaccaaagatatgttgcaactgattcaagacatcaactctactgagaaccaattgactactaaatggttaaatgctctccttggtaggctttttctttcctggcaacaaactgacagcttaaatcaacatattcttgaaaaaatcttcaaaaaattaaataaaataaagactccggggtttttagacgatttagtcgttgagaaagttgatgtgggtgacagtgcccccctgttcacatctcctaaactgctagagttgtctccagagggctccactaagttttctattgatgtccaatacaggggaaacctgacaattattatcgctacaaaggcaagtatcaacctagggtctcatttcaagcaaagagaagtttcgttacagctatccataaaaatcaaagaactttccggcccacttttgtttttgatcaaaccgcctccatcaaacagaatttggtatgccttccaaaatgagccaataatggacttcgagattgagccgattgtaagttcgagcaaattgtcgtacaatgtcgttactaatgccatcaaaagcaagtttgctgaagctatgaaggagtccttagttgttccgtttatggatgacattgtcttttacccaactcctaatgaaatctacagaggtggtatttgggaggaacatgactctgaagtaaaagcaaacgtttccgttaccgctgaggctccaggtactaatacaagtgctaaggcgcatttggcagctgttcaagaaaatggaacgaaatcttataggaaaattaaaagagtttcaagaacagaaagaaagaaagaaaagttaaaaggcattgttgacagtacatctgcgatagcggcgaaaacaaccacccagacaacagtcactgcaccaacgaatgacgacgtttccagttctgaaaactccactaaatcaagaaagtatttcaaaaattcaatcaaaaaaattggtaaatggtacaaagacaatgttggaaattcaagtgacactgaagacatagatgatttagacatccaagataggaaggatgatgactctgctgatgaaaaagaaccaggtactcccttactaacttccagccctaaaatgatttcgaatagaaggcctgtacctaggagaccttcacagcaggcgttgaacttaccatcttcaaatgttgaaggcaaaaaggaaacagaaccagaaaatttcccagttccgccttcgtcatcaaatacaaatgcttcagaaatgtttgctaataaagagaataggcaattttctgtatcctcaaaggactctcaaaatgcaccttcaaatggggaatccaaaacctcaaaacttgaaggctctcaagcttttgtcaaaaagacttccccaaatcgcttcaatgacgagtttttcaagcaagatatggaattcgaaaatcaacgagagtag

SEQ ID NO: 3379 - DNA, 879 bp, Saccharomyces pastorianus
atgatggacgattttgaaagtaatactgaagaaaacttatctttaggaaataagcgagtgtatgaactacgaaagaggaacttccaaaggaacttggtaaataacctgagctattttggatatgttctgatattactggaatacattaaattcgatcgtaccgtttggacactcataacaagggcgatagtgcaatcccttataagttcccctttcccgagtgatgctaagttacgtagactagcgaccgctggcggtgacagtaatactacggggatcgcaactcttccaggaggcacgtcgatcaggattcctggaatgttcaccacggaagcgcttgataatcattctaatggaactgaacaacaagacaatgcctctgttatatccataaagaggcaaattaggaaattcttattccatggttgcttatcgctgaacatgctatatattgtttttactattttattcccgatcgattttctggagccattgagtgagtatgttccggtagatagtctcaaaaacactccctcaccgttttcaaattcaaatggtctacttttaggtgagagaaggggtgggttattcttacagatgattggagaacgtttaccaaagagcaacctctctggaaacttcggcctgttaatatttgaatttagcatacttatagtacagttcactttgttttcattaacgtgtgttgtactagccgatttaaattgccaagagccggaaagtgtgcattctgtaaaaagcgatggatatgatgggtctgtagtagttgctcgaataccattaaataaaactttggacactgttttgtacgacggtgataataacgacattgaagagaatccaaacagtgccgtctga

SEQ ID NO: 3380 - DNA, 1239 bp, Saccharomyces pastorianus
atgtcattggaggctataagttttgataggtcgaatcctgaaagggtttcagtaaaggtactggatcaattacttttgccatacactactaaatacattccgattcatacaattgatgagggctactcggttatcaagagcatgcaagtaagaggtgcaccagctattgcgatcgtcggctcattatctgtcttaactgaaatacaactaataaaacatgatccattttccaatgttacaaaactgtataatccaacaaattgggaagctacaagaaaagtgctgaatgaaaggttagattttcttttgagcagcaggccaaccgcggttaatttatcgaactctctagcggaaatcaaaactatattaagatcttcaaatgatctccaagtttttgatcgtgatttatgccgttatacttgtcgattaatagacgaggatttagcaaataatatgaaaatgggtgataatggtgcaaaatatcttttggacgtattagagaaggatgggttcaaggacgaatttgctgttctgacaatttgcaataccggttctttggctacgtctggatatggtactgctttaggtgtcattcgttctttatggaaagattccgtggctaaaactcacgaagcaagtttaggattagataatgaaaagcatgctaaaatggaccacgtattcccattagaaacaaggccttataatcaggggtcaagattaactgcatacgaactggttcatgaaaagattccgtctacattaattacagatagttctattgcgtatagaattataactagttcaactccgattaaggcagcgtttgttggggctgatagaattgtccgtaatggggatacagccaacaaaatcggtaccttgcaactttctgtgatttgtaagcaatttgggattaaattttttgtagttgctccaaaaacaactattgataatgtaacagaaactggtagtgatattattgtggaagagcgtaggcctgaagaatttaaattagtaactggcacagtcgttgatcctgaagatggctctttgattctgaatgaatcaggagagccaatttcagggaaagttggtattgctcctcctgacattgacgtctggaatcctgcctttgatattactccgcacgagtttattgacggaattgtcacagaagaaggtgtatttaccaaaaactctgacggtgagtttgatctgcaacgtctttttaaataa

SEQ ID NO: 3381 - DNA, 1272 bp, Saccharomyces pastorianus
atggagggcaaccaggacaacgagcacggcaccagaggcggttctttgatctataatgaaaatgaaacacaattgagcagtacaaacgtgcggacctctcaagataaaaaaaatgctccgaagatggggagctccagtaaggaacaggtgcaagatgataaaccaagaagggccttgacagatgttccggtaaacaacaatcctttaaaccaagctaagaggatagctataaacaacaaggccgctaaagtacgaagggaagaaaacagtagacctattgttaccgccgtccagaaaagaaagatatacaacgatcataccgcggaggacgatgctgctgtctccatcacaagcaaaagacgcagatttggcgttgaaggagacgacgagatattaggttggaaggctttagattatgttgaaaaaaacgacactgcaatggtggcagagtattcttcggaaatcttcgagtttttgtacaagagagagttagaaacgctaccatctcataattacctgctggacaaaacttccaaatactatttaagaccctccatgagagccatactagtggattggttggtagaggtgcatgaaaaattccaatgctatcctgaaacattgtttctatccatcaacctaatggacagatttttggcccaaaataaagttacaatgaacaaactacaactactagcagtaacctcgcttttcatagcggcaaaattcgaagaagtaaatttgcccaaattagccgagtactcttacatcaccgatggggcagcctccaaaaacgacataaaaaatgcggaaatgtttatgctaacgtcactaggatttaatatcggttggcctaacccgctcaattttttgagaaggatctccaaggcagatgattacattttgactaataggaatactggtaagtttattctagagtatgcttgctgctgccaccaattcattcatcttcccccatctgtcataagtgcaatggctatgtatatagcaagaagaataaccaatagaaacaagaacgaactgtggaaccaaaatctggaacactacagcggcggcattgatcctctacacgataaaacgtttcaatcgtactgtacagatttggtcacagacattgctagttctaaaattcgtttggattctcttactttaaaatacaagaagccaagatatggatcggtctatttccaaacttctaattggtgtaaagctgaagtggacaataatttcccaagtctattcagtttataa

SEQ ID NO: 3382 - DNA, 819 bp, Saccharomyces pastorianus
atggggttagctgaaactaacttccttcgacggaattgtatacttgtagagcttaagttattctacgatacactatacccgcccaaggagttgtattggaaccatcgaataactacagaattgagtaaattctccgatatcaaatatgcaaggccaacgttcgcaattggtaaaggcactttcaagaagacgagtccgaagttggacttgatactggctaccccggatatccacaaactagctacggttttgttcaatctaagagcgttcataatgaataaaagagaggagaaattaactgtaacgatgtgtcaacacggttccggtgtgccaagtaacgagggagaggacaaagatttagaccagaagtactcaagtctattaaacgtgtggggcggcaacgccagagtgcaagactctcctttcactcagctccaacctgataccaacttattatttgccaggagaccagtagattatgctaatactacagaaaatagacgtgtagatttatccagtagagatttctttagactccacgaagagcaacatgagaggaatgaggatgatcgtgctgctgactattcccaatcaccagccgagataagaaaaagcgagtacgggcccaatatgattcaccttgaacctttgttgtaccacagttattcttcattaccaaccaatatgaaactctggctgaatggcgtaaaggatgacaagaagacgttaatggaaattgacgaaaacgcaaccgataaattagatatgttgttacatggtttcaaaggatttccgcaggcacatggcaacaaaaggtaa

SEQ ID NO: 3383 - DNA, 2793 bp, Saccharomyces pastorianus
atggtttcaattattgataaattggtttttgatcttggtggcaaaacattagtttcgctggcacctgacaataacactttatgtgtagctaataaaaatggattaaccaagatcctgaaaacaaataacccagaagaggaaccagagacgttagactcttccaagtcagtctcttcaattagatgctactctaattctaactttttgatgaccacaatgcaaggtgatgcactaaaatataacatcgactctatgcaagaagaattattggctagatttgctctgcccctacgcgattgctgtgtgattcactccggtaagatgggcgtatttggaggagatgatttagagttagttcttttggaattagatgatgctgcgcataagaagcataccgttaaaattgacgaacagatctctcagatatcttacaattcccaaatgaatattttagccgtttcgttgataaatggaaaagtccaacttttttccctaacatccacctcaccaaataaagtccacgaattgaatgattacatagtcgccaattcatatgatgatactcacagagataaaatactttcaaatatgatggatgatttcgacaaagacagcgataacgatctggacgaggcagttgactcgagcgaaaacaatgtcaatgatccagaattttgcgcctttaatcgaatttgtacaagagtggcttggcacccaaagggcctccactttgcattgccatgttctgatgatacagttaaagttttcaccataaaaggctattccttgcaaaagacgttgacgttaaattattctgcagcaaaggcccattttgtcgatttgcaatttgatccattacgtgggacttacatcgcagcaatagacttaaataataaactcactgtatggaattgggagacctccgaagtcttctacaccaaggagtttaagcgaaagcttacaaattttacctggaaagttcaaccagattcgaaaactttggatatcgttttaggtacatggtctggtagcatagtcactgtccaaaatttggctgaatctgttgtttcaaatgtaactgaagattctgtaaacgaatcttcaacaaaacaaggccttttcgtcgactctgattctgacttggaaaatccagaagaagatggtgaggcaagcaaagatgaaaagctattttctgatattgctcaagaagctaattcggaggatgtgttcactcaaaaccatgatgacaatccaagtggattaaacgaaaagagaaaatacaatttcgaagatgaagaagactttattgatgatgatgatggggctggttataccagtggtaagaaaccacatcatgatcatccttattccagaacacaaaaaagtcatccattaccaaccattttggcaaacacggcaaaattccgctataggccgttttctccagctggaacaccgtttggatttactgacagacgttatttaaccatgaatgaagttggatacgtatctactgtcaaaaatagtgagcaatatagcataacagtttccttctttgatgttggccgttttcgcgaatatcatttcgaagatttgtttggttacgacttatgtttcttgaatgaaaagggcactttatttggtcagtccaagactggccagatacaatataggccgcatgacactataaattcaaactggaccaagataattcctctaaaatctggtgagagactaacaagtattgcagctaccccagttcgcattgttgttggtacttctttaggatattttagaagttttaatcaatttggcgttccatttgctattgaaaagacatctccaattgtagcgctaaccgctcaagattacagagttttctcggttcactattcacaatttcatggactttcgtactcattattcgaacaaagccactctatcacaaaatattatcaaagagagcgcccacttcctatgagtttgccaaacgttaatcctgacctgaaacaagaaactaatttcgacttctacaattttaatccgatgggtataaaaagcttgtttttttcaagctatggtgatccatgtattttcggctacgacaacacattgctactgctatctaagtggaggtcatttgaggaaagcaaatggatacctgttcttgacagtaacatggaaatatggaaaatgtcggggggaaaggagactacagatatacacgtatggcctttgagcttgacatatgatacattaaactgtattcttgtcaagggtaaacatatatggccggaatttccccttcctttgccatctgaaatggagattagaatgccagtcctcgtaaaaagtaaactactggaggaaaagaaagctctggtaaacaagaagaatgaattcgaggacaatatagaagaaaacgaaggggaagatgataaagaaataccgattcccattccaatggctgcggaagaagaatatttgcgttctaaagttttgtcagcattgttgacagacacgcttgaaaatgatggtgaactatatggaaatgaaaacgaagtattagcggcattaaatggtgcatacgataaggctttgctacgtttgtttgcatctgcatgctcagaccaaaatgtcgaaaaagccctatcgctggcacatgaactgaaacaagatagagcactcaatgcagctgcaaagatatcagagagagctgaactaacttccctagttaaacgaataaatgacgttagggaagccagatatgaacagcagttaaataatgtgtaa

SEQ ID NO: 3384 - DNA, 2196 bp, Saccharomyces pastorianus
atggattcacttccacgtacgcccacgaaagccagacccacacagcaactttctacaccatctccaaaaaatgatattttgtctatgagaggttacaagagaagaaatacaaccacaccacctccactatacgctctttcgaaaccgcagcaggcagatgttcatagacactcgttggctggccagagccgcatatccatgtccccgaatcgtgatcttttgaaaaattataaaggcacagcaaatttagtttacggaaatcagaaaagtaattctggtgtgacttcattttacaaggaaaatgtcaatgagttgaacaaaacacaagcaattttattcgaaaaaaaggctacgttagatttattgaaagatgagctagcagaaacgagggaaagaattaacggggttaacctcaagttcgagactcttcgtgaagaaaagataaaaattgaacaacaactgaatttgaaaaacaatgaacttatatctatcaaagaggaatttttgtcaaaaaaacagtttatgaatgaaggacatgaaatacatttgaaacagctagcagcgtcaaataaaaaggatttgaagaagatggaacacgactacaagactaagattgaaaaattgaagtttatgaagattaaacaatttgagaatgaaagagctacactactagacaatatagaagagatccgaaataaaatcaccttgaatccttccacgttacaagaaatgctgaacgagtctgaacaaaaacaaggactggagaaagaagaatggcttacagagtaccaaacacaatggaaaaatagtatagaactgaataataaacatatgaaagatattgacaacattaaaaaggaaatcgaaaatgttttaagacctaaactgttagaaaaaaagaggctcttaacagagaagcacaaagagtatgaaacactcaaactgaaagttgaagaaaagaaagaagaaactacaaagctaaggaatgaagtggcttcaaaagaaaaggctaaccgggaaactttagaaaaaatcagggaacttgaagaatatataaaggacaccgagctaggaatgaaagagttaaatgaaattctaatcaaagaggaaactgttagacgtacattacacaatgaattacaagaactaagaggaaatatacgagtttattgtagaattcgtccacctttagagtctttggaaaacttggatactagtctaataaacgtcaacgactttgatgacaaccgcggtgtccagtctatggaagttacgaaaattcaaaataccccacaagtgcatgaattcaagtttgataaaatctttgaccaacgtaatacaaacgaagatgtctttaaagaggttggacaattagtgcagagttcattggacggttataacgtttgtatttttgcatatggccaaacagggtccgggaaaactttcacgatgttaaatcccggggacggtattattccttccacaatatcccatatattcaactggattaacagattgaagacaaaaggttgggattatgaagttaactgcgaatttattgaaatctataacgaaaacattgtagatctgttgaggaatgaaaataacaaggatgacacaagtaataatctgaagcacgaaatacgacacgatcaagaaaccaagactaccacgataacaaatgtcacgagttgtaagcttgaatcggaagaaatggttgatagggttttgaaaagggcaaacaagttaaggtctacagcgagtactgcatcgaacgagcattcttctcgttcgcacagtatttttataattcatttgacagggttgaatgcaaaaacgggagcgcaatcttatggtacattgaacctcgttgatttggctggttcggagagaataaatatttctcaagtcgtgggagatcgtttgagagaaactcaaaatatcaacaagtcactgagttgtttaggtgatgttattcatgcgctaggtcaacctgatagtgctaagagacatataccctttagaaactcaaaattgacgtacctactacagtattcattaactggggactcgaaaactctgatgtttgttaacatctcgccaagttcttcgcacattaatgaaacgttaaattctttaagatttgcctccaaagttaattcaaccagaatggtcagtagaaaatcagataaatga

SEQ ID NO: 3385 - DNA, 1260 bp, Saccharomyces pastorianus
atgtctggttatttttcaggattttctttgaataagatcaccgattcgattgctaccgctgctcacaaaactcaagacaccttgaactctgcgttggcaaatgcgaacgtgaacttgaacgatccgcaaacaagattgtctatcaaatcgcgcacaagatttgtccaagaatcattgggcactgtatctgatataagcaaattaccaccacagtaccaatttttggagaagaaaagcgattctttggagaaagtttgtaagaggattttgctagtgtctaagacattcgaagtggaaggctacgactatccgccaaatttaacggaaagtatttcggattggtggtcccttaataaagacggctggtttggctctaaaaaatcggaacacgcgagtaaaaagaaggattccaaccatgatgatgcatttttgccaaggtcctttgcccaggcaatttcgaaagcagctgttgattgtgaattcgaattcaaaaacttagaacagaacgaaaaggcagaattgaagcagaaaaaggagcccaaaaaagccgcacaggaaacagatgaacaagaagaagacgaagaggaggaagatgaagatctatcaaatctaatcaaagttttcgactcatggtcaacatgttacaaaaacatcgatgaaggcaaagcggaaatggattctatgatgattaaagaattcaacaaaaaattagaaaaattgataaacgaggactttaagaaggttcatgacttacgcagaaaagtagaagaatcaagacttaagtttgatacaatgcgttatgaaggcaagtcaaaagaagaacaatcgagagctcaaaaggatgaaacctcaaaggaggccgacaacaatgacaacactgcaaaccctaaacccttagaggatgctctcactactgaaaataaaacaggagaggaaaaccaaacaaaggttcctgaagaagaaccaaaaaaggtggaaaacgaggtcgccactgccgatgatagtgttacgaacgaaaatccaaaaccagctaatcagccatcaattgaagattccgaagaaaacaaactgttagaaaaactggaagacgagtttgtctccaatactacagttgctgtggaaacaatggaagaaatcactgacagttctgaaatttcgagtttagtgaaactatttcaaaatttccaattggtgtatttcagacaatgtgttcaggaggtggaagcaaatctgaaggttttaaacggtatggaaaactag

SEQ ID NO: 3386 - DNA, 639 bp, Saccharomyces pastorianus
atgattatattgagaaaaactgagattagggggctgtcctctgcaaggataaggagcaccatgatattcgctagcgtacagaggcggacgctcaccaggctggtgaatcccataagacagcagcatcagcagatctccaagcaaaggaactccaagctcttcaaaaacgtgcatttctacgatttcaggtcgctgcccaaggtgcccaccactcaatatctggaggctagggagctaacccgggacatcctgtacagcgggtacaggcctgtgatgtacccagtgaaggaaaaccccttattcagagacaagaagaagaagtctctgcagatgctcctagcatccgacgaggagcctgccacggtggccaagaaggccacggcaaaggacgagcataaaaacgtattgtttggcgagcgtggcacaggcggtataatgtccggtggcgtaaacggcacgtggaagtacaacccgacggtgcccaacgagctgctgccctacaactggtggtctacgtccagtatggggatggagtacttccctgagtggaaagacgtcccttcatacatgatgaggaagttgaaaccctttgatagagcactacaactacagtcaaaactcagtaacaagaaaaaataa

SEQ ID NO: 3387 - DNA, 2061 bp, Saccharomyces pastorianus
atgtttagttcagggagcgttctacctgtgaaaattcagcctcccctgctcaggccactggcgtacagagttctgtcaagaaaatatggtctatcgattaagtccaatgggttatctgctctggcagagtttgtcggcactaacataggcaccaattggagacaggggtctgctacgataagattcctcgagcaatttgcgacggtgtggaagcaacaggaaagaggattgttcatcgaccaagacggggttaaagaggtgattcaggagatgaaagagcgtgaaaaggctgaatggagccacgaacaccctacccagcacggcgatgatatactgaggcatagtgacgatgacagcgacgatgacatgcccatggcagctgattcctctttacaaaatgcattattatcttcacccattcgagaccccatcaatgagaacgagcacaacgtttcttccaggttagagaaatctaaaaacctggactggagagactatttcaaagttatcaatgcttcgcagcaacaaaggttctcatataatccccgtaaaatgcagttcattttcgttgcaaataaaaaggagaatttattgggcagcagtacggggtttctacctgatattgcggataaagtacagatgttcctgacaagatattatctcaccaacgatagagtcatgagaaacgagaattttcaaaacagcgacatgttcaatccattgtcctctatggtgtcgttacaaaacgaactatccaatgctggccaaaaacagcaattcaatagcatgaatatcacgccaatcaagaatctgctaggtagagatgctcaaaattttttgatattgggcctcctgaacaagaacttcaagggaaattggtcaatagaagatccttctggctccgtagaaattgacattttacaaactatccctacgcagggccattattatgcaccaggttgcatggtccttgtagaaggtatatattactctgtggggaataaatttcacgtcacttctatgactttacctcctggtgaaagaagagaaattacattggagaccatgggtaatttggatcttctaggtatacatgggctttccaataacaactttattgctcgtttggacaaagacttaaaaatcagattacatctattagaaaaggaattaactgaccacaaattcataattctcggcgctgatttattcttggatgatttgagaattatgaccgcgttgagtaaaatattacaaaacttgaatgacgatccgccaacattgttgatctggcaaggttcctttacttcaatccccgttttcgcttcaatgagtagtcggaacgtgagtagttcaacccagtataagaacaactttgacgctttagctacgctattgtcgcaatatgacaatttgactgaaagcaccacaatgatattcattccgggccctaatgatctgtgggggtcaatgatctcacttggggcgaatggcatattaccacaggatgccattcctagtgtgtttaccaaaaaaatgaacaaagtttgcaaaaatattatttggagttcaaacccaacaaggatagcgtacttatctcaagaaatagtactcttcagagacgatttgactgaaagatttaaaagacaccatttggaatttgcatttaacgaaaatgaagaatcgtatactgaaagtgctaatacgacaaccaaagatactgataccgttccaattgatgaattagtaaaaaatccagatcaactaccacaaaaagttcaagaatcaagaaagctcgtaaaaactatattagaccagggccatttatcaccctttgttgattctatacgcccaatttcatgggatttagatcatactttaacactctgtcccataccatcaacaatgattctatgtgacacatcgtctgcacaatttgatttgacatacaacggctgtaaagtcattaaccctggaagttttattcataataggcgtgcgaggtatatggagtatattccatccacaaagaaaactatacaggaggaaatatatttctaa

SEQ ID NO: 3388 - DNA, 2142 bp, Saccharomyces pastorianus
atggttgccaatctgaataacgagaaagaggttcttcaattgatagatagttttttcttgaaagcaacattgctaatatgttctacagaatcgagccgataccaatcttctacggagaatatacctttatttgacgatacatggtttgacacagaattagtgagtgagctgcccgagataatatcggaatggtctgattatgacggtcaaacaaatttgccacccttagtggtagagacatacttggacttaaggcagttgaatccgtctcatttagtaagattgaaagaccatgaaggtcatttatggaatgtttgcaagggaaccaagaaacaggaaatcgtaatggaacggtggcttatagaattagacaactcttccccaactttcaagtcgcatagcggagatgggacagatgttactgagctttccaaacagttagttcttcttttccgttatttgtttactttaatacagttattgcccacgacagagttgtatcagtcactaatcaaatcttatagtggtccacagaatgaaagtattaccaactcaatatcagtagcagatccggtagtcaacattcggacgcgtattcttgacggatccaaaccaattttatcaaagggaagaataggattaagcaaaccggttattaacacttactcaaatacactaaatgaatctaacctacctgctcacttagatcagaaaaaaattacaccagtgtggaccaaatttgggcttttaagagtgtcagtatcgtataggcgtgattggaaatttgaaattagcaataccaacgacgattcattttcaaaccgacatgtaatcctttcacgtaactcacaacaaccacaacagcaatcggaacaaccacaacagcagtcacaacaacagcagctagaacaaaacgaacaacaaacagtagaacagaatcaagagcaggcacaacagcatgatcaacaacaaagacggatacctgagagtagatctctctcgctttctccctgtacaagagccaattcctttgaaccacagtcttggcagaagaaagtgtattcaatatcaaggcctgttcaaccatttaaagtcggttctattggaagtcaaagcacgagcagaaatccttctaattcatctattttcaaccagttacccatccatagaccgagtataagttccaattctggacctcaaatgaatattgagggtactagcgtgggaagtacctcaaaatattcttcctcatttgggaatatccgccgtcattcaagcgtcaaaacgacagaaaatacagaaaaattgttaagagctgttaagagtccattacaactgcaagagtcgcaggatgatttaatggattttgttaaattattggaagaaaaacccgatttaaccatcaaaaagactaatggtagcaatcaacccaatattaatatatctgattcgttaattcgatatcaaagcttgaaaccgagtaatgatctattgagtgaggatttaactgtaagtttatctatggatccaaaccatacataccatagaggtaggtcagactctcattcccccttgccttccatatcaccttcgatgcattatgggtcattgaattcaagaatgtctcaaggtgccactgccaaccatttagttgcgagaggtgggggaaattcctctactagtgccttcaatagtagaaggaactctttagataagaatgcgaacaggcaaggaatgtcggagctacctcctatctttggcggtgagagtacttcatatcatcacgaagaagaagatgacgaggacgaccatttgctaaatcaaatgggaaacagtaccatcaagtttaaaagttcaatatctccaagatcgatagacagtatttcgagttctttcatcaaaagtaggataccgatcagacaaccatactactactctcaaccaacaactgcacccttccaagcccaagcgaaatttcacaagcctgcgaataaattaacggataatggcaatagaagcagtagcaataacaacaatcctaatgggactgatggaggcaacacaatgcataatgaagatgatgatcaggatgacgatttagtattcttcatgagtgatatgaatctttctaaagaaagttga

SEQ ID NO: 3389 - DNA, 276 bp, Saccharomyces pastorianus
atggcaggagaggcagtttcggagcagacaccagactcacaagaagtaactgtaactaaagtagtttgctttgttggtttattagtggaaacaggacaccacgtagtgtattccgtagcaacgccactgacagtggtcgtggcggtagaaaagatagcagaagtggcagtctcagaacagacgccagactcacagaaagtaactgtaatcaaagaagttttttcgcctgttgtgacagcagaagtcactttttcaatagtagtacgatcgcggtaa

SEQ ID NO: 3390 - DNA, 270 bp, Saccharomyces pastorianus
atggacttggcaatcttaccatccaaacgattggtgaaattcaaagccttcactaaacggtccttgtccatcaatgagatagaattggctaacttatcttctagaacctttttatttatctttttacccctcttgcttctatttgctttcttagaaatctttgcttccagtaatgcttcattcttggcagctgttctaatcaagatattggacaagttagtcttttctggtcttggtagttcggttaaatcctttacttctggatcataa

SEQ ID NO: 3391 - DNA, 576 bp, Saccharomyces pastorianus
atggctaagaaaatatcaaagaattctagagccgctagacaagcggaaatttatgatccagaagtaaaggatttaaccgaactaccaagaccagaaaagactaacttgtccaatatcttgattagaacagctgccaagaatgaagcattactggaagcaaagatttctaagaaagcaaatagaagcaagaggggtaaaaagataaataaaaaggttctagaagataagttagccaattctatctcattgatggacaaggaccgtttagtgaaggctttgaatttcaccaatcgtttggatggtaagattgccaagtccatttctcgtgccaagtacgtccagaacacaagaaaggctggctgggatagcactaatgaaactataaagagagagttggctcttttaagcggaggttattccgcgaaggccaagaataccgatgaagacgacctgaacaaaacaaaggatgaaagtgaggagatatcagacgtgtttgagtcttcaactgagagtaagcgagtagagaaagagtctgtcaataggtttggtgtcttaccagatgatgttgaagactag

SEQ ID NO: 3392 - DNA, 2661 bp, Saccharomyces pastorianus
atggagatttccagctcaccatggaatgacggtggatatagcccttacgagaggaacagagctgctgtatctccattgtcaccacctatggataatgatgagcgaatagaaagcccccagtcgttgggtgatcattgttttaagcctctaccatatcttaccaactatctttctatgtttgcgcttttcagtaacgaaatatttggcgataaagtgaacgttagctctcagaatgaatatttgttaaagaaatattattctttaaagaagccatttgctttgcgtcacagtggtggtacatcaaagaactcggatatgccttcacagagtaatgatatttggcagaccaattttatggttgataggtttttgaatcgtagtgtgcgatcggtgaattacgcgaactttcaaataatctctgatatgcaaaacagaagcattaggggaacaagcatcgggggaactccggagcacggcatcgatactttccaaaccgccagcttgccttctataccgtctgcagtaccatattttcaatactatagaaagttattgacggtaaatactaaagaatgggatattttgaaactacatagtctatggattccagacttaagaacggattttaaggattttgaactatgtcgtgatagagactcttcaagattgtatgatgacgattatgatgaagacaatgatgtgaaaaaggatcttttttttgaaaaaattccaggccaacagattttagatggtgaaggttatgttcccaaagaatatgaaatttcgtccggtagtttgtctattccttctttattttctgaagataagctcccagcattaacctaccattgtgctgtcgaattgaataaaaacgtttacatatttggaggattaatgccatgctatagttatgaagaggatgcaccacttttgaacgatttttttgtagatgggataaaaaacttacctcccccactattaccccaagtaatcaacaatccgtcaatggtcaataatcctcatctttatgtggccgctgtaccttcatgtcgttttagcaagcccaagatgagaggttatataccgcctccgttactctgtgttcaaggttccaaattaacagaacggcatattttcttttacggtggatttgaaatcagaacggaaacccgtggtgatgaaaatgggaaatatcatttaaaaaaaaggttatatgtgaacaatactggctatattcttgatattatatcattaaagtttaccaaaatagatgttatagtacagtcttctaaatataatgcatatccgactatgtcagcacgattcggtcatttgcaaatctccattgataaccagaatagaagaaatagcgttcattccgtaaacacgaacgagagtcatacagcgggatccgcttctatgaaacgagggcctagtatgtctaaagggcgactcgaaaaatcagcggtgctttcatccttatcacataatagtagcgcaccttatggtgtacacactatcataatatttggtggttatagacaaacgggcgatgaccgctacgaggcgatgaatgatttatggaagattgaaattcctgtgatgcgtcggggtaaaaagggttattgtaaattttcagagacggccaacgcaatacttttgacaccaagagagaaggacaagttagattggcctgaagaaagagcttttgcagctttttctcttcatggaacgtcgttgatggataggagcgcactagaaacgagtttactaagcaatttaaaaaaatacttcattttgaaaccgtcatatatatcaaaggaccgtgttattgatcctaagccagttttcccgatgatggtacatagtacgcatcaagatcttttcaatggcagttctgcaacggacgaaccttcaatttctggtgtcccccccagtagatcgagcgcggacagtactattggtcccgaaatgaactacgattttgataatatgacaatgaaaccaggggtgaacttgtcatctatccccatgagtacaataggaagacagagattaatactaagtcaagatatgcctatacgtaaaaacattatactacatggaggttccaacggtctcaatgtcctagatgatatgtggctgatggacctggaatgtgagacatggacacctatagagactttcacgagagcggaaccaagcaaaagcgtcgatgaaaagttagatactgtcaacgtgggactcgttggtcatgaaatggaaagcattggccgaatatgtgtatgtataggtggtatgttacaagaggatgtgaacgcactttattcgggggataatgatgagccttcaaaaaatcaaagtgtaaaaaaattaccgttgggtggtcattttctaaatacaattgacttgagtacgcagtgttgggaagaccaccagattatcttatccaagaaggaagataacgaagatgggagcgataatgaaaatgaggacgttaattcaaatgtagtggtcggtatcggcgggacttctttgcagtgtgacaagagcattgtaatgattggcggattaatgtcgagacgaacaaatttaaaagaaatatatttgcacggtacgatcctgaaaagtattttacctagtgtacatccaggaaattga

SEQ ID NO: 3393 - DNA, 474 bp, Saccharomyces pastorianus
atgggatgcaatcatgtggcaaaatttgggattgaagatatagatgatctgaacgaaaaaatcaaaaaagaaatccagatttcctcaggcttgaaacctccggtaaatacgatcgactcgttgaacagtgaactgtttgaaaaaactgctccttccgttgctcaaacatggagttcgtccttggataatttagaaaagctgtcatcggcagccgcagttagccaaaatttggactaccataccgttttacagcacggaaacttaccgggcggttccaaagaacaaacgccgctgaccgggatgaacagcctaaacaactcgatgaatgctacaccaatggctgacaattcatctggatcacaacttccaaatggattcgatcgaaatcaagcgaataacacacctttcccaggatattttggtggtttggatttatttgactatgactttttattcggtaacgatttcgcttga

SEQ ID NO: 3394 - DNA, 642 bp, Saccharomyces pastorianus
atggttgaaaacagtacgcttcagactccagataacggaaatggtgacggtgatattagtaagccatattccggggcattttccttaggcttgcataaaaccacgcctggattagaaggtgagcactcaagcacatcgcctgcccccgagaactccgaaatgcaaaacaggaaaagaaacagaatctcttttgtctgtcaggcttgcaggaagtcgaaaacgaaatgtgatagagagaaaccggaatgtggccgatgcatcaagcatgggttgaagtgtgtttacgacgtatcgaagcaaccggcacccagaattcccagtaaagatgccatcatatcaaggctagaaaaggatatgtactactggaaggataaagctatgaaactgctcaccgagagagagacgaatgactcgggtaaaagatcggcaagtcctaccaatacaaatgcggctaatggagaaagtcccgagaccaagaaattacacacaatggaaaacttgtaccagcaggattttaaggagagctcaagtaatggtgaagatgataccgaagtcaacctgtatagaagccatccaaccatgatcatgagcaggtatgaaagagaattagcctggctgaaactactatattcgatattttga

SEQ ID NO: 3395 - DNA, 1977 bp, Saccharomyces pastorianus
atgcaactgggcctttggcttagttttgcctctgtctgtgtatatattctttgtatatatatttattattttaattggaatcgcgaaatttcatatcagcaatactggatcaaaaaggtgggaacacaacaaaatagaacgctagtcatggtgcaacactggattagtggcggtaggcatctccacaacagtggcaacgacggtgaagatgacgacagcgaattcgcaaactcgatggattccggaatgaccataccgtccttcagggactccctgaccacaagatcatcgcaaaacgatcctttgaagcctgccatagtcaacgactccagtaaggtcaagcatttggaaaaggagctgaccagcgctaagatcaagatccaggtgctgtatgaatacatccgcaaaatttccagcaaggatgccagtttgccgtcgatgatcaacgacaatgaactcaagaattccacaatcgagggcctgaatgccgagatcaatagtttgaaacaaaccctacacacaagggaggtcgagtatcaagacacgctgcagttcgtgcaggaaaatttggaaaattcagatactatcgtcaacacaatcaacaatctactatcctttatattatcccatttcaacggcgacgacgatgatgcccatattattgatgatgaggagagaggggttttggacgagactctacaattgagctcagactatgtgctagagaaaatggacactctatctaaattcgttatcaagttcttggaagacttcttgcagggagctcgaacgcagcctgaggagaaggtcacttcactggctcaatcttcacctgcgagatcacacctcgaagatcactcactgtctagtaaagaaaacctggatgaaaaggcacatgaggaaaataacaatattgacgtcgaaaatgtaatggcaaatagtacgtctttacctatattaaatagcgaatcccggtttgagaaaaccttggacactcagttagagattgtcattgaaaacctacacaaggaatatgaccagtttattaattctatcagattgaaatttgaaaaatcgcaaaagttggaaaagctattagcgtccaaactaaatgaacaatcccttttactagattccttagaattgaaggaaaattcgaatgctaccatggagaaacaagacttcttgatatctcaattaaagcagaaaatacactcacaatctgtaatgatggaggagtttgaacacatgaaggaaaatttcaatagaatggaacaaaatgagaaaatattgaccaaagaattggaaacccttacgaaaatcaacaaattaaaggaaaacaactgggataattacatcaatgatctggaaaagcaaataaacgatcttcaaatcgacaagtctgaggaattcgagatagtacaaagtcaattagacaaattggatttagaaaattatgaattgaaaaaccggataaatactctggatggtcaaaatctggtgctatcacaatatgaaacaaatttcatcaaattcaatcagaatcttttattacaccttaataacgttttccatattctacagaaaatcttacaagaaagctccatcatacaatttgacaaaaaaatgaaatcaataaactcaataccaaatgcattgaaaaatttgaacgtaattcaaccaaaactagaatcgttgtacacattcatagagaccgccttagagtccataatagattcctacatctcctcattaatagccacgggttcttcagaacaacaacagagcaatgaagtaatagcaaccccaaataaagaattgaacctacgaatagaagagctacaaagaagatggatttccgaaagagaaagacggaaattagatgcaaacgcttcagaagctcgaatcagagctttagaacaagaaaacgaatcattaagatcgaagctttttaaattatcaattaataattcttaa

SEQ ID NO: 3396 - DNA, 339 bp, Saccharomyces pastorianus
atgctacgttccagattggtgaagacagcttgctggccaaggatcctaacggggccaaagctgtggtactctacgcaggtggccatgaccccggaggagaagatgatcaccgataaactgcaacaggagctgcagccggaagcttgcaaagtgcaagacgtatccggtggttgcgggtccatgttcaccatcaatgtcactagtaagaagtttaacgggctgactctcatcaagcagcaccagctggtaaataggatcctgaaggaagacatctctaggtggcatggcctgcaattgaccactaagaaggtaagcgtgaagaatccgaaatcgtcgtga

SEQ ID NO: 3397 - DNA, 423 bp, Saccharomyces pastorianus
atggtttgtagtggccaaatgaaagaaacttgtcaagtctcggaaatgacaaatcaaaaagagaacagaagcaaggcagaacaaagagcgatgttcaggcaagcaatgagcaccgagggtcccatggcgcaggccatcttaaaacaactggaacgtagtttcccagactacaggtcctttgcgtttggactgtacaacgactcgtacaagcacaagggccatgctggcatgcagggccttacctctgcagagacacacttccggatcgagatggtcagcaagagattcgagggtgtgaaactaccacagcgccaccgtatggtgtactcccttttgcaagacgagctggcccagacgaatggcatccatgcgttgcagctgtcattgaagactcccgaggagtacaagtccagggccaagtag

SEQ ID NO: 3398 - DNA, 513 bp, Saccharomyces pastorianus
atgctacgtaccactagactatggactactcgcatgcctgccgtgggcaggctgtttctaagaaacaactccagcaacgctctgaacaagaacaagctgcccttcttgtactcatcccagggaccacaggccgtgagatacacagctcagcatgaatggatagctgtgcaccaggacaaaatcgccttcgtcgggatcacgaagtatgctaccgacgccctgggggacgcgacctatgtcgagctgccagacgtgggcacccagatcgcccagagcgagtcgctagggtccattgagtctgtcaaatcagcctcggagatctaccagcctgccgatggtactgtgcaggagatcaacacccacctggaggagaacccgggcgtggtcaacgaggaccctatgggggacggctggttggttaagatgaagctggacgacaacgtcaacgtggaacaggtcgagggcctgatgtcgctggagcagtatgagaagacactggtccacgacgattaa

SEQ ID NO: 3399 - DNA, 2406 bp, Saccharomyces pastorianus
atggttgctaacagcaggcacagagacagcaggagcagtgcaatgtcgtcagcagagatggagcagttgctacaggccaagacgctggccatgcacaacaacccgacggagatgctacccaaggtcctcgagaccacggcgtccatgtaccacaacggcaacctcagcaagctgaggttgcccctagccaagttcttcacacagttggtgctggacgtggtgtccgtagactcgccaattgccaacacggagaggccgttcatcgcggcacagtacctgcccgtgcttcttgccatggcacagtccaccacggatgttctggtgtacaagaacatcgtgctcatcatgtgtgcgtcatactcgctggtgctagacctggtcgccaagacgtcgaatgcggagacgttcgaccagctgtgcgcattgaaggcgtttgtactctcgcactggaggactgcgtacccgttgcaaactaccactcacgacgagggcgacgtcgagccatggctggcacagatcgataagaacgtgggtgtcaagctggccacgatcaagttcatgtccgaggccgtgctggctcagaccaagtcctccaacggcaacgacatcaactccgccagcgtccccgacaaccaccctgtgctaaaccggtcggcactggagaacgaggccaagaaactgctggacacgctgctaaactacctcatcgaggagcagtacatggtctcgcctgtctttatcggcatcatcaacaccctgtccttcatcatcaagagacgtccacagacaaccataagaattctttccggcctcttgcggttcaacgtcgacgccaagttcccgttggagggcaagccggacctgaactacagattgtccaagaggtttgtagagagagcgtacaagaacttcgtgcagttcgggctgaaaaaccagatcatcaccaaatcattgtcgtcgggctcgggctcaggctcatcgatctattccaagttgaccaagatctcacagacactacatgtaattggtgaagaaaccaagagcaagggtatcctgaacttcgacccctccaagggcaacagtaagaaaagtttgtccaagcaggataaactgaagtacatctcgctatggaaaagacagctatctacgctacagtccaccgcggccgtggaaaggaaggcctctttgcccgttcctgccctcacagtagtagcctcaacggaaaacatgctcgataaattgaaaatcctacagaaatacaccctcaacaaggcctcccaccagggaaaccacttcttcaacaactcgcccaaacctatcaccaacacgtactcgtccgtgtactcgctgatgaacagctcgaactccaatcaggacgtgacccagctgcccaacgacacgctgatcaagctgtccacggaggctatcttgcaaatggacaccacgagactaatatccgggttgtctatcgtcgcttcaaggtacacggacctgatgaacacgtacgtgaactcggtaccgtcctcgtcgtcctcgaagagaaagtcagacgatgacgaagacgatgacgacgtaaacaacggcgacgacgacggcctggcggacaacagcaagaaagtcaaagtcgaggtagaggagccaacggaggaccccgaggatcccgaagacgacgaccgcatgcaaaagatgctacaagatgaaaccgctcaagaggacgcgggcggtgccacccgacccagctccaccgcgagggagattgcgccccccttccaacctgactcattgacgcaggatgaaaagctaaactaccttaccaggctgaccacgaagttgtttgagctgtccaaccgccaggactccaccccagcgtcaaagtcgctgccgccctcccccatcctactggacgacgacgactcgtcgtcgtggctccacgtccttataagactggtcacgaggggaattgcagcccaggaggccagcgacctcatccgcgaacaactgctcgccttcttcatccaggacttcgagcagcgcgtcagcctgatcatcgagtggctcaacgaggaatggttcttccagacctcgctgcgccaggaaccggccaactacaacaagtggtccctgcaggtgctcgagtccctggggccgttcctggaaaacaaccacagacggttcttcatccgcctcatgagcgagctgcccagcctccacgccggccaccttgatgccctcaagcccatatgcctggacccggccagaagttcgctggggttccagacgctcaagttccttgtcatgttcagacccccagtgcaggccattgttcgcgacctgctcctccagctcaagcaggaggacgaaggcttgcacaagcagtgcgactccctcttggacagactgcaatga

SEQ ID NO: 3400 - DNA, 171 bp, Saccharomyces pastorianus
atgcgtccagcgacagcaacgtggacctcttcatggtgtttgtgtatctcgatgtgtcgtgctctgctgtgctgggaactctctttcgatctgctttattataacgtggtttcttctttattctggtggaaaatcgccgttctagcgccctcctcgtatagagcgacgtga

SEQ ID NO: 3401 - DNA, 105 bp, Saccharomyces pastorianus
atgtccagttgcagctccccagagtcgtccatgatgtcgaggttcaccaggtcgcatggcatcgacgggaacgtcacgtccacgttcagctccagcttcgcgtga

SEQ ID NO: 3402 - DNA, 525 bp, Saccharomyces pastorianus
atgattctttttttaaacagtagagacttgcaaagtgttggagtgaccagcaccggccttgaaaccttggatggagacgtaagtgtcgttgtccttcaagataccgaattccttagccttttgaataccgaagttgatacgggcttcaacatcttcagtccagtcagagacagcttccttttcgaaaacgaatgggaagacacctctgtacaagtgagagaatctggcggctcttgggcatctggtgaccaagatgattggacagtttggtctgtacttggaaaccaatcttggggtgttaccggaagtggacaagacaatgatagccttggccttttgttcgaaaacagcggcgacagcagaggcagcgacggtttcggtggtagaggttggctttggagtacagtttctcatgtcatcgtagtttggcaagtaagcaatagcttgttcggcaatgacagcggtttcagccatggtggtaacggcgttgattgggtagttacccttggcggtttcaccagataa

SEQ ID NO: 3403 - DNA, 1233 bp, Saccharomyces pastorianus
atgggtttgtgttctcctgaatctgaaaagtctcaattaaacatggactacacttcaaagaacggttcgcaatccatttttaagcaccttaaccggcatctgaaactcaataacaacaataacaacgacaataacaatttgaacggcgcaaacatgagcagttatagcaatcactcaccatacgacccctcatacgacgcaaggatcaatcagaacccacaaaatagcggcaccggatgcttttctggcagcattgactctttgatggatgagcacataataccatcgcctcctttgtcacccaaagaggagtcggatttccagcacgatgcttcatctcacatatcctcgtcagcactggtgggtgccacgcccaaggggcctgtagagaatgtgttgaccgtaaagcctgcgtggcccaatgggttaacaaggaagagataccgctacgccacttatgggtttttgtcccaatacaaaattttcagcaatttggcacaaccatattccaagaacatcatcaataggtataacaatctggcctataacaacagatacaagtattccaagtataacgatgaattaaccccttcttcttcaaggttaccttctccgctagcatccccgaatttgaacagacaatcaagatataatatgaggaaacaggtcctttacaacagcaatctgggcaagtttgaatctgacactgaatggatatcaagggaacgcaaagtgtactcaccgcaaagaaggacaatgacgaccagtccacaccgtgccaagaagttttcaccctcagcatccgcgcctcatactaatattgcatccatggaggccatccatgaagcccctcaatacgttcccaatatctcatggaaaaaactgcctgatttctctccaccattatccacgctacctccagacactaacaaatcactcaagatcgagtggaaggggtctccgatggacctgtccgcagacccgctgagggacgaactgcatcccgccgaattggtgctggctcaaacgctaaggctaccttgcgatttgtatttggattccaagaaaaggttgtttctggaaaaggtttatagattaaggaaggggttgccgtttagaagaaccgatgctcagaaagcttgtaggattgatgtcaataaagcatcaagattgtttcaagcttttgagaaagtcggctggctaagggattcgaattttacaaaatacttatga

SEQ ID NO: 3404 - DNA, 462 bp, Saccharomyces pastorianus
atgtcgtcttcaagtagcctcaacttgccaagtgagacctttatgaagcttatatcatcgaatttttacagtgggaaatctaactccgtcgaaaactacaataatacgctaagattaaatattattatatcgagtacttttaaatcattaaacagaaaaaaaaaagagaatgtgtatagtagtaggcatatttttggggacataggctggtgtggtagtagtgagtgcgtggactacctcaatttgtttctgatcttagtggctattcgatgccctgcagattctttgatgtcgatcccaaatggcatcatattagtctctgcattagttgcaccgttttccaactctaatccatctcgaagactttttctgaaggtgaacccttcttcttgtcttaacgtgctatacttggacttatgttgtaatggcttgatcattgctgaggcaggtattggtggatag

SEQ ID NO: 3405 - DNA, 228 bp, Saccharomyces pastorianus
atgagagacaacataaataaagtggcggagagaggtgaaaggttaacgtctattgaggataaagccgataacctggctgtctccgcgcaaggttttaagaggggtgccaacaaggtgaggaaggccatgtggtataaggatttgaagatgaaaatgtgtttggccctcgtgatcatcattttgcttgtcgtcgtcatcgtacccattgctgttcatttcagtcgataa

SEQ ID NO: 3406 - DNA, 114 bp, Saccharomyces pastorianus
atgtcgtcgtctactccctttgacccttatgctatgcccgagcaggatgaagagcggcctcaaaatgttcagtccaagtccaagactgctgaactgcaagctgtaagtacataa

SEQ ID NO: 3407 - DNA, 1587 bp, Saccharomyces pastorianus
atgctagatgtcaagatgagttcccgtgctgacactgataaccccaaacatttcaccctggtagcgcctgagcctgcactggccgatacgcatgcagaagagccaccacgttccagagaggagtttgagccagagggcaacgaacacttggatgacgacggcgacgacgattacgaaagacagcactctgtgtccattgaaccgctagacacattgccactgaagaaaaaactacgaaacttctcgtacattacctttttcacgatagggataggtctcttgtggccatggaattgcattctcagtgcgtcgcagtacttcaagcacgacattttcaaggacacgtccatttgggccaagatcttcacaagctctatgatgtccttctcgaccatatccgcaatgctgttcaatatctatctggccaggagacagtacaagtactcgagaagagtcatgaacgggcttgtatgggaaatcatcgttttcctcgtcatgtgcttcttcaccatcctgcattttctcttacccaaatggttcaacttcatgttcatcatggggctcgtggtcatcagttccatggggacggccatgacacagaatggtatcatggccatagccaatgtcttcggttcggagtacagtcagggcgtgatggtgggccaggccgtggccggggtgctgccttcgctggtgctttttgccctgtcgttcatcgaaaactcgtctgtttccaccacgggaggcattctcctgtacttcttcacgaccacgctcgtggtcaccgtttgtgttgtgatgttcagcgtgagcaagatcggcaggaaagtggccgagagctggaacgtggaagatggacgcctcagcgacgtcctggtagggtccttgcgctccagcgaggaagaaatccgtattgtcgggcggattgaccaggtggacgacgatgacgatgacgaccacgaccatgaccacggccacaacaacaacagcgacgacgacgacgagggtgaagagctccaactaaaggtccccttcgaggttctgttcgccaagctgaagtatctggtgctttccatattcaccaccttcgtcgtgacgctcgtcttccccgtgtttgcgtctgccacctacgtaacgggcctacccttgactaacgcacagtacatcccgctcatcttcacgctgtggaacctgggagacctgtacggcagggtcatcgccgactggcccatgttccgtgaccagaacttcaccccccgcaagacgttcatctactccctgctgcgggtcgccgctatcccgctgttcctggtgttcacggccattacctcctcctcaagtggcaacgaggaccgcaacggctccgtcgtcgtcgacctgtgctacatgcttctgcagttcctgttcggcgtgaccaacggccacgtcatctccatgagcttcatgaaggtcccggaacagctggacaacgacgacgagaaggaggcagctggtggcttcaccaacatcttcgtctccacgggtctggccctaggtagcatcctcagctacgtcttcgtcttcgtcatcgactccatcatcagatag

SEQ ID NO: 3408 - DNA, 1194 bp, Saccharomyces pastorianus
atgagtcagcacacagcacaggagagtgaacagactgcggcgaaggaacaagatatcgatcaagagagcgtgttgagcaacattgacttcaacacggatttaaaccacaatttgaacctatcggagtactgcatatcgagcgacgcagacacagagaagatggacagcaacgaggaaacgtcgctggccagcctgccggagctgaggtacgcccccaagctggcgagcctggtgaagcaggagacgcccagcgacagcgtgaaacgaccacttcaggacgaagtggaagtgtacgaggagcatgaagacacgaagaagaagatcaaggtggcagagaaggaggaaaaggccgtggtggacgggaaagagaagagcgtggacctcagagacgagcagggcgacgagggcgacaatgaggaggagaacaacgaggaggagattgataacgaccacgagcacacggcgccgcccgtagcggtgatgccctcgctcattgaggtcgaggagcagcggatgactgcgctcaaggagatcaccaacatcgagtacaagtttgctcaattgcgccagaagctgtacgacaaccagctggtgcggctgcaaacagagctgcagatgtgtctggagggctcgcatccggagttgcaggcgtactactcgaagatcgccgcaatccgcgactacaagctgcaccgggcgtaccagcgacagaagtacgagctggcatgcatcaacaccgagacgctcgccaccaggacgttcatccaccaggacttccacaagaaggtcaccgacctgcgcacacgcctgctcaaccgcaccacccagacgtggtacgacatcaacaaggagcgccgcgacatggacatcgtgatcccggacgtcaactaccacgtgcccatcaagctcgacaacaagacgctgagctgcatcacgggctacgccagcgcagcgcagctgcgctaccctggcgagcccgtggcggaggacctggcctgcgagggcatcgagtaccgctaccgtgccaacccggtcgacaagctcgaggtcatcgtcgaccgcatgaggctgaacaacgagatcagcgacctcgagggcgtgcgcaagtacttccactccttccccggcgcacccggcctgaacccgctgcgggactccgagatcaacgacgacttccaccagtggacccagtga

SEQ ID NO: 3409 - DNA, 1914 bp, Saccharomyces pastorianus
atgcctgctgtgttgagaaccaggtccaaggaatcctctgtggagcaaaagcctgctcccaggacaagaaccagatcgaaaaggggcaggcgtggccgtggagacgatgatgagggcgaagaagatgaggaggaaagtgacggtgggtactacgaagtcggtggcgactacgatgaatacgcctcaagatcgaagctggcggacaacagaccctttgaaatagtagcgggcctgcccagcagtctggacgtgcctaactataactcttcgctcactcatccattatcggtaaaggactctggggttctttacgactctctagtcggttccaggagaacctggatacacggcgaaatgtttgatctctattggcgaagacccaaaagaatcattaacgaggctacgtccacgcctacgctggccccagcaatggacagcccaacgtccggtggtattccattgatacgagataagatgcagaaaatgtgcgattgtataatgaatggcggacctcacagcttcaaggttaggttgttcatactgaagaatgacaaaattgaacaaaaatggcaggaggaacaagattcaaggaaaagagaaaaggaactgaaaaggaagaacgatgcagaggccaagaaaacgagaatggaggagaggaaaaagcaacaattgcagaaaaaactggccaaagaacagaagttacaactgcaaaaggaaaataaagctaaacagaaactagaacaggaggcactgcgattgaaaagaaaggaagaactgaaaaaactgaaagagcaaaacaaaaataagcaaggctcaccttcttccatgcacgatccgagaatgataatgaacttgaacttgatggctcaagaagatccaaatttaaacactctaatggaaaccgttgctaagggtctagccaataatgaccaactggaggaatttaaaaagtttatcgagattgccaaaagaaggtccgtgcaagagaacctaaccaatcaccgttctcccactacagtagtacgacccccagccctgtctgaagataaaaacgtgtccgaggcaaatcgactgaactcgataactttggtgaaaagtactaaacccactacagccgaactccagccaaagaacaatgaagatatgaagaagcagccatccaaagagggaaacacaacggcagatgttccccaagtaaaagtaaaagcagaagaagaagaagaagaagaggatgtgaaagaaaaggatccaaaaaagaaagaagaaaaccccaccgtaccgaaaaggaaaagaagaaaccactcacaaaaggaagataaggacatgcagttaaccgcatttcaacagaagtacgttcatggcgctgagatcgtcttggagtttttggaatttactcattcaaggtattacttacccaagaaatccatagtagaatttctggaggatactggcgaggttctaatatcttggattgtcatccataaccttaaagagattgagaaattcaaaaccaaaaaactgaaattgaaagcgaaatctaaaacaaaaaaaccacaggaagatgatactaagcaagagcctggactcgagaaagaatccgagaaggaatccgagaaggaacccgagtttaaccctcttttcgaagatgattgtccgatcccactttacacccccatgactgtgaaattatcggggattcataaaagattcaatcaaattatccaaaatagcgtttcacccatggaccaggtcgtcaaagagatggaaaagattctggaaactggtacaagattgtctggttataatatatggtatcaactggatggatatgacgatgaagctctaagtgaaagcctgcgctatgaactaaacgaatgggaacatactatgagaagcaagaggcacaaaaggtaa

SEQ ID NO: 3410 - DNA, 237 bp, Saccharomyces pastorianus
atgcttcatatcaccctgcacttccgggtcgttgaagtttctaccgatcaaacgcttggcatcgaacacagtgttcgaagggttcatagcagcttggttcttggcggcatcaccgatcagtctttcagtgtctgtgaacgcaacaaaagatggggtagttctgttaccttggtcgttggcaataatatcaacacgatcattcgaaaaatgagcaacacacgaatatgtagtacctaa

SEQ ID NO: 3411 - DNA, 123 bp, Saccharomyces pastorianus
atggttgaccaatctgttgtcgaaatcttcaccacccaaatgagtgtcaccagcggtggccttaacttcgaagataccgtcttcaatggacaacaaagagacatcgaaagtaccaccacctag

SEQ ID NO: 3412 - DNA, 207 bp, Saccharomyces pastorianus
atggtcgccaccgtcaaggctatcaccatggaaggtttgacctggggtgctcaccaattcatcccaattggtttcggtatcaagaagttgcaaattaactgtgttgtcgaagatgacaaggtttctttggaagacttgcaaactaacatcgaagaagatgaagaccacgtccaatctaccgatattgctgctatgcaaaaattataa

SEQ ID NO: 3413 - DNA, 96 bp, Saccharomyces pastorianus
atggcattcaccgatttctctaagattgaaactttgaaacaattaaacgcttctttggctgacaagtcatacgttgaagggtatgttccgatttag

SEQ ID NO: 3414 - DNA, 3819 bp, Saccharomyces pastorianus
atggaacaaaacggccttgatcatgatagcagatccagcatcgataccatcaatgacacccaaaagagttttttagaattcagatcgtatactcacttgagtgaaaaattggcatctaacaccgcatttccagcatcacaaccgggggacgatgaggggcctaaaggggtggcaactgcaatatcacaaggttctgaatctgtagtctcatggacgactttgactcatgtatattccattctgggtgcctatggaggacccacttgtttatatcccacaaccacatattttttaatgggtacttctagaggatccgtactgattttcaatttcaacgagcatttgcaaacaattctagtaccgaccttatccgaggaccctgctgcccattccataagaagcccagtaaaatcgattgtcgtatgttctgatggtactcatgtggccgcctcgtacgagagtggcagtatatgcgtttggaatttgaacgtggggtatagagtcaaaactgctcatgaacccaccagtggtatgacccccaccccatctataccggcaattttacatatcgacgaccacctaagcaaagagattacgggcttagatttcttcggaactcgacatactgcactcatagtcagtgacagaacaggtaggatatcgctttataatggttatagaaggggattctggcaattagtttacaattccaggaaaattttagacctcaattcccacaatgaaagattaataagatcgcggctgtctcccctaataacaaaggacaaaaactccactaatttgttaagtgtactcacaaatacccattttgcccttctttcattatccccgcatgtttctttagtatgtcaagaaccaattgaatcctcaatacgacattcccttgtggtgaatagttccatttcatggacatataactcttccagagtcgcatattctgtaaataataaaatttccgttatttctgtgtctttatctgacctgaatgttcaatccattcagcattcttctgagtttccggaatctatattatctattcaatggattgatcagtttcttttgggtgtcttaaccatatctcatcaatttttagtactggatcctcaaaacgatttcaaggtcttactaagactagattttttaattcacgatttaatcatccctcctaataaatactttgtgataagcagaagaagtttttacttgttaacaaactactcgttcaagattggcaaatttgtttcttggtcggacattactttaagacgaatattaaaaggtgattatttgggcgcattagaatttatagaatctcttttacagccttattgtccattggccagtctgttaaagctatacgaaagcccagaagaaagaactaagcaacttatggaaccattttataatttgtctctggcggctttaagatttctaataaaaaaagacagtgcagactacgatagagtttaccagctattaatggttgtcgttcgtgtttttcaacgatttcccataaaatcagattcaattccttccctgaacgtctttttggagcaagctctggaattttttgaacccaaagacactgcggtatattttgaagttgtagcaaacattgttgctcaaggttctattacgtcaatctccccggttcttttcaaatctgtaattgattattacgccaaggaagaaaacataaaagttattgaagatttgattattgtgctagatcccgttaccctagatgttgatctagcagtcaagttgtgccagcactataatttgtttgacctgctaatatacatctggaacaaaatatttgatgattaccaaaccccgctggtggacttgatatacagaatatccaaccagaacgaaaaatgtattatctttagtggacctcaagcacctcctgagacggctgtctttgactatctgacgtatattcttactggcagacagtatccacagaacctgttcatatctcctagtagtaaatgtattcaaatacaaaaagaactgtccaagtttgtttttagtggttactcagtagaatggccattgaacagcgaccagaaactctatatatgtgaaaatccggaagaagaacccgcatttccctattttaaccttttgttaaaatttaatcccaacagatttttagcaatgcttaatgaagtattcgaagcctccttattcaatgacgataatgacatgatgaaaccaaccgaagaaactgagtccgtcagtaggcaatatattatcgacttgctaatggatgttataagaacctcagaacattctgatgatgtgaaagtgcttgttgctattttcattgcaaccagtatatcaaaatatcctcaattcattaaattatccaatcaagcactagactgcgtcgttaacactatatgctcttcaaaagccgaaggtacatttgaaatctcgcaactagctttagagtctcttctgccttactatcattcaaagaccactgaaaattttatattggaattaaaggaaagaaagttcaataaagtcctttttcatctttataagagtgaaaacaaatattccaacgcgcttttgctccttttagaaaccgataatgttgaaaaggaatataatactgacattctatccataaccgaatatatactcaagaaatgtccacctgcaagcttggaatacagtaaagtagttggtgttattgaaagtaacttcgaacttcttctttcaagagtcggtatcgaaaaatgcgtggcgatattttcagactttgactttagcctccatcaagaaattttgaaagtagagactgaagaaactcagcaaagatacttagataagctgttttctacgtcaaatatcagcaataaaaccgacaagcgtttgaggagtttatacatcgagttgaactgtaagtataagggcaaaaaggaaatcatatcatggttaaataggttagatctcaacaacggtgagagcttacatatcctcgacttggtaacccaaaactctaattttgaagctgcagctgtaattcatgaacgcttactagagttcaacttagcagtcaaagacttactggaatgtattgaacagtgcctcaatgaaggagaaacaaacattaatgtcttatctgattatttgaggaaggcaattgatgattgtaattccgctgctactgagaaaaagtcctgttggatattcttgattactttcctgattactttatacgggaactactctaaacatgatgacaagaaaaatttgtgcaatgaattgttgcaagaagcatttttgggactggttagatccaaaagttcctctcaaaaaaattcggggggcgagttttgggaaataatgtctttcgttcttgaacaccaggatgtcatactgatgaaagttcaagacttgaagcaattattattgaatgtcttcactacctataaattggagagatcgctctctgagttactccaaaaaataatagaagactcttcgcaggatcttgttcaactttataggaaatttcttaatgaaggttggtctatacacaatgatgattgcgaagtctgtgggaaaataatatggggcgccggtctggacccactactttttctagtttgggaaaaggtgcagcgccatcgggatatgattagtttagatctcgaaacgccgcttgtcatatttaaatgtcatcacggttttcaccagacttgtctcgaaaacctagcccaaaagcctaacgaatatacttgtttgatttgtgataccaagtctgattcaaagtga

SEQ ID NO: 3415 - DNA, 3330 bp, Saccharomyces pastorianus
atgatgaaaaaggacatcgaagtgtactgtgataatgctatggtttccaaaaatgtgcaagatattataagcgatactgatcagtcgtactcagttggaatcactgaggatagcttatggacattattaactgggtacactaaaaaggaatcaactattggaaattcagcatttgagcttcttcttgaagtcgccaaagcaggagaaaaagggatcaacacgatggatctcgcccaagtgactggccaagatcctagaagtgtgaccggccgtatcaaaaaaataaaccacttgcttaccagttcacaattgatttacaagggtcatgtagtgaaattgttaaaactgaaaaagttcaatcacgacaagggcgatgataatccctatattaacatcagagatcacttggcgacaattgttgaagtagtaaagagatccaaaaatggtatccgccaaataattgacctgaagcgtgaatttaaatttgataaagagaagagactatctaaagcatttattgctgctattgcatggttggacgaaaaggagtatttaaagaaagtgcttgtggtgtccccaaaaaaccctgctataaaaatcagatgtgtgaaatacgtgaaagacattccagattctaaaggctctcccacctttgagtacgacagtaatagtgcagacgaggattctatatcagacaacaaggcaggcctggaagatgaggactccgtcgaaggattagacaatttcaacgcgactgatttattacaaaatcaaggtctagtcatggaagatagtgagaatgctgaaaaaaacagaattcttttaaatcgattctttccattacagaatcagacatatgacattgcagacaagtccggtcttaaaggaatttcaaccatggatgtcgttaatcggattacagggaaagaattccagcgagcttttacaaaatcaagtgaatattacttagaaagcctagataagcagaagcaaaatacaggggatttcaggcttttccgtatatacgatttcgagggaaagaagaagtttttcaggctatttacagctcaaaactttcaaaaattaacaaacgcaaaagacgaaatctctgttgcaaaaggatttgatgaactaggtaagtcttatttggacttgaagacccttaacgaagataattttgttgcactcaataatacggttagattcaccaagaacaatgaacagcaagatgtattcttctggcacggtgacttgaagattccaccaactttgaaaaaaattccgaataagaataagcgtaagagacaggttaaggaaaatactaataatgctgttgctgaaaacagcaacaaggtttcggcacccaaaagaatcaagatcgagcagcatctcggcaccaagcatgacgtgacaggtactgaagataattcaagctctaacagaaagggctttataaaaggcaaggtggtcaatttcggcggcttttctgccggttctttgcgttcgctgcaaaggcagagagccatcttgaaagtgatggatgcaatcggtggggtcgcgtatttgagggagcaattttacgaaggcgtttccaaatatatgggttctccaaccacgttagataaaaagactgtccgaggagatgtcgatttaatggtagaaaataataaattaggtgcaagaacagagccaatatcagggcgaagaattatttttctgcctagcattgcagaggatgttattcaaagctatattttgagggagaaagatagcaaaaaagcaacctttactgatgttatccatgatacagatatatactttttcgaccaaacagaaaaaaatagattccatagaggtaagaagtcagttgagaggattcggaagttccagaaccgccaaaaaaatgctaaatctaatgttataaacgaggctgctgctcctaagagaggtacgttagccattgcatcagatgataaccgtaaaagcaaagacagaaagttatcagcgagaaaaacgccattggtcactgtaaccaataaggtaatcaagaccatatatcacgccggcactaaagaaggtgttcaggccctaatcagggctgttgttattactaaaagtattaaaaacgaaatagggtgggacgagataacgaaactatttcctaataactccctagataatctgaaaaagaaatggacagctcgcagagtgagaatgggccatagtggttggagagcttatatagacaagtggaaaaaaatccttgttatagcaattaaaggtgaaaagattttgctgaaggatgtagaggaactagatctttccaaactgctcggcgtttgggactcctttgatgagaaagaggtgaagagatcgctttacctttataagagctatgaagagaataggaaaaaattcactttgattcgtgacgatatatcggtgcattctaacaatgatcttgctatgtcgtctatgattcagagagagatatcttctttgaagaaaacttacacaataacggtttctgattttggtcccgaagacaccactaagatccgaagtgacgattacatccgtacagtgattcgatcaattttaatcgataattcttcaactgctagaaatgaaatagaagttttgaaagatgtcgaaaaggaatcaatagataatgtcattatggacatggctaaggaaaagcaggtctatctccatggttctagacttgaatgtacaaatacactaccggaagttttagaaagtaaagggaattacacagacttcgaagttgctttaaaatataggactaagtttaatgagttgctggaagctggaaatggtatcgtcatcgatcaagaaccgtctgacatatcttcctggatattgattgatctaatttctaacgacctattaaatatagatataataccaatgataaggaatgttcggccattaacttatacttcgagaagatttgaaatcagaacgcttacccccactttgattacatatgctaaatctcaagcaaaactaaacacaccgaagaaatcgattgtcaagattccactcggcaaaccattttcccgtttatgggtggacggttctggtgccattaggccaaaaatgtggaagcaggttgttactatcgtcgtcaatgaagtgaagtttcatccaggaataacattaaataggttacaagttaaatgccgtgacgtactttcgctcgatgaaatatcagaaatatgtgactggctttcaaaaagacaagtattgatgaacatgaaatatggtggtttctgggtagatcatagttggtattctatattttaa

SEQ ID NO: 3416 - DNA, 903 bp, Saccharomyces pastorianus
atgactgaggaagatgttagacgcgtagcgatcactatatatgcgaaaaaatgtgcagaagctgaggaggtgctgatgtcaccgctagtattcgacatgcatgacatccagcttctgcggaagtatggtatatgtggtgtgctgtctggaactttgcccactgcagcacaacagaatgtgttcttgtcggtgcctctgaggctcatgctggaagacgtgctgtggcttcaccaaaacaatctcgccgatgtgaagataataagacaagggggcgatgagataatagcaggaataacgccagaaaggggtgccaaactagccaaactggtggaagaccgcttaactaagtcgttcgattatcagacgaagtttaagaaggaccaacacattgcaaaattaaagaaaatcggtattatcaacgacgagacttccgcagaggaactacagcggttggacaaatctaacaacaacgaccagctgatcgaatcttctttatttattgacattgccgacaattcttctatcctaaaggacgatagtattgctttgaatagcctatcttgtgatgatattcgtaatttgttgtttaagcaatacgagcggtcagaaaagatgcagacatactttttgtacaaggcattgagagatcaaggatacgtcttgtctccaggtggtcgttttggtgggaaattcatagcatatcctggtgatcccctgcgtttccattcgcatttgactatccaagaggcgatcgattatcgtagcgagccgatcgacttgatatctatgataagcggtgcaagactaggcactactgttaagaaactttgggtcatagggggtgttgaggaagagacgggaagcacacatttcttctcggtggaatgggcaggtttcggttaa

SEQ ID NO: 3417 - DNA, 2181 bp, Saccharomyces pastorianus
atgagtaataaggaacagcatgttgatggggcttcagaaagtgctgtcaaggagatcaggtctatagctgctacgcgtgacggtggttacgtgcctccgttgatgacgtcgaagttgggcgtggactcttctcaatctcatgcgctgctgaatgatccgaccctaatagaggacttttcagatattatcaagaacaggcctaccatgggaagccagcaggcttcggggaacgaggattctgagagcatgggtgggagtgttgttgtgacgcccacatccaataagagctcacctttcaactcgaaactcagtatactaggtaatgcagcagaaaagacccatgcgcctttgcgacataaagacgacgacgacgatgtcgaggaagaggtggaggtggaggcggagaaacatacacacgaaggtagtggaaggggtcaacgacattcaaaagagaactccacagaactgcccggctcttacgattactcggattcagaatttgaggacaatttggagaaaaggctacaagatatcgaaacggaccctacggatagtggtgataatgaggaggaggtggaggaggagcagcattctgtggtagacgatattgcgaaccacgaactcgctgacatggacgattttagcgatggtttgaagtacgccatttccgaagacgaagacgaagaaggagaagaaaactactctgacgattacgattttgatagaaagttcgaagacgcggacttcgaaggtgaaagcggtagcttggacgaagaaaacgacgattatcaacccttgccgccaccaagagaactagatcctgataaattatatgcactttatgcgtttaacggacatgattcctcgcattgtcaactgggacaggacgaaccgtgtatattgctgaacgaccaagatgcctactggtggttagtgaaaaggatcacggacggtaagattgggtttgcgcctgcggaaattctggaaacattccccgaaagattggctcgattgaattgctggaaaaatgaaaatatgtcttcgcaatcggtagcttcgtcaacggattccaaggatgactcccataagaataacgagagtgatgcagacagtatgacccccacaccagcattgaagggatacgggaaaggtaacaagtctgttagcttcaatgatgttgttggttacgcagataggtttatagacgatgcagttgaagagaaatcctcggatagtgacgaagatggtgataacgagggtgagaaagacgacgaccatggtgatgacgacgatgatgatgcaaaagtaagacaccgggatgaattcactgaggctaagctgaactttaccaaatttgaggacgatgatatgagcgatgtagtgagcgatgtttccttcagtacgtctctgaatacacctttaaacgttaaaaaggttcggagagctaataataaaaacgacgtcctactcaaacctgtttcatcactagtaatgccactatcatccagtaatgaagacaaagatggactcaatgctaaccaagacgtaaaggacgagaaatcgaaaataactgatggtgagttcgatactgatttgaaaaaagttttcgaagcccctcgtatgccatttacaaacggaatggcgaaatccgattcccaaaactctctttcaacaattggtgagttttcaccttcgtcatcggaatggacgaacgattcaccttccgcaccagcggtggtagaggaaatcagtggtattccatcatctagagcaataaaggacatttcacaatatattcacccaagtttgaaaattcaagagtcgtcgaacaacgaaaacgtacaagatcaagcacaagacaagacgcaagataagcccaccccggaagctaccggagaaaagaacccccaagctgaagtggagcaacccaaagaggatacagaaaagcaatcaagcgtatcgctacattcatcatcagaggaagatttttacatggatgaacaaagagtgatatcttcagcaagcgtaaatagttcattttccggattaagggtaccttctaacaccaatgtatccgatccaacttctaagccacactccctggttcagcatctctatgctccagtttttgacaggatggacgtgttaatgaagcaattagatgacattattcgcaaatga

SEQ ID NO: 3418 - DNA, 213 bp, Saccharomyces pastorianus
atgaaggggaatgtctcctatacacattcagattcaccaaacagcaatggttcaaactcgcaagccaccggcacttctaatggtgcgtctgaatcatttagatttggtatggacccaactgtggaggggtattatattaaagcagcggaagtccaaaaacaggctctacgggagtactggaaaaaggagtatccagatgtcgaagtaccttga

SEQ ID NO: 3419 - DNA, 543 bp, Saccharomyces pastorianus
atggagtcccataacggcggtatcaatgacgatgtcaaactagacacattgaacagaggtatccctgatcagcctgatgcacctttaatttcggaagtcattgttcttcccgtggacgtttttaagtcgtacttcacctatttattatacgaaaaggctcacttttcaccagtagtgtttactttcgtggcactcgtgttcgtgatttttttgttcataataacccccccccacgataacaaggtttgcgatatcattcttctcgcatcgatggttgtaaatttcagttgttttgtgattgaactattacttatgagttatatgccactctgttcaaatgcgaaaataaaactgttgttggaggtaatagcgcataaaccaccagtagggggggtagaatggaagtttattacatacaatatgaaccaatatctctatgatcagggatcttgggggactccatacttttttcattgtgaatctgactgctatcgtcttttcattgtgaatctgactgctatcgtcttttcaaaacgcttatga

SEQ ID NO: 3420 - DNA, 735 bp, Saccharomyces pastorianus
atgcagtcagataatgatgtcaaactgaacacattgagtgaacctagtgcgcctttgatcacggagaatgttgctcttcccgatgttattttcaagtcccattttctctacctattatacgaaattgctcacaataaaccgttgatgattagtttcatgatacctatggttcccattttattggctttgacctttcactacgttgccgtttatattgtagcttcggtgctgtgtttctttggtttcatcaatattatttgtgtactaggaaccttcttccatgcgccaatctctgataaagaattcaaaataaagcttttactggaggtaatagcacgcaaaccagcgttaaagggcgaagaatggaggactattacatacaacacgaatcaatacttgtttgaaaatgatctatggaaaactccatactatttctataacgataaggagtgccatagttttttccaagaccttgttaaaacaggaagacgagttgttgcgtcggagggtccttcaaccaacgataataacaatacactgtcggatccttcaaccaacggcactgacaatacagaggatacaccaccagccgaggcttcgaacaatacagccaaatcgtatacttatagttctgacccgattctggaagcgtattttattaaagcagtggaagttgaacagcaggctcaacaagactattggagaaagcaatatccggacgtcgatatgccttga

SEQ ID NO: 3421 - DNA, 678 bp, Saccharomyces pastorianus
atgaccaaggccttccagaacggccgcacagaggccatccgctccgtgacgttgcagtccaaacagtttgttaagtcgctgctggaccaggacacctcggaccagaccaagatcgacctcctgcacgccgcgtgtgccgcgcactcaaagatcaccgcagagtgctcccgcgggctcggccaggaccgacacctatacgcgctctactgtatctggaaccggtggtacaaggacaagttggccctgcccccgctcttccaggacgggtcctgggccgcgatgcagaacaacgtgttgagcacctccaactgcggcaacccgtgtctcaagagcttcggctttgggcccgtcaccgccaacggcttcggcatcggctacatcatcagggaccactccatctctgtagtcatgtcctcgaggcaccgccagaccgcgcgcttcgcctcgctcatggagaagtcgctgctggagatcgaccgcctcttcaagcgccagttgcgggccgcaggccatgccgtccacgacccagccgcccaacgggcagagaacgaacagtacctcacgggcatccgcaaggaccgcgaccaggcagacccttctgcggcacacgccaaatccgaggacatgaagtatttgctgtccggctacgactacttcgacgtcagcgtctccgggtga

SEQ ID NO: 3422 - DNA, 1347 bp, Saccharomyces pastorianus
atgccccccacccccaagctgcaaagactacccgtcccgccgttacaggacacactcaaccgctacctggaacgcgtagagccgctgcaggacgagcgccagaaccgccgcacgcgccgcacagtgctctccgcggagaacctggacgccctgcaaacgctacacgaacggctgcaggactacgatgcacggctcgcagccagcaacccagaatcgtcgtacatcgagcagttctggtacgacgcgtacctgctgtacgacgccaccgtcgtgctcaacgtgaacccgtacttccagctgcaggacgacccgaccatcaaggacacgccggagacggccgcgcagggaccctaccgcgcacataccgtgcaggtgcgtcgcgctgcacggctagccacctcggtgctcaagttcatccgcgagatccgccgcggcacgctacgtccggacacagtgcgcggccgcacgccactgtcgatggaccagtacgcgcggctattcgggtccagccgcatcccgccgggccccggtgagccctcgtgccacctgcagacggacgccacctcgcaccacgtgatcgtgatgtaccgcgcgcagttctactggttcgacgttctcgacgcgcgcaacgagcccatcttcgcgacgcccgagcagctcgagtggaatttgtactccgtcatcatggacgcggaggccaacggcggcggcggcggcggcggcgccgctgcctccgccacctccacctccgccgcgcccttcggcgtgttcaccacggagtcgcgtcgcgtgtggtccaacatcagggactacctgttccacgcggcggaccgcaccaactggcgcaacctcaagctgatcgactccgcgctgttcgtcatctgcctggacgacgtggcctttgccgcggaccagcaggacgagctcacacgttcgatgctgtgcggcacgtcgcatatcaacctcgacccgcacgacctgcgcggcacgcccctcaacgtgcagacaggtacctgcctcaaccgctggtacgacaagctgcagctgatcgtgaccaagaacggccaggcgggcatcaacttcgagcacacgggcgtcgacggccacaccgtgctgcgactcgccacggacatctacacggactcgattctgagcttcgcgcgcggcgtcactaagaacgtcctggacatcttcggcggcaacgattctgcggtggcggcggcagcgactccgccgccgccgccaccgccaccaacctcattaccatcccgcgcaagctcgagtggcgcgccgacaatttcctccagtcgtcgctgcacttcgccgagacccgcatctcggacctga

SEQ ID NO: 3423 - DNA, 3471 bp, Saccharomyces pastorianus
atggaacaactcgacaccccctccgtggtcatcagcaagccgctgctgaagctgaaactcctcgatgccctgcgccagggaagctttccgaacctgaaggacctgctacaaaggcagttccagcctttggacgacccgaacgtccaacaagtgctccatctcatgctccactacgccgtccaagtcgctcccatgaccgttatcaaagaaatcgtccaccactgggccactaccggcaccacctttttggatatccatctcgatctaaatgaacaggattctaacggcaacaccccactgcacatcgccgcgtaccaatcccgtggtgatatcgttgccttcctcatggaccagccaagcatcaatgactgcgtgcttaattactctcgtctgcaagccatcgaaatgtgcaagaacctgaacatcgcgcagatgatgcaagtgaaacgctccacatacgtagcagagaccgcccaggagttccgaactgcgttcaacaatagagactttggccacctggagtccattctcgctagcacccgaaacgcagaactgctagacatcaacggaatggacccagagactggtgacaccgtcctgcacgagtttgttaagaaaagagacgtcattatgtgccgctggctgctcgaacacggcgcagaccccttcaagagagaccgcaagggcaaactgcccatcgaccatgtaaggaaagtcaacgagaacgacaccgccaccaacaccaagatcgccatcgacatcgaactaaggaagcttttggaaagggccaccagggaacaaagcgtcattgacgtcacaaacaatagcttgcgtgaggcccccacttacaagggttacttaaaaaaatggaccaactttgcccaaggttacaaactgcgctggttcatcctaagcagcgacggcaagctttcatactacatcgaccaagcagacaccaagaatgcatgccgaggctctttaaacatgtcatcgtgctccttacatttggactcctctgaaaaactgaagtttgaaatcatcggcggtaacaacggtgtcatcaggtggcatttgaaagggaaccaccccatcgagacaaataggtgggtctgggccatccaaggtgctataaggtacgcaaaagacagagaactcctgctacacaacggaacatcctcatcctctgcttccctgagctatggcttgtcgcctaataaagaaaaattacattttccaccaaagcggatggccaagagcccgcatatccccaaatccaagctggtacaagacacgggtaccggcgatgataaaccccacgcggatcccttgcccttgatttcttccagaagcgaaagtacgtgtgagatcacttcaaacccacattccaggaaatccacagtttcatctgcaaagtcatttgcaccattttctgccatggacgatgaccaagactctggtgaagattccgacgaggaccgtaattcttcatacgcagtgaataatgatggcgaaggtgacgacaacgatagtgaagaagatttaaacgccatttatggaccatacgtacaaaaactgcgtatgcttcaaagatcgatttccattgaattggcatctttaaatgaactgttgcaagatgaagaacaagtacacagcgaatactggaacaccgtcaacacttctattgaaaacgtttctgagttttttcaaagattaaatcgtttaacttcccaaagagagaaaagaatgattgcccaaatgaccaagcaacgcgacgtcaacaacgtttggatccaatcggtaaaagatttggaaatggaactggtagataaagacgaaaaattggttgcattagacaaagaacgtaaaaacttgaagaaaatgctgcaaaagaagttaagcaatcaaccacaggctgaaaacgaggttaacgatgattccgacgatgggaattcaatgttaaaagggtctcaggaatcaacaaatacactcgaggaaattgtaaaattcattgaagctacaaaggaaagtgacgaggattcggacgcagatgagtttttcgacgcagaagaggctgcctccgatgaaaaagccaaagaatcagaaatattacccacgaatgagaaacctccggttaaagaagaaccacaggaagaagctactgaagatgaaagcctggttgtgatcagctctccccaagtggaaaagaaaaatgaacttttaaatgaggggtcatttgtcggttatgaagatccggtaagaactaaattacccatggacgaagataatcgcccgaaagtgggtctctggtccgtattgaagtccatggttggtcaagatctaaccaaactgactttaccggtgtcgttcaatgaaccaacatcgcttttacaaagagtttccgaggatattgaatattcccatatcctagaccaagctgccaccttcgaagattcatccttaagaatgttatatgtagcagtattcaccgcatcgatgtatgcatctaccacaaacagagtttctaaaccatttaaccctttacttggtgaaaccttcgaatacgctagaactgatgggcaatatcggttttttactgagcaagtttcccaccatccacccatttccgctacttggaccgaatctcctaagtgggactttttcggtgagtgtaatgtcgattcctcattcaatgggcgtactttcgccgtacaacatttaggtttgtggtacattaaaatccgtcccgatcgtaataatggcgtttcagaagaaacgtattcctggaaaaagccaaataatactgttatcggtatcttaatggggaaaccacaagtcgataacagtggtgatgtcaagattacaaatcataccactggtgactattgtatgttgcattataaggcacatggttggacctcagccggtgcatatgaagtcagaggtgaaatatataacaaaaataatgaaaaactatgggttcttggtggacattggaatgattccatttatgggaaaaaagtgacctccaagggcggggaattaactttggatagaataaagacaacaaactccactactggtggaccgaaattagatggatccaagtttttgatctggaaatctaatgaaaggccctcagtaccattcaatttaacatcattcgcattgactttgaatgctttaccggctcacctgttgccatatttggcgccaacagatagtcgtttaagacctgatcaaagggctatggagaatggtgactacgataaagctgctgaggaaaaacatcgtgtcgaagtaaaacaaagagttgcaaaaaaagaaagagaacagaagggagaagagtacaaacctaaatggtttattcaagaggaacacccggttacgaagagtttgtattggagattcaatggtgaatactggatgaaaagaaaaaatcatgacctgaaggattgcgcggatatctattaa

SEQ ID NO: 3424 - DNA, 2298 bp, Saccharomyces pastorianus
atgcgaagaatacccatattttgtagcaccttaacaatgcccacgccttattactgcatatttttggctgttctcacattcgtagctaatattgtctctgcaagtacaacggcatgcttaccaacaaacgaaaggaaaaatgggatgaatatcaacttttatcagcattcattgaaggattcatctacatattctaacgcggtttatatggcttctggatatgccaataaggttcaaataggatccgttagtgggcaaactgacatctccatcaactataacattccttgtgttagttcatccggaacttttgcttgccctcaaggagatgttagtactaaaagaggctggtcgtgccaacgtaaggcttgctctaatgaccaaggtgttgcctactggagttcagatctgtttggtttctatacgaccccaacaaatgtaactctggaaatgacaggatactttttaccaccacagactggtacctacacatttagctttgcaacggtggatgattcagcagttttatcagtcggaggtgatgtcgcatttgaatgttgtgcacaagaacaacctcccatcacttcaactgactttacaatcaatggtatcaaaccatggggtggaagtttgcctcctaacatcgaagggtcagtctacatgtatgctaattactactatcctatgaaagttgtttactcaaatgctgtttcttggggtacacttccaattagtgtggaattgccagatggcactactgttagtgatgacttcgacgggtatgtctattcctttgaagatgacttgtcccaggccaactgtgccgttccagaccccccaaactataccactacaggaataatcaccaccacaacagaaccgtggaccggcgcgtatacaacgacagacactcagacctctactgttacaggtcccaatggtttaccaacggatgaaaccatcattgaagttaaaacaccaacaagtgtcagctcttcaattgccacatcgtctgatgcaaccagttctgctaccacatcgtctgatgtaaccagttctgctaccacatcctctgacgtgaccagctctaccgccacatcgtctgatgtaaccagttcaacttcttccacatcttctgctgtgactagctctgctgccaagtcaggaatcatcactactacaacagaaccatggactggtgcttttacaacaacgtctactgagatgtctactatcacaggtaccaatgggttaccaacggatgaaaccatcatcatagtcagaaccccagccagcgtcagctcatcttccgccgcatcctctaacgtgactagctctgccgccacatcagacacaattacaggctcgaaggatctaacatctatagtttcttcgaccaccacttcaaccgactctggctcccctaagccttctggatccacagctacggtaacaaacgaacaaactactttaatcacagttacttcctgcgagtctggtgtgtgtaccgagtctgtatcatcggctatcgtttctacagccacaactacggttagtggcgtgactacagaatacactacatggtgtcctatgtctaccacagagccaacaaagccaactacgttgattacagttacttcttgcgaatctggtgtctgttctgagaccacctctcctgccatcgtttctactgctacgaccactgttagcggcgtcgctactgaatacactacatggtgtcctatgtctaccacagagccaacaaagcaaactactttagttacagttacttcctgtgaatctggtgtctgttccgagaccacctctcctgccatcgtttctacggccacaactgtcgtcaatgacgctgttacagtgtacaccacctggtgcccattaacaaccaatacagcaacggttagcggaagtactaccaccggcgttactggtaactcagtaaactccgaagctgctgaaacgaaaaccgtgacccacggcaacggtgtgccttcgatttcagaatctggttatgctgaagcacatccaactactactgctcatgcgattggctatagcagtagtgttgcttcagtcccaggggccgctaacaccaaggaccatacaactacttacttaaacactgtctcgcaacaacctcgtagcacttccataagcggtgtagtaggatctagtaccgtttctttagaaatgtcaagctacgctggtattgccaacggtctactggctaatagtgctctaagcgcgttcattgcctccatgctgctggcaattatttga

SEQ ID NO: 3425 - DNA, 615 bp, Saccharomyces pastorianus
atgataaacccaaaattctctatgtctcaccgttatatgtttttggcggtatttgccttcctggctctagttaatgtagcttcaggaagcacaacggcatgtttgccagcaggcgtaagaaaaaacgggatggatgttaacttctacaagtatacattgaaggactccaccacatactcctacccaggatatatggcttacggttacgcctccgggcaaaaattaggctctgttggtggtcagacaaaaacttcgattgactataacattccttgtgttagttcatccggaacttttgcttgccctcaaggagatgctactactacgagaagaggctggtcgtgccaacgtaaggcttgctctaatgaccaaggtgttgcctactggagttcagatctgtttggtttctatacgaccccaacaaatgtaactctggaaatgacaggatactttttaccaccacagactggtacctacacatttagctttgcaacggtggatgattcagcagttttatcagtcggaggtgatgtcgcatttgaatgttgtgcacaagaacaacctcccatcacttcaactgactttacaatcaatggtatcaaaccatgggttgga

SEQ ID NO: 3426 - DNA, 1881 bp, Saccharomyces pastorianus
atgttcaatcgtttaaacaagtttcaagctgccgtagctttggccctttactcccaaagtgcgttgggtcaatcctttggcaacagctcttccactatcacctctgcctctaccgcaagtgcttccgctaccgtctcactttcttctagtgacggtactgtttatttgccatctactacaatttctggtgaccttacagttactggtaaagtgattgcaacagaagcagtcgaagttgcagctggtggtaaactgaccttgcttgatggtgaaaagtactccttcacatctgatctaaaggttgatggcgaattgatcgtagcaaagtctgaggctacttacgaaggtaccgctttcgacgtctcaggtgcaactttcgaagtttctggtaacttcagtgccgaagaatctgctgctacttctgcatccatctactccttcactcctggctctttcgatagcaccggtgacatttctctaagcctatcaaaggctaaaaagggtgaagtcactttctctccatactccaacgctggtgttttctctttgtcaaacgctattctaaacggtggttccgtctcaggtctgcaacgtagagacgacgacgaaggatcaaagaacaacggtgaaataaatctagacaacggaagtacttacgtgattgttgaacctgtctctggaaatggtacagttaacattatctccggtaacctttacttgcactacccagacactttcaccggtcaaactgtcaactttaagggagaaggtgttctagccgttgacccaaccgaaaccaacaccacccctattcctgttgtcggctacactggtaagaaccaaattgccattacccaagacgtcagtgtctcctacaacagcgaaaccggtgttttaactgcaaccaagggtaacgtccaattctctttcgctatcggtaccggcttctccagttctggcttcagtgtctccgaaggtctcttcgcagaagcttatgcttacttcctaaactacgatggtgttatcgcttctaccggtgctacatcatctgtttctgccacatccaccaccccatcatcctccgcctctggttcagccacttcagctagtgtctccacctctggtaaattcaactccacttctgtctctgactcagttacccactctggtgcttcatccactgcctccggttcagttacctactctggtgcttcatccactgcttctggttcagttacctactctggtgcatcatccgttgcctccggctcggttacctactctgctccatcttcagaaaccgcatccgtctacaccgaaacactaacttacgcaaatgccacaagcactgtcgtagtttcctgttcaaagacaactgactctaacggcaatatctacactattaccaaaaccgttccatgttcttccaccaccatcgccaccatgacttcttgtgatgacaatggatgccatgttgttccagcaccaacctccactggtgtcactgcaaccactgtttcttcaaagtcttacactaccatcactgtcactcactgtgatgacaacggctgcaatgttaagaccgtcacttctgaggctcctaaggaaacttcagtcaccactgccactaccattgctccaaaatcatacacaactgccactgtcacccactgtaacgacaacggctgtaccgtcaagactgtcacttctgaggctccaaaagccactacagtagttaccaagtctggctctccaatttctccagctacaacttctcaaacccacaccggtatcatcgttcaatctgaaggtattgctgcaggcttgagaaccaatgctttgagcgctttggttggtgcttttatttttgcctttttttaa

SEQ ID NO: 3427 - DNA, 3117 bp, Saccharomyces pastorianus
atgggcctcatcaagaaggtgacccattggtcgtacgataatctgattgattatctttctgtaaaccctacaagagatgaagtgtccctttataaagtcgatccggaaaatgaatctgatgagtctattatgaagttacgcaccgtcaaagatttcggtagtattacttgcttggactattcagagtcagaaatcggtatgattggggttggtgaaaagaatggatatttgagaatttttaacatttccggatcaaatttctcgtctttgacaaatcaagtgctaacgagctcaaacgccaataatgatggttctacagcaaatgcaggcgttagcaaatcaatgcaggcagaaaactccgttggctccatttcaaatgcaaaagacaccataggatatacggaatcggaaaccaactatgacatacgtgtgcgagccaaaaagcaacggtgtataaattcactgggtataaatacaaacgggcttatagccatggggcttgatcgaaataagcatgattcatctttacagatttgggacatgaattaccatgatgactcgcaagaaacgatcaacccaatgtttagttactgtacaaacgaaagcatagtatctctaaaattcctcaatgatacgagcatattggcttcaagtacaaagtttttaaaggagattgatgttcgatctcccagtccgatttatcaacatcccactcgattgacgtatgatatcaaattgaacccattcaatgattggcaattcagtacttacggagatgatgggactttagctatttgggatagaagaaagttgtctgaccagattacactcggtaacttgaatgttgcatcgcctttattgacatttgaaaaactggttggatctggcgcagcttcaagaaaatacatgaattcttgctttaggtggtcatgcattagaaataatgaatttgcaactctgcatagaggtgacaccataaagagatggaggttaggctattatgcccttgaaaataacgatactgaggctaatggtcgccaggaggaaaatgttgagaatatatttgtttcctcggtgcacgatacgaacacaatgtacgatagggtcgccactttcgattttattccaaaaggtaattgtggcacaagtttaatctgtatgagacaatctggcacaatatacagaatgcctatagcagaaataagctccaaggctattctaaataatagaaactctctcttattatctaatttcgagaactctgaaatagaagaaattagagtcaccaatgagcacgaaaaatccaatctagaaaatgtgaaaaccgtcaaaaaaaatttgtcttttgaagatttagacgttagtgacgattattttccatctgaacatgatgaacaaaataacgagattgaatattctgagttgagcgaagaagaaaatgaagaagaaaatgacgtccttggtagtaagcgtgggtttgaactattctggaagcctgaaaaattgttagaaaaggacattagtgtaataatgagaacaagagcgtcattgggatacggtttagacccaatgaatacggtcgaaatgatcgactcttctaaaaatctacaaaataacgcctatataaggaatacatggagatggattgcaatcgcgaaagcctctgtagatgatggtacaatggtttctggtgatcttgatttaggatatgagggggtaattggtatttggaatggtattaacggaatatcgaatcaagacagatataggcaagagactattctctctgacaaacagctcaataaagaaatggaaaaaatcatcaagttaagaaggaagaatagagaccgcaacactcctattgccaacgttgccgattcaccgaaatatgtacagaggagactttgtctgataatctcaggatgggatctttccaggtccgattacgaagacaaatataacataataatgaaaaatggccattatgaaaaggctgccgcatgggcggtattttttggagatattccaaaggctgtggagatattaggatccgcaaagaaggaaagattgaggttaattgccaccgctattgcaggttatttggcatataaggaccaaccaggcaataacgcatggaggcagcagtgcagaaaaatgtcctctgaattggacgatccttatttgagggtcatttttgcatttattgcagacaacgactggtgggatattctttatgaacctgctatatctctgagggaacgactaggtgtggctctaagatttttgaatgatgcagatttgacaactttcttggaaagaacgtcatccacggtgatcaaaaacggtgaattagaaggtttaattcttacagggataactccaaacggtatcgatctgcttcagtcttatgttaataaaacaagtgacgtccagagcgctgcactaatatcgatttttggctctccacggtatttccgtgatcagcgggtggatgaatggatacaaacttatagagatatgctcaaatcctgggaattcttctctatgcgcgccaggtttgatgttttgagatcaagactatcgagaacaaaaactggggtgttgactgccgatataaagcctcgtcaaatatatatacagtgccaaaactgtaagcaaaacattaacactcctcgtgcatcaccgccttccagtgcgacatcgactggtggtgggaactataaaaatggagaaacctatagaagaactaatagtgattacaaaaaattcaatactggtaactccgaaacgccaacggtcgatgaaaaaccaagacataaatactcttgtccacactgcggatctcccttcccaagatgtgctatttgtctcatgcctttgggaacgtcaaacctacccttcgtcatcaacgggacacaacagcgggacaaaatacggccggaagacttccaagatgatgctaaccgggaactagtgagcaggaaattgaaactgaacgaatggtttagtttttgtttaagttgcaatcatggtatgcatgcgggtcacgctgaagaatggtttgacagacacaatgtctgtcccaccccaggttgcacttgtcagtgcaacaagtag

SEQ ID NO: 3428 - DNA, 288 bp, Saccharomyces pastorianus
atgttgttcaaaccgaaaacacgggcaataccatcaccgacggcaagaaccctaccggtttcgttcaagttggcctcatcggacacgcccttgattctttcctctaaaatggaggaaacttctgtgggttgcgccttggtggaagccaatcttctggcggaggccaaagcagcaacaccagcggcaggtcttgcagctctggcggagtgcagtaaagttctcgacagagaacggatagcagcagtacgagctaacatcattgtatgtgcgttattattgctattgtga

SEQ ID NO: 3429 - DNA, 1431 bp, Saccharomyces pastorianus
atgacacttgaaacatacacgacctcaaacaaactatttcgtctgtatatgtctgaatcggtagctgttataggggcagggttagtaggctgtcttgctgcattggcattatctaaagagggatatcaagtcacactttatgactttagacatgatccaaggttggacaccactcaaaataaaaacttgaaatccatcaatttggcgatctctgcccgaggcattgatgcactgaaatcggtagattttggtgcgtgtgaacgcattttgcaagatatgattcccatgaaaggccgaatgattcatgatttgaggggtgagcaggaatctcaattgtatggcttacatggagaagccatcaattccatcaatagatctgtattaaataataaactattggatgaattagaaaagactacagcagagctaaaattcggtcataagttggcccgaatcgaatggaccgatgacaagcaaatatgtcattttgctgctgaggaagattcgaaggtaccaaatatagaaaaattcgacttcatcataggttgtgatggtgcttactctgctacaagatcacagatgcaacgtaaagttgagatggattattcgcaagaatacatggatttacgttacattgagctttatatccccgccaccaaggtatctaagcaggagtatggagggaattttgccatagcgcccgaccatttacatatttggcctcgtcacaggttcatgttaattgctctggccaacagcgacggctcgtttacttcgacattctttgggcctaaagatcaaatttcagatttgatcacttcagagtcacgtgtgaagaactttctagtcgagaactttcctgatattgtaaatattatggatctggacgacgctgtaaaaaggtttatcacatatcctaaggagagtcttgtttgcgtgaattgtaaaccatacgacgttcccggtgggaaagccatcctactaggtgacgcagcacatgcaatggtaccattctatggccaaggcatgaattgcgggttcgaagatgtgagaattctaatggaactgttgaaaaagcactcaggtgattgttcaagtgcctttgttgagtatagtcaaacaagacacaaagaccttgtttctattaccgaactggcaaagagaaattacaaggaaatgtcacatgatgttacgtcgaagcgtttcttgtttaggagaaagctcgatgctctattcagtgtcatgatgagagaaaaatggatacctctgtacacaatggtatccttcaggtccgatatttcgtactccaaagcgttagaaagggctgagaaacagacccgaatcttgaaatttttagaatctttggcaatcgggatattatccgtcagtagtttcaagcttttcaagtttttggccagagagcggtcctag

SEQ ID NO: 3430 - DNA, 2370 bp, Saccharomyces pastorianus
atgactacccaattaaggtatgaaaataatgacgaagatgaaagagaagagcacaacctctttaccaatagatccacggtgatggcaaattttgaagagtggatcaaaatggctacagataataaaatcaattcgcgaaatagttggaattttgcattgattgattatttttatgacttggacgtcctgaaagatggcgagaataatattaatttccaaaaggcatcagccacgttagacgggtgtattaagatttattcttcaagagttgattcagtgacaacagagacagggaaattgctgagtggattagcgcaaaggaaggcaaacgattcatctaatggaagcgacggtaccaacggaaatggtcaaggacttgaagatgacgacgatgaagaggcaaatgtgcagatcgatccattaactggtatgcccatttcgaatgaccctgatgcgaacaatacaaggcgaagagtttacaatcgtgttttagaaaccaccttggtggagtttgaaacaattaagatgaaagagttagaccaagaactaagcattgacccattgtttaagaaagccttggtagactttgatgagggcggtgctaaaagcttattattaaacacattaaatatagacagtaccgcaagagttatatttgacgcttccatcaaggataatcagcaaatgactcaagatgaagccattcaagatcaaagtcaagaagacgatccaatcgaagcaaacagtgtagtgaacagtgataatgagcacagccagtcactacttagtagctgtaacgattcaatgctaaacatttcagtcgcgaatgctccctcaatggaggatgagattttatcccttggtatggacttcataaaatttgaccagattgctgtttgtgaaatttcaggatcaattgagcaacttaggaacgttgtcgaagacatcaataaagcaaaaggtttcatagagaatgtgaatacgaaattcgataactttttgacggaagaagaactacaagaggctgtcccagataatgccgaagacggtatcgatgaacttgatatgggcatgcagcaggagctagaatatcctgacgataatcatgataatactccccaagatgaggagggtgatcaagatgatggaaaaagcgataccgtaggaggcatatttgaaaaagatctaatgacatattttgatgagaacctaaatagaaattggagaggaagagagcattggaaagtacgtaatttcaaaaaaatgaacacagtgagtaaaggagctgatgcattaacaaaaacaccagctcctgtaggagattctacgagtaaaaacatcgaaaatgacaagttaacggatgctaagaagaagagcaaacaaaaaaagactttagaaattgattttttccaaaaggatgatgggtttgaagataagatttttggacccaagggacgaacaaagattgatatgccaataaagaataggaaaaacgattcgcattatttgctaccagatgattttcatttttctactgataagattacaagattatttatcaaaccgggacaaaagatgagcctttttcaacataagagacattcggcgggcgatactagctcaagggttcttgacaaaagtacggcctctaccaatgctacaaacaatgatgcacctgctattgcagatgagcatttttgggcaaataactatgaaaggatagaacaagaacaaaaagaaatagaaaactctaaggaagttggcgatgtggttggtggtgcactggataacccattcgaagatgatatgggcggtatcgattttaaccaagcttttgaaggcgctgacaacagcgaggaagggagcgtgaaactagacttacaggatgacgaagaacataaattccccattagggacaacaaggtcacatattcaagggtctcaaaaaaggttgacgtgagaaggttaaagaaaaacgtatggaaatcgataaatagtttgatacaagcacaagatgccaaaaaagaggatacacttcctaaagaggatgaaacttctaaagaagtcgaaccacccaaaacagacgaaccccccaagacagacgaacctcttgaagaagatgagcgtcccacagtggacgagccttccaaagaggacgagcctcgcaaggaacttaaattttctgaaattatccaaggtataagtaagatgtactcggatgaaacgttaaaggacatctctacgagtttttgtttcatatgccttttacacttggctaatgagcatgggttgcagataaccagcacagacaattacgatgacttgatagtgaactatgaggatctggtgacagtacaaacagcgtcatga

SEQ ID NO: 3431 - DNA, 969 bp, Saccharomyces pastorianus
atgaaagtaatgatctcttttctttgtactccgaagcttctcaaagccttcggacttacgagatccttatcgccgaaggagaacagcttcgggaaaaaagtgcatataagaaaacaaggtattctgttccttcaacattggcattgcaaaacagatggtcatgcatccaaaatggctagaataataccacttttgtttaaactggtcaatagagcagtaatcttacccacggtggggtttacacttggcgttggcgcgtttgtgaaagcatggccagatgatgccggtggcctatcattgaatgatctaaaggcgcctttaaagctggccagcgcagcaaagagtcgacaacctatggtgctgcagagaacggacatccttgcacaagttgaagaaagcgaaatctacaaaaagttggtcaacgaagataatacagagcatattttattcagcgagaaaatacctagcggacatagagaataccatgtcggacaaggccttttgtttggcaagggaaagcttgaaatcgatccgttagttttccatgatgtggaccgcggtgaagtgaccgtgatttatcatttgggcactgagttggggaacagggaaggtaacgttcataagggcctactttcattgctattagacgaagcactgtgttactgcggtttcccgctgttacccagcaaaagaggtgtaacagcaaggctgtcactagagtttcttgaagacatacccgtggacacaaccattatgttaaaagcaagtgtcaaagagtgcaagggtagaaaatgtgttatcgagggacatttagaggagttcccatcagaaatggcctctggaaaagtgggtaaaggctggaacttattcagccccaaaaatgaagcagtcaaaaagtttgttaaagccaattgcgttctcgttgaacctacttggttcaggtacttcaattggctagacatgttttga

SEQ ID NO: 3432 - DNA, 303 bp, Saccharomyces pastorianus
atgtctagccaattgaagtacctgaaccaagtaggttcaacgagaacgcaattggctttaacaaactttttgactgcttcatttttggggctgaataagttccagcctttacccacttttccagaggccatttctgatgggaactcctctaaatgtccctcgataacacattttctacccttgcactctttgacacttgcttttaacataatggttgtgtccacgggtatgtcttcaagaaactctagtgacagccttgctgttacacctcttttgctgggtaacagcgggaaaccgcagtaa

SEQ ID NO: 3433 - DNA, 510 bp, Saccharomyces pastorianus
atgcgagattctcatattcaatcattcttcaggttaacgtttcttgaatctgttatactaacaaaatgtttccgtttgcaaatcttttttgctcgttttttctatttttttaatcagatggcctccttacctcacccaaagattgtcaagaagcacaccaagaagttcaagcgtcaccactctgaccgttaccacagagtctctgaaaactggagaaagcaaaagggtattgactctgttgttagaagaagattcagaggtaacatctctgaaccaaagatcggttacggttctaacaagaagactaagtttttgtctccatctggtcacaagattttcttggttgctaacgtcaaggatttggaaactttgaccatgcacaccaagtcttacgctgctgaaattgcccacaacatttctgccaagaacagagttgtcattttggccagagctaaggctttaggtgtcaaagtcaccaacccaaagggtcgtttggctttggaagcttaa

SEQ ID NO: 3434 - DNA, 228 bp, Saccharomyces pastorianus
atgaatgatacgaagctattgtccaactgggctaagctcgaagaacgatacaaggacgtcatggtctttcagaaaataaaagtgtcttactccgcgatgccgagccagaaggcatccgataggcaaggttcgacatcaacatcacctgctagagagcaaggtctaaatccaaccacgttacttgtaatgaccctggtcgcgttgcttttgaactggttatactactaa

SEQ ID NO: 3435 - DNA, 1377 bp, Saccharomyces pastorianus
atgccatcagacccacgttcaggggtcttgactctgctccatacagcatgcggtgcaggcgtattagctatgccgtttgcattcaagccgtttgggttaatgccagctttgataacactgacgttctgtggagtatgttccatgtgtgggttgctattgcagacgcgaatagtgaagtacgtacctaaatctgaaaacgtttcatttgctaaactcacacaactaatcaacccatcgttgagtatagtatttgattttgccattgctgttaagtgttttggagttggtgtctcttacttgattattgtcggagacctgatgccacagataatgtcatcgatcttataccgtaatgatgataacaccggggattcgcaagagcatcactggttcttggacaggcgattatacatatctttagtcataacgtttgtcattgctcccttatgcttcaagaaaagcctaaattctctacggcatgcttctatgattgctattgttagtgttgcttatttgtgtggcttgattatttaccattttctaaatcggtcccaattagagagaggccaagtctattttatgacaccccaccaagatgcccaatctcattcatctctgacaacgttgccgatttttgtgtttgcttatacttgtcatcataatatgtttagtgtcattaatgaacaagcagacaagagcttcaagatcctcagaaaaattcctattgttgccatttctttggcctatattttatacatcgttattggtggaacaggttatatgaccttcggtgataatattgtagggaatattatcacactatacccgaactccatatacaccaccatcggaaggctggctatgctactactcgttacgttagcattcccgctacaatgtcatccctgtagatcgtccataaaaaacatgattgtttttattgaaaacttaagaaagggcacgacgcatgataccacgactggctttattcctctagacaatctaagtagtgaagatccccaagaaatagcacaacaagacaacgagcaatcaaatctgccaggtgaatcaataagacaaactaatgtcatcactctttgtatcttgatattttcatatttgttggccatttcaattacttccctggccaaagtcctagccattgttggagctacgggatccacatctatctcttttattttacctggtctttttggctacaaattaatcggctcagagtttaccaacaggaatgacagagtgccgacaagtgtaaagattttcaagtatttaggtctattcctatttatttggggtatagcagtaatggtaacttctttatttgctaccgcatttttaggatcatcatcccattga

SEQ ID NO: 3436 - DNA, 348 bp, Saccharomyces pastorianus
atgaactgtgctgacaacagtggtgccagaaacttgtacgtcatcgccgtcaaaggttctggttctagattgaacagattgccagccgcctctttaggtgatatggttatggccaccgtcaagaaaggtaagccagaattaagaaagaaggttatgccagctattgttgttcgtcaagccaagtcctggagaagaagagacggtgtctttttgtacttcgaagacaatgccggtgtcatcgccaacccaaagggtgaaatgaagggttctgccatcactggtccagtcggtaaagaatgtgccgatttatggccaagagttgcatccaactccggtgttgtcgtgtaa

SEQ ID NO: 3437 - DNA, 498 bp, Saccharomyces pastorianus
atgaccccgttgattgagagcttataccagaagacgttcaagttaccttgggatccaagaccaggcgagtttacaccaagagaatgtgtagaagatattttgcaaggcggaaacggatgggctaagaatgaaaagggcataaatctaatcgatctgcaggcattgaagttgaacgaattagaggaagactattacaacccgaattacggcaaaagcgcagcgagcaaagcaagcaattggcctccaaatccaaacgatgatggttacagtagcatggataaaagagagtatttggaaaagaaacaaaactggagtcacatgtcacgtgcacaacgtgcgaagctgagaactcataatgacgacgatcacgaaaattcagataatgacaagaacgctaacgatagtagtgacgttatagaagacaacaaccccacagactttttgacagacagaataagagataacaagagctggtctataaccagtccctcgggataa

SEQ ID NO: 3438 - DNA, 1236 bp, Saccharomyces pastorianus
atgcccctgttggtcatgtttgagagcgtgctgtgcaaggtaatcgtcaggaaagtggcgtacacagagatcgactatgaggcgtacatggagcagatcgaaactattcaactcgatggcgtactggactactcccaggtgaggggtggcacgggcccactggtgtacccagccggccacgtcttgatctacaagctcatgtactggctcacggagggtatggaacatgtcgagcgcggccagacactgttcaggtacttatatctcttaacactggccttgcaaatgacgtgttactaccttttggacctgccaccctggtgcgtggtgttagcgtgcctttctaagagactgcactctatttacgtgctgcggttgttcaatgactgcttcaccactcttttcatggtcgtcacagtcttgggcacaaccttggcttccaggtgtgtccagcgccctaaagtaaggaagcttctcacgctgatggtctctgtgacctacagcatggctgtgagcatcaagatgaacgctctgctgtacttccccgcgatgatgatctcgctgttcatcctcaacggcacgagccttttgatgaccctgttggacttgctcgggatgatcgcatggcagatcgcagtcgcagcaccctttctaggccactccccgcgaaagtacttccagtgtgctttcgatttcggcagaaagttcatgtttaagtggagtgtcaactggcagatgatggacgaagaggcgttcaacgacccgctgttccaccgagccctcttggtcagccatcttgttgccctcactactttgtttgtcacaaggtaccctcgtgtcctgcacgatttgtgctcctccctacgccatccgctaaggggcagcaccgctgccaccacaaatcctgtcaagaccgtcccattcatactgatcacgtccaactttatcggtgtgctcttcgcaagatcgcttcactaccagttcctttcctggtatcattggacgctgcctgtgctgatcttctggtcgggaatgccctgcttcgttgggccgatctggtacgccctgcacgagtggtgctggaactcgtatccaccaaactctcacgcaagcacactcttggtggcactgaacgccgtgctactgcttgtaatggtcctgacgcagctatcaggctcaagcacaccaatcgaaaatcactcctgtaagaagctcatggagaagaaacgtaattag

SEQ ID NO: 3439 - DNA, 447 bp, Saccharomyces pastorianus
atgctcccatctaattcagcggctccgacaaacctatcatcgtcgtcttcaaacaattccacgctgaccaaccccaccacggcaacctcggcgtccaccaacttaatcaacgacttgcccacgggacctactgccaattcgctaattccagatttgcattccacaccaaccatacctttcttaccaaccaaccaaacactgctaatgtcctccaccgcacctggcaccattggcaccaacatacacccatcgcaatcttcaccatctccatcgctacgggacaatttcacctccgtgccagtgaacatgtcctcaactgcgtcgctgttaatgaatgattcttccttggggtggggatccaaccacatgaacgtatcttcatcttctcaatcggcatcatcaagaccatttggcatttggaataatgacatgagcgtctggagttga

SEQ ID NO: 3440 - DNA, 444 bp, Saccharomyces pastorianus
atgccaggccagatcatcagcgttccatttttgtcacagaccgaggacatggacaagtacctgctggagtaccgcagcctaaagctgatccgccagtccagcgactccttccaacctcgcaacgctccccctcaccagtcgaactaccactcgcattataaccacatgaagtataataatacaggtagctactactataacggcaacactcataaccaggcaagtctacagcctatgaacaggcctattccgtcgtcttcttatggaacctatagccataacaggcccaatgacgtaacatttatgaatgctcagaagaagcacaacaggttcaacaccaacaacacagtgaaccaacagaaatacaaacaatactcgcaaatatccctccaaccccgtgatcactgcccatttaaagcaaacatacccacaactatactataa

SEQ ID NO: 3441 - DNA, 1353 bp, Saccharomyces pastorianus
atgatgttgagtgtaaactattatccaaagtctatcgaattcttattgaatatcgcgaactccatggataaggggaacttagcttgtcagtatgtggcaaatggatttttggagagtgacgaaagaaagcaatactacgataaacgtatcctagtttacgatctggttttcgaaactttaattaaagtagatgaactagctgaaatgagaactccatccaagacccaaaaacaaatctccatatctaatgacgatgaagtgaaactgagacaaaaaagttacgacattgccctcaagtataacgacaaactattccattatcatatgtatgattggtttgtatcgcaggacagagaaaataggttattagaaattgaaactccattcatacttccttatttaatggaaaaggcaggtagttcactaaaaatctctaatgttctctgggtttattattcaagaagatctaaattttttgaatccgctgaaatcctttaccatttagccacgtcgaattttaaaattacactatttgaaagaatcgaatttctttcacgtgctaatggcttttgtaatagcgtgtccccattaagccaaaaacaaagaattgtacaactagctagtcgaattcaagatgcgtgtgaagtcgccggtattcaaggtgatatattatcgcttgtttattcagatgcaagaatcgatcccacaattaaggacgagttgatcaaaacgttggatggtaaaatcttgagtacaagcgagctgttcaatgattttgctgtgcccttgagttatcatgaaattgccttatttatattcaaaatagcagatttcagggatcatgagatgattatggccaagtgggatgaactgtttcaatctttgagaatggaactcaatgctaccggaaagaaagaagactcaatgaacttcatcaacctactgtctaacgtattgattaaaattggtaagaacgttcaagactctgaatttattttccctattttcgagctattgcctattgtttctaattttttttatgaaacacttcccaaagagcacatcgtaccgggttcaatagcgacgatcttcattacagctggcgtttctttcaacaagatgtactatattttaaaagaattaatcgaaacatcagactccgataatgccgtattcaataaagaaatgacttggttaatccacgagtggtacaaatcggatagaaaatttagagatatcatttcctatgacgatattgtaaatcttaaggaatataatatcgaaaatgatccaattgaaaagtacgtcaagaacactggcaataacttaggtatttgtttctacaaagaataa

SEQ ID NO: 3442 - DNA, 2205 bp, Saccharomyces pastorianus
atgcatttattaagctcatatccaattgccggttccaatccgcttatgagagcgggcgccataggggccacctctggtagcatcaatcctagtatgtccaacacgaatgagcacattcgtgtttctgggatggggacttccaagccactggaactggcggggaagtacattgatcatttgcagaataaggacactagcacccccgtactcgatgaaagatcgtactataacagcggggtggactataatttcagtaaagaaaaaaatggtttgggagcgtttactcctttcgaaagacaggacatatttgacattccagatgaaattttacagggggtttccacttcagaaacaagaacagatatgggtatttttcccgaattgaaccgatgttggataactatcgatgataaactgatactctggagcattgacaatgacaacgagtaccaggtgatagacgtcatgaagcacactatccgtaaagtggccttggtaagacccaagccgaacacttttgtgcccactgttaaacagttgcttttgatatgcaccacgatggatctttatatgtttgccatttccttggacaagaccaccaatgaactaagtgtgttcaatacacatttatctgttcctgtgcaaggaattgatataatagacatagtgtctcatgaacgatcaggtagaatttttttcgcaggacagggcagtggtcagaacatttgggagttgcagtattcgggctcagacgattggtttaatagtaaatgtagtaaaatttgtttgacgcagtctactttatctagtcttttacccactaatttgctatctcaaattccaggagttgatttccttcattcgttttttgaagacaattccaacagtagtggcggtttcgcccaagaaaccattacacaattaaccatcgaccaacaaagaggtatcatttattcattgtcttctaaatccactatcagggcatacgtaataacagagaaatcgttagagggacccatgtccattgaaccagcctatatcagcaggatcataggtactactacagcaagagccgcaccaattctgggccataaatacttaaaaattgttaaaataagttctgtcacgccagaagaaagcaacaatttatttttggtagctttgacagtaggcggtgtgcgtttatactttaacggttccatgggtagattcaacattgaagctttgagactagaatctatcaaattccctcctagttctgtgacccccgaagtcattcaacaagaactactacatcaacaacaagaacaggcaaagagaagttttccatttttttcaaacttaatgtcttcagaaccagttctcttgaaatttcaaaagaaatcgtctgtattactggaaactacaaaagcaagtaccattatatcccccggcatatttttctctgctgttattaagtcatctcaacagacaaataaaaaagaaaacctttccatcagtggcgtatctgcagcaactacttcatctacagccgccagacagccaccagctactttgcaacacaaactttttgttagtgtaccagactatggtattctaaaaacccacggtaagtatgttgaaaatgcttcgtttttagaaaccacgggcccagttcaacaaatagttccattatcaggactattcaacgcaactacaaagccacagggctttgccaacgaatttgctacacaatacacatcagagaatttacgagtggcagtcttgacaaatacgtctgtggaaatctacaaatatcgtacccctgatgaaatttttgaggacctaattgataatccactgccatttgtgttaaactatggtgttgcagaagcttgttccacagcgttatttgttacgtgcaaatcaaacaagtctgaaaaattaagatccaatgctttaactttcttgacaatgggtatacccggcgttgtagacatcaaaccagtctacaaccgttattccgtgtccactgtatcctctttgttatccaagccttccttgtccaccacaacaacaagtctccaacagtcattaaccagtttcaacaaaccttccactacaaataaagaagattttgatttagatgatgtgatactatctccaagattctacggtattgcgctattaatcacgaggctatttcgtgacataaggggaagtccg

SEQ ID NO: 3443 - DNA, 297 bp, Saccharomyces pastorianus
atgagctgctttcataatttgaacaccttcagcttgaaaatggtgtcgttaatcgattgttcttcatcaccaattgggtccgtcttggatccgtcgtatttagcaatatcggatctacaagtcttgcttagcatatcgaaatgctccttgacgatggcctcaaagtcaatggtgtctttaactagttcatattccactagaacgtcgtcagtggcttccaacccacacttctttcttaacttttggattctattgaccagttctcttgcgagaccttcagtcttcaactcagaatag

SEQ ID NO: 3444 - DNA, 438 bp, Saccharomyces pastorianus
atggtttccgaagcagaaaaatacagagcggacgatgaacaagaagccgaaagagtgctggctaaaaatcagctcgagtcatacgcattcactttaaagaacaccattagtgaaccaggtttcaaagaaaaggttagcgaagatgactcaaagaagctagaggcagcttcacaggaaactatcgactggttggacgcttcgcaagcagccgcaaccgacgagtacaaggacagacaaaaggagttggaggccattgccaatccaataatgaccaagttttacggtgccggtgccggtgcaggagcaggagcaggagcaggagcaggtcctggaggccctggggcaggcggccccggcggtttccctggatccatgccgaatccgggtgctacagatggtggaggcgactccggtccaacggtggaagaggttgattaa

SEQ ID NO: 3445 - DNA, 1377 bp, Saccharomyces pastorianus
atgtccaaagctgtcggtatcgatttgggaacaacttattcgtgtgtcgctcatttttccaatgacagggtagaaatcattgcaaatgatcaaggtaacagaaccactccatcatacgtggcgtttactgacaccgagagattaattggtgacgccgccaagaatcaagctgcaatcaatcctcacaacacagttttcgatgcaaaacggttgatcggccgtaagtttgacgatcctgaagtgacgactgatgccaagcattttccgttcaagatcatagctagagaaggtaagcctgtcgttcaagtagaatataaaggtgaaacgaagacctttacgcctgaggaaatatcttcaatggtgttgatcaagatgaaggaaactgctgagaactatctggggaccgctgtgaatgatgctgtggtaactgttcccgcctatttcaacgattctcaaagacaagccactaaggatgcaggcactattgcaggtatgaatgttctgcgcataattaatgaacccactgcagctgcaattgcttacggcttggataagaaaggtagggcagagcacaacgtcctgatttttgatttgggtggcgggaccttcgatgtttctttattgtcaatcgatgaaggtgtctttgaagtcaaggctactgcaggtgatactcatttgggtggtgaagacttcgataacagattggtgaaccatttggccactgaattcaaaaggacgacgaagaaggacatttccaacaaccaaaggtcattaagaagactgaggacagcagcagaaagggcaaagagagctctgtcttcctcctctcagacatctattgaaattgactcattatttgaaggtgttgatttctacacctcactaacaagagcaagattcgaagaactgtgcgctgatttattcagatcgacattagaaccagtggaaaaagtgctgactgattccaaattggacaaatcccaaattgatgagattgttttagtcggtgggtctactagaattcccaagatccagaagctggtttccggtttcttcaatggtaaagaacccaatcgttccatcaacccggatgaagctgttgcctacggtgcagcagttcaggcagctatccttactggcgatcaatcaacaaaaacacaggatcttcttcttctagatgttgcgccattgtccctaggaattgaaactgcgggaggtattatgactaaactgattcctagaaactcaacaattccaaccaagaaatcagaaactttttcgacctacgcagacaaccaacctggcgttttgattcaagtctttgaaggtgaagaactagaacaagggacaataatctgttgggtaagtttgaattga

SEQ ID NO: 3446 - DNA, 837 bp, Saccharomyces pastorianus
atggtggaagaacagaatcattcaaagttcgaaaatattgttcgcgattacaaagaacggcaaatgatggtttcgtatctcagaattgacgaagatgatacctggtataatctaaccgagtttgtgcgaatggataaaatccgagagttaataaggcaaggtgaaaataagttctcttacgttgattcttcaatgactactttgcaagaaaatgaacttctaaaatccagcttgcagagagctggttccacaatggaaagtgagaatgaatatgaatcttcccgttgctttgattacacggtggctaagtttaagtccagagaagctataagaccaggtcatgaaatggaggatttcttggataaatcccattatttcaatgccgtggtactcgaaggagcgttccaaaattcgtctaacgcgtattttggagagttgcaatttgcgttcttaaacgccatgttttttggaaattacgggtcaagtctacaatggcatgcaatggttgaactcatatgttcaagctcatcagtgcccaataaaatgcttaaaaaactagaccatctcttgtatttccagataaagaccttgccagagcagtattcagatatcttgttgaatgaacgcgtgtggaatacttgtctatattcctctttccaaaaagaaaatttgctaaccacgaaaggtataatggaaaagaaatatcctcatctagttggtaaagatgacgaagatgaactcatttccaacgattctgaagaagattttgaagaagatcctgatgaagatgacgaatacaaacctaccattgccggtggtgtttattatcagaagtga

SEQ ID NO: 3447 - DNA, 303 bp, Saccharomyces pastorianus
atgaatagcgtaccatttacatctgttcccgttgaagttactattggtatcgaccaatattctttcaatgtagaggcaaatcaaccattccagggaattaaggatattcccattgaccacgtccacgtcattcatttccaacatgcggatgattccggtatgaggtatggttactggtttgacggtaaaacgggaaactactacattcaatacgatttcaatgatgtatttacaaaatggtggaagaacagaatcattcaaagttcgaaaatattgttcgcgattacaaagaacggcaaatga

SEQ ID NO: 3448 - DNA, 285 bp, Saccharomyces pastorianus
atgtctacagggttcaagcccacgttactgactcgaactacaattttgtttttagggataggagttttgatcttcttttcatatgaaaactccataggacctgttttggaatggaaagcaagcgacttgactggaatgaacttgacatgtctcagcggtctagcaactcttttcaaaactggcacgtctatgggtatttccttgggagcaggcgctgtgtgttccacaatcatcgcctgcagcttagggtcctggttcgctagaatatttttggccattgtttga

SEQ ID NO: 3449 - DNA, 981 bp, Saccharomyces pastorianus
atgaactccgagtctagagaggatacggctattaatagcatcaagttattggcagggaactctcatcctgatttagctgaactcatatcaaaaagactgggtatcccactttccaaagtcggtgtgtaccagtattccaataaagaaacttctgtcaccataggtgaaagtctccgtgacgaagatgtctacattatccaaactgggataggcgaacaagagatcaacgatttcttgatggaactattgattctaattcatgcttgcaaaattgcatctgcaagaaaaatcaccactgtcatacctaacttcccatatgcaagacaagacaaaaaggataaatcccgttctccaatcacagcaaaactaattgctaatctgttgcaaactgctggctccgatcacgttatcaccatggaccttcatgcctctcaaattcaagggtttttcaacattccagttgataacctatatgcagaaccaagtgttttgaattatattagaacaaaaactgatttcgataatgccattttggtgtcacctgatgcaggtggtgctaagagagtggcagctttggctgacaaattagatttgaattttgcgttgattcataaagaaagacaaaaggcaaatgaagtctcaaaaatggtgcttgtcggtgacgtcaccaataaatcatgtttattggttgacgatatggctgacacttgcggtacgttggtaaaagcttgtgacactttgttggaacatggcgccaaggaagtcatagccattgttacgcatggtatattctctggttctgcaagagaaaaattaagaaacagcaggctatccaggattgtttgtacgaataccgttccagtggatttagatttaccgattgctgatcaaattgatatcagtccaactttcgctgaagctataagaagattacataacggtgaatctgtatcctatttgttcactcatgctccaatatag

SEQ ID NO: 3450 - DNA, 2250 bp, Saccharomyces pastorianus
atgatcagaagatggtttacgataagcaagtcgggaaagaaaaagaaagacaccagtgatacaattacagaagaagtagaaaagaatgattttaagccagtgagctacgatgtaaatgatgaaacatgtgacagtacgccctctgacaacccctccaatacccaacttgcccctaatctggacataaaagagacattttcaaatgaagataataatttgcagctttcctccggattagagtgtaattccgaaacatgtaaccatgagaatgggagttacagccaggacgaaatttttaatttgtcgatggcaaagactacgactacatgcgaagaagtcatcgtggaagaaagcgaaccacctatattggctacaatagcatccgaatcaatgccctatggagacggctccaataaggtatttggatatgagaattttggtaacacatgttattgtaattctgttcttcaatgcctttacaatctatcctcattgcgtgaaaatattttacaatttccggaaaagccaagggaatctattcaatctagaaaacatgacatgaaaggcaataaaccaagaatattcaccgaggctagttttgaaaaaagtgttgtaaatactaatggtcatgtacccaactctagatcacaaagcactgatgaaggaaagcctactcccatgaattccattagttcaaatgcaacagggcattcagagaagaagagcaaattttttaaaaactttggcgggaagcatgcacaagataattataaaaaagaaggaagcactgcatcattgcctgttcctaaacccttctctggtttgcaagacgctcctccattgatagtggaaacacctaatgagcctggtgttccaagtagaatgagctcagagaacgtcacagatagacccccagatgaccctcgtaatattatcgttggtagaacattcaccaatgaaaacttctcgagaggtagtagtaatagtaataatctcgatccgaaaggagaaagcaataacagcctgctctatccactcgataaaagagatactagaaggtcaagttcttcttctcaaatatcgcctgaatacagaaagaagtccgctcttattcatggaccaatcgttaatgttgaccatagcttaaatgaatccggtaaagctaccctatattcaagtttaagggacatctttgaatgcataactgaaaatacgtatctaactggtgttgtatcgcctagttcatttgtcgatgttcttaagagggagaacgttttatttaataccactatgcaccaagatgctcatgagttttttaattttctgctgaacgaattgagtgaatatatagagcgtgagaatcaaaacatggccaatagcaacagtattaataacagttgtggtttgaataaaaccgcaaatttcatcaataatctatttcaaggtactttaactaatcaaatcaagtgtttgacttgtgataacataacatccagagacgaaccttttttggatttccccatagaagtccagggcgacgaggaaacagatatacaagaaatattgaaaagctatcatcaacgagaaatgctaaatggatcaaataagttttattgtgatgaatgttgtggtttgcaagaagccgagaggttggttggcttgaaacaactgccggatactttagcgttgcatttgaagaggtttaagtactctgaaaaacagaactgtaatatcaaactcttcaacaacattcgctatcctctaacattgaacgtttgctcttcgatagactctgaagtttgtcagaaatatcaattggccggaatcgttgttcacatgggcggtggacctcagcatgggcattatgtttctttgtgtaaacatgagaagttcggttggttgctattcgatgatgaaacagtagaagcagtcaaagaggaaaccgtgttagagtttactggtgaatctcccaatatggccacagcatacgttttgttctacaaagcaatgcatctagatgcttttaataaaaatggcagtgttaatatatcaaatgaacatgaggagaatataaacgacttaatcaaatacgatgactggctaagagttagctacgataatcagaaaaaaaaagaggaggttattgcaccagaagaagtggacactgctttagacgatagttgtgtttctactactcctgttaagcattctaggaaaaaatcaagaatgtttagtttcaggaaaagttga

SEQ ID NO: 3451 - DNA, 3471 bp, Saccharomyces pastorianus
atggtgaaggagaattcagattcggaccaagaccaagactttagttctgctcacatgaaaagacagttggagcagcagcagttgcaacaacagcagcaatctccgaacaaaaaacaacgaatgcctcatcatgatgacagccaccaaatcaaccataggccggttacctcgtgtacgcattgcaggcagcacaagattaagtgcgacgccagccagaactttccccacccttgctccagatgcgagaaaattggtcttcactgtgaaatcaacccccaatttaggcccaaaaagggctcacagttacaattattgaggcaagacgtggatgaagtcaaagccaaactagacacccttttggccaatgacggcgttttcgtccattttctacagcacatccccatgggcaatagcattttgaataaactaaatttacgtccagctccgactccaggcactattatcccaaacccagattcttctccctcatcgggctctcccacttcttccacaactcaacgtgacagtaaggtttctgtgcagacgtatttatccaaggaacctcaacttctacaagccaatcacagtaacagcaagaacaagttcaagacaagtaatgagcctgcttcccgtacaacactgcgtgcgtcttctttagccgcaggcgtgaagaataaagtggagacagacgcaaataaactcccacctttgttaaatgattcagccttgcccaataattctaaggaaggtttgcctcctgctttgcaaatggcctattatagaaacaattccgcaaccaacacacccaatggtcccttttctccaaaccatgcatcatcttctcctcataatacaccggctaccgccacttccataatgaataaggggccctctacaatcatagctcacgctgatacaaataaaataccaaataaagcgaaaacacctgtggtggcgaccaccaccactatgccgttattaccatcgccgcatgcgagcgtagatgagtttgtgctgggcgatataagaatctccattgacaaagctaacagattacaccatgtattcgtgactaggtatctaccttatttccctattatgtactccaataatgccaccgaattatactctcagtcgcaattactcttttggaccgtaatgttgacagcgagtctgtccgatcctgagccgacaatgtatagcaaattaagttcgttgataaaacagctagccattgaaacctgttggatacgaacccctagatctacacatatctcacaagctctactaatattatgtatttggcctctaccgaaccaaaaggttttggatgattgttcttatcgttttgtgggattagccaaatcattatcctatcaacttgggttacataggggtgagtttatttctgaatttacaagaactcaaacttcaatgcccaatgccggaaaatggagaactagaacttggttgggaatattcttcgccgaactttgttgggcaagtatccttggcttaccacctacttcacaaacagattatttattagagaaagccttatcttgtggtgacgaagaaccagacaaaaatagtaataatactaataataacaactgcgctaatgttaatgatgatgagaatacgactaatacaaatgatgagtcgcccagtgaaaataaatacaaattaccagaaagatttagaagattattaagtttggcaaattttcaagctaaactatctcatattattggttcttccacttctagtccagatgggttactagaaccaaaataccgtgctgaaactttatccatcttaggtaaagaattagacttgctagcgaaatctttaaaatttcaaaatgatgacgttgtaaatatctattttctttatgttaaattgaccgtttgctgttttgctttcctacctgaaacacctcctactgaccaaattccatatgttacagaagcttacttaacggccactaagatcgtgactttattaaataatttgttggagacccaacaattaatcgaactgccgatttacatcagacaagctgctacattttctgcgttaatactattcaagttgcaactaactcctttactccttgacaagtatttggactctgcgagacaatcagtggtcactatccatagactttatagaaatcagttaactgcgtggaccacgagtgtagaaaacgacatttccagaactgcaagcatgttggagaaattgaacttcgttttaattacgcatccagaagtgtttgtggaggaggatggtatcatttccagaatgagatcccatttaacaggttccttattttatgatttggtttggtgtgtgcatgaggcaagaagaagagagatggattccgaatacaataaacaagcattaaaaagagctgctgaaaaaaggaagttttcttccaatgacatttacagtgatccttcatctacaggtgggattatggataggaaactttacccattaccgttatataatcacatttcaagagatgattttgaaactgtgacaaagaccactccgagcggaactacagttacgactttaattcccaccaaaaatgctctaaagcaggctgaagaacttgccaagacgaacaacagagactctgatggctctatcatggaaattaatgggataccgctttctatgcttggagaaacaggcagcgtgaaatttcaaagtttattcgctaatacaggtaataataacgattacaataacagcagaaccgttttagacgcgtctaccattataccggtgccctttaattcaggctatccattaatctctaacaccatttcgaataacgatccgcgaaatacgaacctggactaccacaatatcggacttaatgcaattcctgataacctttctatgaaaagatcagtaagcactcccgtgagtcatctacctgcatccgttccaggaatcagaaacccgattgcgggcttatcaaatactgttaaattggctatggaccaccagggccaaagacagcatagtaatctacaaaatgttgccgtgaactataacaacaatcaatttgacaacgcaaatcccatcgaaagatcacaaagtagtatgtctcactctcgtacgcccgttgcttcgaagtcaaataatatgacggatctacattctgtggtctctgatcccggttcttataagaacaacggatatccgcctttgagtttgtttgcaaataacgccaataacaatagtagtaggggaaaccagcaattcgccacaggtggcaatgctgtaactcccctcaactatcaagccacggatggcgaaaacaatgccaagactcccggaaacaaattgtcggatttctttcaacagcaaagtgcaggttggatagaaggtaactccagtaatgacgacttttttggatggtttgatatgaacatggagcaaggattttaa

SEQ ID NO: 3452 - DNA, 165 bp, Saccharomyces pastorianus
atgcgtacacgaggtaaccggcctatggttgatttggtggctgtcatcatgatgaggcattcgttgttttttgttcggagattgctgctgttgttgcaactgctgctgctccaactgtcttttcatgtgagcagaactaaagtcttggtcttggtccgaatctga

SEQ ID NO: 3453 - DNA, 681 bp, Saccharomyces pastorianus
atgctaggcttatgtgcatggtacctattaggagcagagcccgcctttgaaaaagatgaaaatgaggccttccaatgggccttacgcgcagctaatgcaggcttgccaaaagctcaatttacccttggttacttttatgaacatggcaaaggttgcgaatgtaacttggaatacgcatggaaatggtacgaaaaggctgctgaaaaaaatgacaagagggcgattaataagctaggttccagagaaggtggaattgccgctgccagtaagaaacaacataaaaagaataaaagtgtcagcactttaaacttattctctactacagacaatggattaggcaacgaagggtcgtttgcgaagccaagctcaaccgtttcttcaaagtccgagacattttttactggaaattccaaacgagattctgagccacagggtttgcaaatcaatatgaataacaatgttaagaaaggtccttcgcctatcagaacaccacaaaaaggtgctggacagtcgacggagataaagccaaatgggcagctattgaatatggataacttgggtggtgccggtagaagtccatccggaaccaatcttgaacgaaggaaatcaaataatttacttctgaaggacaagaaggataagcaaaacaaaaagaagaaaaaagattgtataattatgtag

SEQ ID NO: 3454 - DNA, 1395 bp, Saccharomyces pastorianus
atggcgacttcatcgcagatgcatccctataagaagcatttaatgcaatcacagcatttaaactttgataacatgggcacacagtttcaaagtagcatgaaggaggcgaattctgatctgtctggcaagaaagaaaatagtcgatacgatcacaatcaaaaattaagcagtgcagctttacctaaacggacagcaaatcaatttatacccaacgagcattccaggacatcgtccgcgcctttagcatcaagcagcaataataatagtcatgagggagcagatcttgccctagcacctccaccgcatcctcgtcttcatagttcgcacagtaattctgtcacttccctaggaagtacgccaaccaattcgtcatcattaggagcactaagacaaacaagttcgaacacatctctcactatagaacaaaaaaataaaagaactcgttctgtggatttgtcgcatatgtatttgttgaacagtagcaatgacacccaaatgactgctaccaatgaatcagtagcagatctatcccaccaaatgatcagtcgatatctgggggggaagagtaacacttcgttggtgccaaggttgaaaacgatagaaatgtacaggcagaacgtcaagaaatcgaaagacccagaagtgttgttccagtatgcccaatatatgttacaaacagcactgaccatcgaatcttcaaatgctctagtctcaaatactgaagaagaaaatgtcagtcagtcagccatgaaaacacaatttttaaaagaagcccagagctacttgaaaaaactaagtatcaaaggttattcagacgcgcaatacttactaggtgacggttatgcatcaggagcctttgggaagattgaaaataaagaagcatttgtactatttcaagcagctgcaaagcatggtcatatcgaaagtgcatatagggcatcccattgtttagaagagggtttaggcacaacaagagactcccgtaaatccataaattttttgaagtttgcggctagtaggaatcatccatcggcgatgtacaaattagggctttattccttctatggtaggatgggccttccaaccgatgtcactaccaaactaaacggtgttaaatggttatcaagagcttcagcaagagctaatgaattgacggcggcggcaccatatgagctagctaaaatttacgatgaaggattcctggacgttgtcattcctgatgaaaaatatgcaatggagctgtacattcaagcagcaagcttagggcatatcccttcagcaactttgttagcacaaatctacgagacaggtaacgatacagtaggacaggatacgtcactttccgtacactattacactcaggcagcgttaaagggagatccgtggcaatgctag

SEQ ID NO: 3455 - DNA, 198 bp, Saccharomyces pastorianus
atgacgttgggaacattcggcatgggcatcacaggaacatgttggagctgggacgtctcatcgttccaggagctgaaactgcgcttagaaagacgtgccaacaacgaaactgtggtgacaaatatgcctctcgataagagcagtcagcaggtagtggacgccctggtcgagccacagaatcagtccttttgtaaatag

SEQ ID NO: 3456 - DNA, 237 bp, Saccharomyces pastorianus
atgccagtgagtggaaacgacaaagctacggtgaggagcgaagatgttgcacacttcatggacgaatataagaagaggaggaagactcagatggctcgatttttcggggtcaccatgtttacacttctaacttgcagaatggctatgaaaaaaatgacaacgacaaaaggtatgcacacacatttacttccagttgttccctacaagatcccattactaacctatcccattctatag

SEQ ID NO: 3457 - DNA, 633 bp, Saccharomyces pastorianus
atggaaacaatggcagggttaagtaattccaatatagcgctatgtgcgactttcaccgctatttctttcgcgataggttatcagctaggtctattgaaatcgtccccaaccaagacttcccacgtttcttcattgccagggaagaaattggtcacggagaaggtacagaatgatactgacgaagaggaaagtgagagtgaaagcgacgaagagagtgatgaggacgaagatattgaatcaaacttattaaacgacgtacctggagaggtcagaatggcattggtgattcgtcaagatctagctatgacgaagggtaaaatcgctgcacaatgttgccatgcagcattgtcatgtttcagacacattgcgacagaccccacgcgtgtttcgtacaacccgatcatgactcaaagatggctgaacgcaggacaagctaaaatcactttgaaatgtcctgacaagttcacgatggacgagttgtatgcgaaggctatttctcttggagtgaacgctgcagttattcacgatgctggaagaacgcagattgctgccggaagcgctaccgtattgggcctagggccggctccaaaggccgtattagaccaaataactggtgatctgaagttgtattga

SEQ ID NO: 3458 - DNA, 1338 bp, Saccharomyces pastorianus
atggcagcaatgggcacgcaatggaggacaggtttattgctggagctgattcgcaggcgaccagggcgttgtccaagttgcatgtggagtggcttattcaaatcctcgagcagaagaagttctggactctggagaccgctttggacacgatactgcaatatgacgtcaagctccacggaatctctgctgaaatactatgatattgggttgaacctgacggaccccatgttccatggtgtttacaatggaaaggagtaccatcctgcggactatgcaagagtgctggaccgcgctgcccagagacacgtgaaagtggctcttgtgacgggttcatccattgtggagtcccaaagtgccattgaattgatcaacggcgttaagggccgcagcccgctgaagctgtaccatacaataggtgttcacccatgctgcgtcaacgagtttatggatgttggccaaggggataagcctggctctaccattgataatccttctatggatgaaacgtataatgagtcgttgtataacaaagttctcagcgacccttcttttgcacagggcaaactgaaacagctctctgagttgatgaaccagcaagcgaatgctcctgaatccagttttcggtcgattggcgaaatcgggctggattacgacaggttccattacagctctaaagaaatgcagatgctgttttttgaagaacagttaaaaataagttgtcttaacgacaaactcggcagctacccattgtttctacatatgagaaatgcatgcaatgattttgttcgcattctgcaaaaatttattaccgggtttactgacgataaagacatttttcaattacagggactggatgcgtcgtcatcgaacagaacttacaaattccacccagaccggaagctggtggttcattcattcacggggtctgagtcggatctgcaaaaactactgaacatgtcccccaactgcttcatcggcatcaacggttgctctttaagaagcgaggagaacctgcctgttgtaaaacaaatacccttagaacgcctgcttttggaaacagacgccccatggtgcgagattaaaaaaacgcatgcatccttccagtacttggccaaacagcaagaggtcaacacctttgagtatcctgcatttaagtccgtcaagaaaaacaagttggctgataagttggacgcagatgaactttacacggtgaaaggccgcaatgagccctgtaacatggaacaagtagcaattgtcatatcgcaagtcaaggacatagatcttccaacactggcagatgctacgtggaaaacatcctgcagaattttcggagagtga

SEQ ID NO: 3459 - DNA, 816 bp, Saccharomyces pastorianus
atgaaactgtttagcggttcggattcatacaagtttgaagaggcagcagacctttgtgtccaggcagcaactatttaccgtctgagaaaggagttgaacttggcaggcgactcatttttgaaagcagcagattatcaaaaacaggctggtaatgaagacgaggctggtaacacctacgtggaggcttacaaatgctttaagagtggtgggaactctgtcaacgccgtaaattcactagagaatgccatccaaattttcactcaaagaggacagttcagaagaggagctaatttcaagtttgaactgggtgaaatcctggaaaacgatcttcatgactatccaaaggctatcgactgttacgagttggctggtgaatggtatgctcaagatcaatctgtagcattatcaaacaaatgttttatcaagtgtgcagacttgaaggctcttgatggccaatacattgaagcaagtgacatctattccaaactgatcaagaacagcgtgggaaataggttaagtcaatggagcttgaaggagtacttcttgaaaaaggggctttgccagctggctgctactgattctgtcgctgccacgaggactttacaagagggacaaagtgaagacccaaatttcgcagattcaagagagtcgaactttttgaaaagcctgatcgatgcggttaacgagggtgatagcgaacaactaagtgaacattctaaagaattcgacaatttcatgagattagacaaatggaaaatcactgttctcaataagatcaaggagtctattcagcaacaagaagatgacttgttataa

SEQ ID NO: 3460 - DNA, 1638 bp, Saccharomyces pastorianus
atgtttccaagattgcaagcaatgtttgatgatctttctcaaagaaaggcaactttcgataacgctgaccaagagttgaaggagagaaatattgaatatgccaataatgtaagggagttatctgaaagacaaatgaacctagctatgggacaactaccggacaataccaaagacattatctcaaaacatgtttctaacaatgatactacaagtaaagaagtagccccaagagaaaatgtacacgaagacactgtatccgaatttgttgatacgacggttgagaactcaaatttgaatgtcaatcgagtcaaggaagacgaagaaaagacagaaagaaccgaaagcgatgtatttgatagagacgttcccactttaggttcccaaagtgataatgaaaatactaccacaaataatggcaccgactcaggcactgaaacaagaaatgttaatttgactgagacattaagtgacagattcgatggtgatctgaatgaatatggtattccaagaagtcagtcattaacatcttccattgccaataatgctccccaatctgttagagatgatgtcgagttaccggaaacactagaagaacgtgatactaccatcagtaatgctgcaaacagcgacagaacggaaaacttatcacatattcccggcgaatgggaagctactccagccacagcttctacagatgttttgagcaatgaaagtacagaagttatcgaaaatggcagtactactaagatggcagattctaatgaagatggtgaatctgagagttctattcaagaatcaccaagactatctgctcaatcccttccaaatggccagtcaaaatccaagtcaattaatgaagaattcccaccaattcaggaattacacatcgatgaaagcgattcatcgtcttcagatgatgaattcgaggatactagagaaattccttctggtgcagtgaagtcctctgaaactccatctaatccccaggcttcatctggtttgtcggaacagggactacaaagtccgctccaggactattctttttcacataatgagaccaacactcagagagtgatttcaccctccaaagacgaatttgatgacgaatttgcagggttggagcaagcagcggtagaagaagataacggtgctgattctgaatctgaatttgaaaatgttgctaatactggatctatggaacaatttgaaacaatacaccataaagacttagatgatgagttacaggcaaatgcattcacagggaccttaactagctcttccaatccaagcatcccaaaggaacaggttaaacagcaatctaccactgatcctgctcaagtaagcaatgatgaatgggacgagatatttgctggatttggtaactcaaaggctgaaacagtcgtcataccagaatccaccattccaaaacatccagtcccattaaaggccgattctactattgattccggtaagcaaacgaatcccataattaaccgaggtgttgctaccacaccaaagtccctagccgttgaagaactaagcggtatggggttcactgaagaagaagcacataacgccttagaaaagtccaactgggatttggaagccgctacgaatttcctgcttgatagcgcttag

SEQ ID NO: 3461 - DNA, 2424 bp, Saccharomyces pastorianus
atggcgtctattacattcaggactccattgtcctctcaggaacaagctctttacaaccaaaaattccatcaattggattctgaagatcttggggtggtcactggcgaagcggtcagacctctctttgcgtcttctggacttccagggcaaatactatctcaagtctgggctatggtcgatatagataataaagggtttttgaacttggatgaattttcggctgctctgagaatgattgctcagctgcaacaggttcccaaccaaccaatttctagcgtcctctatgagaatttaccagtacaactggctaccttctctacagattcgaactcgactcctatgcacaccactagcggaattactaatgcaaatgctactgatgttcctcctttatctgccaacgatattgctaagttctcacaattgtttgagaggacagcaaagggtgctcaaactgtggcaggcgacaaggccaaagacattttcttaaaggcaagattgccaaaccaaaccttgggtgaaatttgggctctttgtgatagagatacttcaggggtgcttgacaaatcagaattcataatggcaatgtacctgatccaactttctatgtctcatcatccaagtatgaatccattcccaaccgtattacctactcagttatgggattctgttcgattggaagctactaatgccaaccagcaaaatagagctacccccataagtgccaattctacgggtgtatcatcattaacaagacaatccactatatctcgtctatcatcaggcgccttcagtaacgcttcttcagactggtctttgagttttgaaaagaaacaacagtttgatgcaatctttgactccttagataaacatcatgctggttcattaagttctgccttgttggtcccattcttcttatcatccagattaaaccaagagacactagccactatctgggatctagctgacattcataacaatgctgaattcactaaattgaaatttgccattgccatgtttttgattcaaaagaaaaatgctggaattgaattgcctgatgttattccaaatgagctattacaatctcctgcacttggactctacccaccaaatccatttcctcagcaacaaagtacacctcaaattgccgttccttcaagagcaagtaagccatcgttccaggatatgccgcatcaaaaatctgctccaatcattaatactcaaccaacagcaccacaagttcttcgccaaaattcaaataacggctctttgaacgatctgctagctttgaacccttcatttagctctccttctccatcaaaagcacaaccactggtccaaaacaatacaaacaacagtttctcatatgacaataacagtggccagactgcgccacaacaacagccacagcaacctccacttttatctcactcctcttccggattgaagaagtttactccaacttccaatttcgggcagagtataatcagggaggaaccggaagaacaagaactgccaaaagaaacccaaagagccattagcactcagcagcctccaccagttccaaagcatgccgcaagtccagttcagcgtgctgcttctgtgactcttccacaagttccaaacttttcaggcttcagcatgccaacaagcgccatcacaggcgctgcagtaggtacagctgctttgggtgcagctgctctttcaagctcttccaataagactatccagaatcatgacttgtttgcagacggtgaggcttctgctcaattatctagtgcaaccactgaaatggccaatctatctaatcaagttaactctttgtcgaagcaagcaagcatcaccaatgaaaagaaattaagagccactcaagaattaaaacgtgtcaatgaaatgaagaattctatccaatccaaactaaataatttacgttccaaccatgagcagaatgtcacgcaaaccgaacagcttgaaacacaagtcagtcagattaataatgaaaacgaaactctgaagcaacaactagccgtttcagaagccaattaccatgccgctgagtccaagttgaatgaattaaccaccgacttgcaggtgtctcaaaccaagaacgcggaattgaaagagcaaattactaacttgaattcaatgactgcatctttacaatcccaactaaatgaaaaacaacaacatgtcaagcaaaaaagatcaatgatcgatgttaactctaaacaattggaactgaaccaaattacggtagtaaacttgcagaaggaaattgatggccttggtgagaaaattggtgtttacttaactaagcaaaaggagctaaacgattatcaaaagactgtcgaagagcagcatgctcaactgcaaagtaaataccaggatttgtctaataaggacgctgatctagcagatcggtga

SEQ ID NO: 3462 - DNA, 534 bp, Saccharomyces pastorianus
atggttttcataacacgttacttggatcttttaacgttccattgggtatccctatacaacgctttcatgaagatattcttcatcgtttctaccatctacattgtggtcctactacaagggtctaaaagggctaacactatcgcgtacaacgaaatgatcatgagagatacattcaagattcagcatttgcttattggaagcagtgtaatgagtctttttttccatcacaagttcacatttcttgaattggcatggagtttctccgtgtggttggagagtgtggccattctgcctcaattgtacatgttgtccaaaggtgggaataccagaagtttgaccattcattatatttttgcaatggggctatacagagcactgtatattcccaactggatttggagatacagtaccgaaggaaagttagacaagattgctctcttcgcggggcttttgcaaactctgttgtactctgatttcttttacatttattacactaaagtcatgaagggcaaaggtttcaaattgccaaaataa

SEQ ID NO: 3463 - DNA, 1641 bp, Saccharomyces pastorianus
atgaaaatttgccgtgaactagaaaagaaagacccagacttcaaaatagaaaaaattatttcgagagaaagttctgtgaatttcacaccaattgatgaaaacaaattagagaaagacgacgatttggatgaggaagccgacgaaaatgatgtaaaaaagtatatggaaatgacaatgatcaacccattcaaaaatttaggaagcgacaagaccttggagctgaagaataatatggaccaaaaaagatcatcaagcacaaatagtgttgttattcatgacgacattgaaaaggacaaaaagctgtcagaaatgactaaaattgtcagtgtttatcaattagatcaaccaaactcagtaaaagaagaagatgatcaagatatggaaacttcgttaaagtcagatttgaatttaagtgaaattttccaaaacggcaatgatgcggagaaaagattaaaagaggataatgagccaacggttaaatttagtacggaacctccaaaaattataaatgagcctggaaagcctgctgtgaaaaagcacattgaaactgaaaatgaaaatggaagtgaaaatgaaaaacttaacttggaaactatgtcaccaataaaaatagatagggatgaaaatatggatcgaaaacaaaaaaattccttgaaaagagaaagggacccggttttaactgaacaagatatcaactccaagaaaataaaattggaaacggggaagagatcagagaaagtacattttcctatcatgaatgactttccaaaggattcattaactctatatgaaattagtcatctactaatggtcgactcaataggcaactcttcgatggactttgatgtttattttaatcatatgttaaaggctatcaacagaattaaaagcggatcattcaccatgaagcatgtaaattacctaatcgaacctttaataatctgtttccaaaatacgaagatgataaattggttgttaagtgaaaacggctttgatgaactattagctgtggctgtcatgcttctgaaagctacagatgacaagccctcgataccatcgaaaatatccagtaaatccattattctcgtccataatctcttagtctggaaaaagtttttgaataaagaatgtgggaaccccgacgatgatggagtttcactaagaatatcatttgaagaagtatgggatcaaattcttttaatgctcaacaaactatcagactacgggaatgaaatctacaagctggcacaagagtttagagacaacctaatgcagtcacattactttaaaaaacattctgcaacaagaatcctaagtatgctggttacagagatacagcccgagactgccggtgtgaaagaaacgtttctaatcgagacgctatccaagatgttgttatctcccactattcgcacgcaattaaagaaatctaatatatctgagattattcagacgatgagctatttcatcactgggagcgataacacctcgtggaacttcaccagtgccatggtcttagcacactctttgagacatttacaatccgtgctggattgcaatgaacaagaaaccgaacagttatttgattgtctgccgaaggatgtctttagaatgattatgttcatcgcctcaaacgaataa

SEQ ID NO: 3464 - DNA, 2946 bp, Saccharomyces pastorianus
atgtcgtcctttaataacgaaaccaacaacaacagcaacactaatgcgcatccgaacgaagccttcccgctgtacaccgtgttcaaggacgattccgtacccatcgaggaaaaactatcgctcctcacgcggttcaaaggccacgtaaagaaggaactcgttaatgagtcgtcaatccaggcctatttcactgcgttactgttcgtttccaggcactacacctaccgctcatacccgcgcttaataaccctatcgcactcatccctttgctacctcatcaaacgtgtagccatgcagtctcctgaacagttcaatgacatgcttgttgaagaattactaaaccatctaattttcgaactgcccaacgagaaaaagttttggctgccttctatcaaggccatcgaagccatctatctggtgaacccattgaagatccaagctattctcgcgagtttcttacaaagaccaaatgaaaatcaaagcgaagacgatttgaacaggataaagtccactctactgaccatcgatgaactgatccagattaacgagaaaaacaactcaaaccatttgcaattactacgattcttcatgctttcgttcaccaatcttttgaacaataatctaaatgaacacgcaaatgacgacaacaacaacatagtcattgaacttatatttgatataatgtacaaatacttgaagaatgatgagggaaactcacaagatttgatgagtggattccttaatgatttagaattggggaagttcaaacaaaaattcttgagtttaacaaaatctcaagaccaggatcagtcacaggaagacaagtccgcgttgtttgacgaggattatgaattccaactgttactaaatgaggcgaaattgccgcagttgtcaaacaatctaagcaacaaagatccatccgcgaagaaaaattatgactctttgaatctattacaacaggacttggagggtttgctggtcccgtttcaaaacataaaggaaactgaacaaaactggaaatcaagacagtcaaatgtagtcgaactagacaagatcatatctggaaatgttcctaaggacaatccagaagaattcgtcaccataatgaaagaagtgcaactaatagaactgatttcaagagcaacttcatcactgagaacaacattgtcgttagccgcgttgcttttccttaagaggctaatacatatcttgaatgatcatttgcctctatcaatactagaccagattttcaccatcttcaaaaatttattgtcctccaccaaaaaaatttcctcacaaactgcatttcattgtttgatcaccttgatcatcgatataaaccattttcataataaactattccaattatccttcttactgataaatgaaaaaactgttacaccaagattctgctctgccatactgttgcgaagtttcttggttaagttcaatgacactaatctctcatctggtaactctaatacgacttcgccaacttccaagttggaaaataatctgatatacattgaagaatggttgaaaaagggaatttcagattcacaaactaccgtaagagaggcgatgagattgaccttttggtatttctataaatgttatcccgccaacgctaaaaaactactcaactcttcatttaccccacagttgaaaaaagcaacagaactaacaatccctgctcatctaaacataaactatcagctttcaagagtgccatccacagcgtccgctacagcgtccgccacgatgtctcgtttatattcccagtcttctaatagctcttcaagaagagtcagcttattagaacaaaagagacacttcccaagttatgctcaaccaacacaatcttcctccacctctctactcaaccttcctgcggttgctgctggcggtggtgttattgctaataagctctcgaataaatttaaaaccaatctgagatcaacaagtgagtattcgagtaaggaaaatgaaaaacgatcacgtcatcatgatacatcgaaccccactacaaacaccaacaccaataacggtaataatccggtcaaaagaaaagttagcgcccctccttcttcaattgctagttcaaaagcaaatgaaaattatggtgttttggaggatttttcctcaaaccaaatcgatttaactgatgaactatcaaatagttactccaacactttaatgaagaaatatatggataaaaacgacatttcaatatcatcttcaccgaaaccttcgaaaataagtaacaaaaccggtgaatacgaagacttttacaagagattcaatgatgcttcttcttcaacccagtttaaagatatgtttcaatttttacaaaaagaattattactggctccacaacattcatcgtcaccaccgtggactaaaaaactggaaatatccaaaattatgaaaaaactacaccaaattatgattaagtcaccacacgatttaaaaccgtttttaaacataccgaactttataaagcaagttcctttaaattatcttctcgaactatactctattaacaattttggttgtgcggagatactaaaaaatgaaaccgattctgaaagcccttctcagacagctaatttgattatttctatcgtggaattattcaattttataaattccaataattgtactcccgattcaaaattgtattatatgaaatataaaaccacattcttcaattataactttactttattacttgagcttttccgcggtttgaacaacacaaatgatggaactttgaggttatgcataaaggatttaatacctaaaactttaactagtcttttcaaaatttatggtaaagaatttgactatacactttattccaatttaacttttgagatctacaaatttgataaagagggctttagtactttgttactgatttcgagattgtatctaccaagatga

SEQ ID NO: 3465 - DNA, 345 bp, Saccharomyces pastorianus
atggcctcctccttcttatccctagctttaaacaagtcgattgaaccaacagttgcaatgaccggagaattaacactcacgggtaaagttttacgtattggtgggttaagagaaaaagccgtggcggccaagagatccggtgctaagaccatcattttccctaaggacaacttaaacgattgggaggaacttccagataacgtaaaggaaggtctggagcctctggctgcggactggtataatgatatattccagaaattattcaaggatgtggatacgaaacaaggtaattcagtgtggaaggctgaattcgaaattttggacgctaaaaaggataaggactaa

SEQ ID NO: 3466 - DNA, 3108 bp, Saccharomyces pastorianus
atgctgagagcaagaaccgcaaagactcttggcacagtggcaaggaccacgagggccatccagtattaccgatctgtcgttaaggctgctgcgctccctcaaaagaggtttgcatctactttgaacgtacacgacgtggcgaatgtcaagccaaaccacattattaagactccagcatggcaggagttccaacatcaattgaaaacccccaggtacacggagcagctcagacaactggaagaccagtttgccagggatacgttggctgcatactcttacagaagtatcctagcgaaggatgatagtgccaaaaaggacgaggatgataagatagtacccgaagagaaggacaaggacaacgaggttgagcccacacgggatgatgaaactactactaacaagagtccggaaagtgaagtttccaaaaactctaaaagctcggcatctgggattggacagtcctcttccagtcgatcggatactggagatggcaatccaaaacaaaaaccgccaaagccagaagtgccagaagtctacccgcaaatgctagcattgccaatagctaggcgccccttatttccaggtttctacaaggcggttgtaatatcggatgagagagttatgaaggccatcaaggaaatgttagaccgtcagcaaccctatatcggtgccttcatgctgaagaattcagaggaagataccgatgtgattatgagtaaagacgaagtgtatgatgttggtgttttggcccagataaccagtgcctttccaagcaaagacgagaaaacgggcaccgaaacgatgaccgctcttctgtaccctcacagaaggataaagattgatgagttatttccacctaacgaagagaaggaaaaactaaaggagcaagcaaaagaaaaagatgtggaaacagtcgtcactgaagctgctgaagttaaggaagatcaagcagaaaatgctaatgccggcggcgcgcccaagctggaagacattgttgtggtaaaaataccagattcagaattgcagcagcagcagcagcacaaaaaaatagaagcttcagaagaagagcctgacgaattggacgatgctcacgaaggtgatgatgtgaaccccacagagtttctaaaggactacaatgtgtcgctggttaatgtcttgaatttagaagatgaaccatttgatagaaagtcacccgttattaatgcgctaacatctgaaatcttgaaagttttcaaggaaatttcgcaattgaacaccatgttcagagaacaaattgccactttttcagcctctattcaatccgccaccacgaacatttttgaggaaccggctagattggccgattttgctgctgctgtttctgctggtgaagaagacgaattgcaggatatcctgtcgtccctagacattgaacacagactagaaaaatcgttgttggttcttaagaaagagttaatgaacgcagaattacaaaacaaaatatctaaagatgtggaaacgaagatccaaaagagacaaagagaatactatttgatggaacagctaaagggtatcaagagagaattgggtatcgatgatggtcgtgataaacttattgatacttacaaggaaagagtcaagtcattgaaactgcccgaaagcgttcaaaaaatctttgacgatgaaatcacaaagctaagtaccttggaaacttccatgtccgaattcggtgtcattagaaactacctggactggttgacctcgatcccttgggggaaacattcccaagaacagtattccattccaagagccaagaaaattttggacgaagatcattatggtatgatagacgttaaagatcgtattctggaatttattgctgttggtaaactattaggtaaagttgatggtaagattatctgtttcgttggtccaccgggtgttggtaagacgtcaatcggtaaatctattgccagagctcttaatagaaagtttttcagattctctgtcggtggtatgacagatgtggcggaaattaaaggtcacagaagaacgtacatcggtgccttaccgggtagggtagtccaagccttgaagaaatgtcaaacccaaaatccactgattttgatagatgaaatcgataagattgggcatgggggtatccacggagatccctccgcggcattattggaggtacttgaccccgaacaaaacaacagtttcctggacaactacttggatatccctattgatttatcaaaagtgctgttcgtttgtacagccaattctttggagaccatcccaagacctttgctggatcggatggaagtcattgaattgacagggtatgttgccgaggataaagttaagatcgccgaacaatacttggttccaagtgccaagaagagcgccggcttggagaattcacatgttgatatgacagaagatgcgatcacagcattaatgaagtactactgcagagaaagtggtgtgagaaatttgaaaaaacacattgagaaaatttatcgtaaagcagccttacaagttgtcaaaaaattgagtattgaggactccccaacatcttcagatacacaaaaagacaccgccaaatccaaggaaactgcttcctcagaagataaaacaagcaaaaatgtggaaagcttatcaaagatgagtaaagacatcgattcaaagaagacgagcgatgacatagaggctttaaaaacttctgataaaatcaatgtttccatatctcaggacaacttaaaagactacgtcggacccccagtgtacacgacagatagactatatgaaacaaccccaccgggtgtagtaatgggactagcatggacaaacatgggtggttgttcactatacgttgaatctgtccttgaacaaccactacacaactgtaagcacccgacctttgaaagaacagggcaattgggagatgttatgaaagaatcatcaagactggcttattcattttccaaaatgtacttagcacaaaagtttcccgaaaacagattcttcgagaaagcttctatccacttgcattgtccggaaggtgccacccaaaagacggcccatctgctggtgtcactatggcctcctccttcttatccctag

SEQ ID NO: 3467 - DNA, 309 bp, Saccharomyces pastorianus
atgacatggaggcaatggttgaatagcgcattgaagcgtagttatggcatttttggtgaaggtgttgaatactcgttcctgcatgttgacaataaggtagcctatattagagtaaactatgcagataaagatacactcacatcatccattagtacatacatatctaccgaagagcttatcggcgcacctttggcagtgactatcctacaagagtcacccaatttggaacggttagaaattaccgacgatgaccgtatatggttgaaaagagcagtagaggaggacaaggaagacggtgcatgtatatag

SEQ ID NO: 3468 - DNA, 1434 bp, Saccharomyces pastorianus
atggttttgacttggcagtgccgtgatccagaaaccgttcttgtagcacgtgagagtttggccccccgtatactttatctgtttgaagatataccataccgtacctgcatgaagcacagcgcctgcgagttgcgctggtgtttcacgctgaaacctaaattcttttactcgaagtttttttctgcattctcctggtttccagatgatgcggttttttacacggcattgaaacgttggcagaaaagcaacataaggtgggaccattttacataccatatcctcttgttctcgagaaagtatatatacgtagcaggatccgtagacatccatctaaaccaaggaaaaagagagttcgagccacacaaaaaaagaatgccaaagagaatagtatacaacatatccagcgacttccagttgaagtcgctgctgggcgagggcgcatacggtgtggtgtgctccgcaacgcacaagcccacgggggagatcgtggcaatcaagaagatcgagccattcgacaaaccgctcttcgcgctgcgcacgctgcgcgagatcaagatcctgaagcacttcaagcacgagaacattataaccatcttcaacatccaacgcccggactcgttcgaaaatttcaacgaggtttatatcatccaggagttgatgcagacggacctgcaccgcgtgatctccacgcaggtgctgagcgatgaccatatacagtacttcatataccagaccctgcgcgcagtgaaagtgctacacggctcgaacgtaattcaccgtgacctgaagccctccaacctgctgatcaattccaactgcgatctgaaggtgtgtgacttcggactagccaggatcatcgacgaggcaggcgcagacgacccggaggccacgggccagcagaacggcatgaccgagtacgtggccacgcgctggtacagggcccctgaagttatgctgacctctgctcgttactcccgggcaatggacgtatggtcatgcggctgtattttggcggagctgttcttgagacgcccgatcttccctggtagagactaccgccaccagctgttgctgatcttcggtgtgatcggcacaccgcagtcggacgaagaattgcgatgcatcgagtcggcgcgtgccagagaatacataaagtcgcttcccgcgtacccggcggtgccgctgcagaaactgcttccaagcgtcaacgctcagggcgttgacctgttgcagcgcatgctcgtcttcgacccagagaagcggatcacggccaatgaggcactcgagcacccgtacttgcagacataccacgacccaggcgacgaacccgagggggagtgtatcccgcccagcttcttcgagttcgacaactacaaggaggcattgaccaccaaggatctcaagaagctgatctggaacgagatcttcagctag

SEQ ID NO: 3469 - DNA, 1317 bp, Saccharomyces pastorianus
atgatcattaagagagccccccatcaggtggggaagcccattgcgaaggccatcaaccagggcaggatcgagttcttcgataagcacttgtccatgttcccacaggacttgacgtacgggttctacaccaggggaagaaccgacaacaaaatcctggattataccatcatcgaggccaccgcgatcaaagaggacgggtccattgtccccgggccctccgtcggtgggtctccggaattcatctcggtcagtgataaagtgatcattgaagtcaacacggccacgccttcgttcgaaggtattcacgatatagatatgcccgtaaacccacctttcagaaagccctacccgtacttaaaggtcgatgacaaatgtggtgtcgactccatcccggtcgaccctgagaaagtggtggccatcgtagagtctaccgtgcgagaccaggttcctccaaacactccctccgacgagacgtcgagggcgattgccgaccatctggtcggcttcttcagagacgaggtcaagcacggcaggctgcccgaaaacttgttgcccttgcaaagtggtatcggtaacatcgccaacgccgtcatcgagggccttgctggcgcccaattcaagcatttaaatgtatggaccgaagtgttgcaggattcgttcctggaccttttcgaaaacgggtctttggattacgccaccgccacctccgtgagactgactgaaaagggtttcgcaagagcttttgaaaactgggagcactttaagcacaaactgtgtctgagatctcaagtcgtctccaacaacccggaaatgatccgtagattaggtgtcattgccatgaacaccccagtggaagtcgatatctatgctcatgccaactccacgaacgttaacggttcccgtatgttgaacggtttgggtgggtccgctgacttcttgagaaatgccaagctgtcgatcatgcacgcaccctccgcaaggcccaccaaagtggaccccactggtatttccacaatcgtgcccatggcctctcatgttgaccaaaccgaacacgatttggacatcctggtcaccgaccaaggtttggctgatctaagagggctatcgcccaaggaaagggctcgtgaaatcattaacaagtgtgctcatcctgattatcaagctttgttgactgattatttggacagatcagaacactatgccaagaagcacaactgtttgcacgaaccacacatgctaaagaatgccttcaaattccacacaaatctggctgaaaagggtaccatgaaggtcgacagctgggaaccagttgattaa

SEQ ID NO: 3470 - DNA, 2736 bp, Saccharomyces pastorianus
atggtaggtgttttccttccgagattggaaggagaggcgttttatgggctgagcatgagtgagggacaacttccaggctcgaacgtattaggctcgcaattaggcgtcggtgtgcaaggtgctagtctttaccgtccgcaggaacactacgatgcgaagaaaccacaatggctaagaccggtggatgatactctgcccgagcggatgctggacctccatgtagtggcgaaaggcgtggtttgcgacacttctgtgcggtatgtttccgacgacaagattctgcaagaatcagatgacgacgacgacaatgatgatgatgatctcattactagtgatctagatgaagatatggacgatgtgcaaaacacttctgttgtggtgaaccccgttgtacctgtggtaccgaaacacgtgcattttttcaagaaagtcgatctcgacaatgatcacatgttcagcgttaactgcgacgcgcctgtttcactccaggactacatcccttccgacttgctgcacaatttgaaccggaacggtcgtttgcagaggcaggacgccttcttttgggaccccaccgtggctaaccgaatggacacagagtacatccaaaccgcatcggatctaagaaactatagggacggtacggaaattatagcctacgcctccggcaaaacagactccgtgctcaatatagccgtcttagcacggcaacacacgctgcttttgaaccggaataacaatgtgaccagcatcgagctgcattcgccaatcaagagcatcaagatcccaagagcttccgaatccattgggcggaggtcaaacctggtgggagtggtcactgagaactctttccaagtctttaggatcgaaagtattcattcaagatcgtgcgatgtcataatcactagctcggaaccgctgtactttgtcgagatagacgacatccaaatagtggatttcgcattcaatccttgggacttgcaacaattcgcagtcattgacatacgggggaactggaatatcgggatgataccgaaaaagttcgatgaagaaagagggaaactacaaataatagaaagcctgcatggtacgatttttgacccggaggagttgtcgtcgtggaaaagaatcgaatggttctcgcagttccaaaaaatactagtctttgatagatccaaaatgttcgagatcaatttcgtcaacgattggcaaacagaagtcgtccaggcgaagacatggtcaagcatacgagactataagagaatagacgacaaaaacggcgtcttgctcacctctagagaaatcataattataggagcctcagaggcaaacggccccgttagaagaatatcctggaagcacgacctggacccagatgatacgacgctcaaaatcaccattcagaaggtaaacaaaaccgactatctgctcctggtggctttcgtatattcgatgcgccataaccatgtctacatccatgccttctctcaaaacaaaaaattaaatgccaccccaagcttatttcaatccttgggacattcagcagtgcttgaactttcgggcgggacccccagtggtatagaggtactttcaacattggaccggatagacgatgaagagggggagcacgcaaatgatcacgcttgtttcattacagatttttccatcaaattgaggaagtcgtccaagatataccattacactctatcgaacattcagacccctgaacccgatgaacaagaaaaattcatcgtgacagattctaccgaatggacgtggcttttcgataaggttgacagccgcgaaagtgagagcattggggcactgaccgctcaaattagggagaaagaaaggaagcatgcctctcgcatccaaaatctgatcgaaaacgaaagtagccatgacgaagataaatattttcaagacttgggctatcacttatccatggctacaaatgaactactccaatcttggcagaggaacagagatgaatcaattcgtgctgggtctacgagctattctaaattggaaaccctaatcgaggattcgacttcctttaccagcatacctgaattttcttcattattagatcaatttttccaatattatgaagaccaagatgttacctttatagatttcaatcaactgctacgctttttcttacatgaagatgttccgaatttggatattttctacaataaacttttgcaatgctgggttctggtatccccgcaagctgaactctatacaaaggagatagtaaaggatattgtttggagtttagttaggcttgaaaaaccgtcgctgttcgaattgatagaaaaggaaatcagccaatcattgagtaaaccttatcaggacatcattgattcatgggatgtaaatgatttgaatgaagaggatgaatcaagtgatttcaatttagacagtcaattttcgacaacacagtttaatgatagacctccttttaatatgagttcgcaatctcagattccaacgattaaatcttctcaaaataatggactcgcaaggaaaaaaaggattttaaagacacattcccaaaagagtactccattgtcacaatcaagccaaaatttgagcattttgccggactccatgactcctgcgtttacattaatgcaacctccctcttcacaaatatcgtttgtgaatgattcacaggctcgtagctcgcaaaaagccaagaagaagaaaaaaagaattcgtggctttggataa

SEQ ID NO: 3471 - DNA, 1185 bp, Saccharomyces pastorianus
atgcttaccaaaagaacactaccgctgcgtatcctatttccgtgcagacgaacttcgagcgatgtttctcgaccggcacagcccttgaacgtgctcttctttggcagcgacacgttcagcaacttctctttgcaggcgctcaacgaactacgccagacaaatggcgaccacgtcgttggaaagatccaagtggtgaccaggtcgcccaagtggtgcggtagacagaagtctattttgaaatacccgcccatcttcgacatggccagcaaactccagttgccacgcccgattacatgcgacaccaaacaggacatgctagcgctgggcaagttgaccagtcacagccgcccagggagctctgcggacggcggcccgttcaacgcgatcattgcggtctcgttcgggaagttgattccgggggacctgatccgtgcggtgccgctggcactgaacgttcatccatcgctgttgcccagacacaagggcagcgcaccgatccagcgcgcgctgctggagggcgacctgtgcacgggagtgactgtgcagacgctgcacccggaccgatttgaccacggcgccatcgtggcacagacgaagccgctggccgtcgctgcgctgctgcgcgcgggcaggctcgccgccgcagacacggccgcagacggcctgccccggagaactgccatcctgctggaacagctgggcgccgtgggcgcccagctgctgaagcagacgctgtgcgagcagttgtacctgccacagaaccgcgtgcacgcacccgccgccgcttacgaggccagctacgcccgccgcataacgaccgaggacaggcgcatccactgggcgcgcgactcggccgccgagctgcttaataggctcgagacgctggggcccgtgcacgcgttcaaggaggcggcagctaaaggagccgcccatcccgtcgtgcttaaacgagtgttgctacacgcgtgcagtgtggcgaaggactccaagctacacagctgcgagcccggcgccttcgagtacgaccagcagcaagactgcctggtcgtcgcctgccgcggcggctcgcagctatgcgtaacgcgcctccagttcgagggattcgccgttgagcgcgccgggcagttcgtcgctcgcctgcagaaaagatgcggtaccctgggccagcacctcatgttccagtaa

SEQ ID NO: 3472 - DNA, 552 bp, Saccharomyces pastorianus
atgagcggaagcaacatggggtattacgacgtactggcagggctcgcagcactcgaaaagtcgccgcaggtggtgttcactgcggctgagctgcaacagctcacacagcggtccagcgctgacgacgatagcgccaagaagagagagaataccagtgggaaagtatctaaaccaaagagagtgggcatgcatgggtatttgggcgggaaggtgtcgctcgccgatgcagcgcaggtggaatatgaggtgggccactcgctgctcggcagctacgtgccgaagcagcagctggaggccctctccagcgtcgactttgcccaccacttccaccgcacgttggagtgcaagaccgccctggagacgcacgacgtttttcttgctggcgcaggccagctgtcgctgcccttccaatcgcccatggacagtcccagcgacagcgatctcaaaaggaaaaggaaagtgatgatatgcaaacggtgccaattgcggtttgtgggccctcatagacggtcccagctgagagagcatgcctgtggagaccaagccagttaa

SEQ ID NO: 3473 - DNA, 648 bp, Saccharomyces pastorianus
atgaacgcctattatgctagataccacaacgtctctgcaccatggaatggtgatattgaaaccggcatcgaacgtttgacgaagatgcttgagttagtcgaagagtctttgaccggtaagaagaatggttttagcgtcgatgatgccgcccaagctttaaactgttctcgtgaagagtttacaaaggattacttgacaacattcccagtcagattccaagtcttaaagctataccaaagggccaaacatgtttactctgaatctttaagagtattgagagctttaaaattaatgactaccgcaaagttcgccactgatgaagattttttcaagcagttcggtgctttaatgaacgagtctcaagcttcctgtgacaaactttacgaatgttcctgctcagagactgacacaatttgttccatcgctttagcgaatgggtcttacggttctcgtttgactggtgccggttggggcggttgcaccgttcacttggttccaggtgggccaaacggtaatgtagagaaagtgaagaaggctctcgtcaacgagttttacaaggttaaatatcccaacattactgacgctgagttggaagacgctataatcgtctctaaaccagccttgggtagttgtttgtatgaattataa

SEQ ID NO: 3474 - DNA, 624 bp, Saccharomyces pastorianus
atgacgaaaccttactcagaaaatgtgccagtcgccgaattcaatgccaaaaccgaggacctgccaaaaccattggttgaaaaatgcccaactatcactgaaaaatttagtagtgcctacggtgctaaaccagatttcattgccagatctccaggtagggttaatttgatcggtgaacatatcgactactgtgacttctccgtcttgcctttggccattgatgttgatatgctttgcgctgttaaggtcttggatgacaagaatccatctattacattgaccaatgctgatcccaagtttgctcaaagaaagttcgatttgcctttggacggttcatacgttacgatcgacccttctgtctcagactggtccaattatttcaagtgtggtctacatgttgctcactcatttttgaagaaacttgccccggaaaggtttgccaacgcacccttagctggtttagaggttttttgtgaaggcgatgttccaactggcagtggtttgtcttcttctgccgctttcatttgtgctgtttctttagccgttgttagagccaacatgggccctgattatcacatgtctaaacaggatttaatgcgtattacagtcgtggcagagacataa

SEQ ID NO: 3475 - DNA, 111 bp, Saccharomyces pastorianus
atgaacccttacgccaaggtttttgctgctgaaaagctaggttccaagaaggtcgaaaagaccggtaccaagccagctgctgtcttcactgaaactttgaagcacgattaa

SEQ ID NO: 3476 - DNA, 2811 bp, Saccharomyces pastorianus
atgtcgcaacatgccccaatcaatgtatacgacgaaatatctagtccttacgaacgcccaaatattgttacttcaatgggtggagagaattggcgtgaaactaggaggaattgtaaaccagatagtagaaagatcaccaagcaaaggaagaaggcttctcgcgcttgtgaccaatgtagaaagaaaagaatcaaatgcgaatacaatcaacataccagagtttgccaggggtgctttgaggtaggtcaagtttgcctctttgtcagagttccactgaaacgtggcccaaccaaaaaaaaaactcaggaaattgcaagtgacaagatgagctccgtaaataaccttcttaactacagacccaggactcattcatatccagttagcttggaaagcgttcgtttaccatcactttctcagaatttttcttttcccacaacaaacagtctttgcgtgtcacctatgcctgctcaatcgcagcctttctggaaagtaccgtacgatgacgttcagcgtagaagctcccttagcatattttcctgcgactcgacatcatctatcggagctcaggaaaattatcattctgatcaggattccaccgtcaagcaacggggacgcaaaaatacggggaaaggtatcataacaccagtagaggacaaatacgagaattcgccaggtgcccgcagtcaacatttagattttccccaattccaagaacagcgtgctaaaccattccttaataattgtggctttgggaatcctagaacaaatagtctttcctgtccaagcgatggcgcattatcaaaaagaaattcacgtggcagtgagcggtacatgctgactccaaatagtgtacattcagctgaaaaagaaagattaagctcgttgaccattagaagcttagacagtaaattcgacatagatgacaatatccataaatggcaaaataattcggcctgggcgccagcgtacatattatcagatcctagtcgtcctggtggtgaaagaaaagttctttcgaacagaaatgccgatctagaatcggccgtttttagctcgtccaatgacagcgccggcggacagtttagtgagatttcctttttgaaacttatagacatctactatgacttctttcacatcaatcttcctatagtaccaataaataagagtaaattgatcagcctgttcgtccccattatgcaaccaataaatcaccaaatcatgaaaattaataatgaaatcattcgatgttttaaagatgcgctagaggttttggtattcagtgcaataaaacaaagaaaatcgtcaacatcttggccccatgacaatgcgtgtgattttcaaaaagggttatattacgcccaaaacttcaggaaatgtgtaaatgaatgcttccaaagtataatgactgtcaaatccaaactaaaaataaattccacagtgattccctccagagtcaagtttatttacttttcgacgattgttattttaaattacatcttagttttgaccggtgatgaacattcgtctttattaggcccctctgtgggggttttcaacgagtttcaatctcataaattatttctgcctttgaaaaatattacctcgatgccgctgttaaattcaaaccaaaacattaataataaacaacttgattgtgccatattgttccaacgactgtatatccttttgagtattttggattccatacagagcttccgactaggtcaaccgaaactaatcaacttgaaattcggtaatcccgttgattcgtattttagagctgccacaaataatgaacatcttgttgagcaaaatccaactatcttggataatatactacgaaatttgaaactcggcggattcatgacagatttcgtttttggcaggaaatctttgcagataaacagctctcagaatatattaaccacagctgaggtggtttgggaaaatattacaaggaaaaataacgaacctgatgatatgacaggcaagttccaaactttgttgagagaaaaagagaatttaataaaaagattgataaatatgaagcaaaaagatcagctgttagaaaattgttgcgatccaaatgtcaagactaatgctgttgcagagacagtgtgcttgatgattaatctggtatcagatatcttagtttctatcgttaatacgaaccctgaaaatttggttgactataccctaaaagtcgttccaaatatacattcggctctgggcaaggaagaagaaccaatgtcaccaaaacagtccaatattcattctctttgtaatagtaaagccagaaattatgccaatgaaagtacaccatccattcatgacgcagagaatgggcgtgtcgctaggaagtggacaaagggaacagtatcagttttcattttgccaatagtggaggaatgttataatatcgttcacttagttggatccataccttctacactaataaatttatacatccgtaacgggaatatggccactgagacgaatgccaagataatgatgctgtctacagccttgagcgaattagtgcaaattactgaattatccagcaagcttggaccacctgagcgaaagattagtatcaccaacaaacacatcaatgcagatatcgcgagaagtagtaaggatttcagatcggtaatgaaggatttgtatttgggaagacatgctgtaaaaaacgctatacacgttgtgccgccggaggacgaaagtacgaaaatattgagtgatttttccaatatagggtggaagctaatggatgattcagaattgggttgttgccatcgccccactaactaa

SEQ ID NO: 3477 - DNA, 1515 bp, Saccharomyces pastorianus
atggattcaaacgtcgctggtgccgctggtcaaattaagactatgaagggtaaatgggggttgaaacttttcaatccactagtcgcgtcgcaaaattttgaatacaaaatttcgaacattttagataaaccattggaaagtgtcttcggttatatctcggttcttcccggtgctttatccgcatacagatacagagctctgaaaaatcatgacgatggaactggacccctaaggtcgtacttccttggtgaaactcaagaaggtagggaccatgatgtctttacggcaaatatgtatttggctgaagatagaattctttgttgggaattggttgccaagagagattccaaatgggttttgaaatatgtcaaagaagccactggtgagactgatgttcctgaagacgtttctgagtttatttctcaaagaagacgttggctgaatggtgcaatgtttgctgcaatttatgctcaattacatttctatcaaatttggaaaaccaaacattccgttgtacgtaaattcttcctgcacattgagtttttttaccagtttatccaaatgctattttcctggttctccattgcaaactttgtccttaccttctattatttggctggctcaatgaatctagttattaaacacggtgaggctttgttcatttttttcaagtatttgatcttttgtgatttagcaagtttgttcattatctctatgggtaataggcctcaaggtgcaaaacatctcttcattacgtctatgattatattgtctatttgttccacatattcattggtttgcgggtttgtatttgcctttaagtcactaacttctggtacggaatcacacaaaatattcgttgatattgttatctcactgttgtccacctatggtctttactttttctcatccctcatgtacctggatccatggcatatgtttacatcatccatacaatattttttgacgcttcctgcctttacatgcactctacaaatttttgccttttgcaatacgcacgatgtttcgtggggtactaaaggttctacacaggagtctaaacaattatctaaggccattgtggtgcaaggtccagatggtaaacagatcgtggaaacggattggccacaggaagttgataagaaatttttggaaataaaaagccgcttgaaagagcatgatttcgaagagtcaagtggtaacgaaaagcaatccaagaatgactattacagagacataagaaccagaattgtgatgatatggatgttatcgaatttaatactaatcatgtccatcattcaaattttcacaccacaggatacagacaatggttacttaattttcattttatggtcggtcgctgctttagctgcctttagagtagtcggttctatgggcttcttgttcatgaaatacttgcgtataatcgtaagttacagaaataaagtagaagatagcggatcttgggaagtttccaaactggatttgactaaagtcttccataaaaaaggttaa

SEQ ID NO: 3478 - DNA, 966 bp, Saccharomyces pastorianus
atgacaagaaacccgttcatggtggagccttcgagtggctctcccggcaggcgtggggcttctaacctttcgaggttttatacaaacaccagtagtaacccccggtgggccaacggcagttcggagagcttggaggagggctatgaacagtcaaacgtctttcagggtcttcctgtgtctccttccagggccgcgctaaggtattctccagaccgtcgccataggactcagttctatcgtgacagtgcccataactcccccgttgctcccaacaggtatgctgctaatttgcaggagtctccgaagagaccaggtgaagctgttatacatctgggcgacggcagcaacctttatcctcgcgagaacacagacttaccggtagacccctaccttgtgtctccccaacaacagcccagcaacaacctatttggtagtggcagactgtattctcaaagctcgaagtatacaatgtctacaacctccaccacggcgccttccctgggagacgacgagaaagagaaatacctcacttccaccacatcatatgatgatcagtctacgattttctctgcagacaccttcaatgaaactaagtttgaactgaaccatccgacaagacaacagtatgtaagacgtgctaattctgagagtaaaagaagaatggtttcagacttgcctccccccagcaagaaaaaggcacttttgaaactagacaacccaattccaagaggattgctagacactttgccccgtagaaactccccagagtttacagaaatgagatacacggcttgtaccgttgaaccagatgatttcttaaaggaaggttacactttgcggtttgcggagatgaacagggaatgccaaatcgccatctgtatcacaatgtataacgaagatcagtactccttggcaagaacccttcattcgatcatgaaaaacgttgctcatcttttgcgaacgtga

SEQ ID NO: 3479 - DNA, 2010 bp, Saccharomyces pastorianus
atgtctcccgtacaggttgtcattttcgttctaacgaggattttcctactattttttaggttgattaaaataattgtaacccctattcaaaaaccgcttggttacttattcggtgattatttcgaggaattagatcgtaaacacgggttcaaggaggaatggtatattatcccttactttttgaaaggtgtattttgttatattctttctgtgagaagacacaggttccaaaactggtacctgtttattaagcaggtccaacaaaatggtgaccatccagctattagttacgcccgtcccttggctgaaaagggtgaatttcaattagaaacttacacatacagtgaaacttacgatatagtgttaagactatcccatatcttgcattctaactataatgttcaagccggtgactacgtggcaattgattgtactaataaaccccttttcgtattcttatggctttccatgtggaacattggtgccattccagctttcttgaattacaacactaagggtactccgttggtgcactctctaaaaatttccaatattacgcaggtgtttattgaccctgatgccagtaaaccaattagtgagtcggaagaagaaatcaagaacgcacttcccaatattaaactaaattatttcgaggaacaagacttgatgcgtcaacttttgaacccacaatcacccgaattcttacaagaagatgacgtaaggacaccattaagtctaactgatttccaaccttccatgttaatttacacgtctgggacaacaggcttgcccaaatctgccattatgtcttggaggaaatcttctgtaggttgtcaaatgtttggtcatgttctacatatgaataacgaaagtactgtttttacagccatgccattgttccattccactgctgcattattgggtgcatgtgcaatcctgtccaaaggtggttgcattgctttatcgcataagttctctgcgagtacgttttggaagcaagtctatttaacagaagctacgcatattcaatacgtcggtgaagtgtgtaggtaccttttacatactccagtttccaaatacgaaaggatgcataaggtgaaggtcgcttacggtaacggcttgagacctgacatttggcaagatttcagaaaaaggtttaatatagaagttatcggtgaattttatgccgcaacggaagctcctttcgccacaaccacgtttcaaaggggtaagtttggagttggtgcttgcagaaactacggtaccatcattcaatggtttttgtcgtttcaacaaacactggtgagaatggatccaaatgacgattctgttatttataggaactctaagggtctctgtgaagtggcccctgttggcgagccaggtgaaatgttaatgaaaatttttttccctcgaaagccagaaacctcattccaagggtatcttggtaattccaaggagacaaaatcaaaggttctgaggaatgttttcaaacacggcgatgcctggtatagatgcggtgatctgctgaaagctgataagtatggactatggtattttcttgatagaatgggtgacacttttaggtggaaatccgaaaatgtttctaccaccgaggtagaagatcagttaactgccactaacaaagagcaatacgcgcaagttgttgtggttggtatcaaagtacctaaatatgaaggtagagcaggttttgccgtgattaagttagtcgataactctattgatattgccacaaagattcggcttttaaacgattcattaagccgattaagtctaccgtcttatgcaatgccattgtttgttaaatttgtgaatgaaatcaagatgaccgataatcacaaagttttgaaaaagctttatagagagcaaaaattaccaaagggtttagatggaaatgacaccattttttggctaaaaaattataaacgttatgaagtcttaactactgaagattgggaagccattgatgctcaaacaataaaattataa

SEQ ID NO: 3480 - DNA, 717 bp, Saccharomyces pastorianus
atgagtagaaagtgggcacaagacaaaatcaccatgagcaatagccttgccggcattgattcgaatgcgagaggtattggatcacttgctgggaagtctcctgaacgtataactgaggagggagagagcatatggaatcctgaaattattgacccagaacagatcctttggccgtataatttagtcctctttcctgaaggtacaaatctcagtgctgatacccgacaaaagagcgctaaatacgctgcaaaaattgggaaagaaccattcaagaacgttttattaccgcattctacaggattaagattctcattacaacagttaaaaccaagtgttgaggttctttatgatataacaattggttactccggtttaaaaaaagaggaatacggtgagcaggtatatgggttcaagagcatttttttagaaggaagatatcccaagttagttgatattcatatcagagcatttaatgtcgacgatattccattgaatgatgaaaacgaattctcaaattggttgtataaaatctggggtgagaaagacgttttaatggaaaagtactattcgacaggttcgtttataactgatgccgaaataaaccattcggttactgatagcttcaagataaaccttattgaaataaccaagatattgatactaccagctttgacgacactttggttagtctataaactcttcgtcttgtttttctaa

SEQ ID NO: 3481 - DNA, 360 bp, Saccharomyces pastorianus
atgctgcataacaagataaatcgaaatattaggaaagttgtcgtcccaggtatttctttattagttttcttccaggggtgtattgttcttttgttccttcaagtaacttataagactatttattgtaggaatgctataagaaggcaaagtggtcttaatgaaaccaaaagactgtttattgtcttattatcatccattttgcatgttgtcgcgccatctgctgtgaaaattactacggagaatgccactattcccaaagggacgttttttaaagacttaaaggaaaatagaattctctcccatctaaaaagcaattcagtggccatttgtaatcaccaaatacacagattggatctttaa

SEQ ID NO: 3482 - DNA, 1272 bp, Saccharomyces pastorianus
atggtcatattatctgggtgtaatgttattcttttgactgtactgctgcctgaaactttaagaaaacaagactctaaaagtgccattgctcaaattttggcagagaggcgtgttcaaatagatcgcaataaatatggggaaggacaagaaaattatcagccagaagaagaagatgaattggaacaaacagaaaatcgaattgcctcactatccactgagaagcacaactatgttagagaggtagatggtcaagattctttagatttagaaagtccaggtagccatgttgcgtatgatgggccatcaagggaaaatcaattgcaacgaatttatacagaggcgagtagaagcatgtatgagtaccaattggacgatagtggtattgatgcaacaacagctcaagttacgagaatcaggtcaacagatccaaaattagcaagatcaattcgtgaaaacagtcttagaaaattacaaaccaacttagaagaacaagtcaaacaagtactatccaaaaatgggagcgaaattgctcctaaggaaatatccgcggtgagaaagtgctgggacacctttttcgtttattttattaaacctcttaaatcgttatacttcctacaatacccacctgtggcacttgccataacattttctgcgatttccttttcaaccgtatactttgttaacatgacagtggaatataagtattcaaggcctccttacaattttaaaccgttatacattggtctcctgtatattccaaactcaataacttacctttttgcctctatttatgggggtcgttgggtagacatgcttttgaaaaggtacaaagagaaatatggaattcttgctcctgaagcccgtatatcgtggaatgtggttacatctgtaatatcattccccatcgcacttttaatctttggctggtgcttggacaaaaaatgtcattgggtaacaccgctcattggaactgctctttttggatatgccgctatgatgactattggagctactctttcttatctggttgattctttgccaggaaagggtgccacaggtgttgcattgaataatctcatcagacaaatattggccgcaacagctgtatttgtcaccacgccgatgataaacggtatgggcactggttgggccttcacgatgttagcctttatcgtcctaggtgcaagcagtgtactcgttatattgaaaaagcatggtgattactggagagagaactatgatttacaaagactgtatgataaagttgactga

SEQ ID NO: 3483 - DNA, 567 bp, Saccharomyces pastorianus
atgcaaacttcaagtagacagtcggatataggatctttgagaagtaatgactcggacacttcattatctgataaccaagttagaatgcatggcggggatagcagcagcagcagtccgcacagagggggcactgactatgccgatgaaaaggccaatttggataccgcgacatcgaacggtcatggtcagaacgggaaccagctagatagactcaagaataaggattatgttgttccaagaaatgaacgtagggggctgctaccccaacttgccatcatacccgaattcaaagatgcaagggactatccgccaatgatgaaaaaaatgattgtctttttaattgcattttcttcaatgatgggccccatgggtacatcgattatttttccagcgatcaatgcaatcacaactgaatacaaaactccagtaatcatggtgaacgtatcgattggtgtatatttgttaagccttggtgttttcccattatggtggtcgtccctgtccgagttggaggggagaagaccactctacatcacctctttgcatgctgttgcattagcatcggta

SEQ ID NO: 3484 - DNA, 1719 bp, Saccharomyces pastorianus
atgctgagaaattgtttaaaaaaactgggaaattatcgagcaaaatgtacaataaagactttacacacgcctgtttacaagacgaaaaatcttcaggtactcagagatgtactctccggtataaagctgttggataaaataatatcgtcatcctcttacaacaagacattaatatatgaacccaaatataaatcaaagccgcaagtcgttagttcacaggacaccatgagactgcagaacgttcttcgagagttcttggattcattacaggtagatgaggttactaatacagaacttcaactagatagctctcgaaagttgggaaaagttggtcttcagctattcttggattgcactcgcgataacttgacactaaattcgacatctttggcatcttcattactggagtattattttaaatatcccgaaagagaagtagttagtggtatcgaaattgggttacaatatattaggggtttcctcgagcaaaataaaataatggtgaaagggcaaaacgatatcgatgccctagtggaccagtttactatgtcatctttagatagtcaaagcgtaaagaatgtcttacgagccgtcaattaccaactattctcagacgatattgttcgagtcataaatggcaataaaacatacgatgagattgatgtctccaaaggttggaaatatcccaccggtatattagataccaatgaagcgtacctaagatctctagagttgcctaacaagaaattagtttccgttgataagaaaatgctggttctcatgtatgacggaacactacgagacgccagtaagattttacccactataacgtatgcgcgaaacttgaagaagtctgttcttttgattgtcagtggagattgcacaggtgatgcactgacatcgattacgatcaacaataacaggaataagagagaaaacaacgagagccgaacaattatcatgaagtactcagaaaaagcaaacaaaaacctagccttacaagaaaaccacgatttcataaaattcttacggttgccttgtggatatgatagcatttactctcccgagtacagtccattggtgccaagcaaaatgtgtgcagacaaatattatggcaatgttgagtctatgaaggcaaccacaggtgaggcgtttttatataatgcaattgatttcgaatcaaaccaaaacgaagcttcacagtctttcctgcagcagacagttaccttaaaaattggcgggcataatgaagtcgaaatcgaccagagaagaaacacactggaaaacttcttgaataacagcttatgccatgggctagccaaagggttcattcccagccatggtatatctttactaaaggcggttccaggcctgagcaggctgaaagctaacgaacccgattttatgaccaagctgggagtagatgctgtattatccgccgttgttctcccatccgaggttgcgtttaagaatgcgtgcggatataattattacgaaattagcaatctaatagccgaaactataaacgaaaactcattccaactagccaaattttcttctacttcaaacctggtggatactacaaaagctgggcgcttagagccatggaacaaaatggactcatgtttggccagcatagcaacgttcatcaaattgcttaccagctgtaataccattgtcacttgtatatacgaaaagcccgaaaaacgcacagcctag

SEQ ID NO: 3485 - DNA, 1950 bp, Saccharomyces pastorianus
atggaaacggttttgcaaccaaaggcgaggccatttgagtctttaaaaagaaaacgtttcagagaatggttaaggccgtcaactgcgcgtggatctcttatacaatctgacacgttgaatttacatgaattctcacaatctaattgcaccaacccattttccgattcaaattctgttcgtggtctgctggtcacaacaccaaccaaatataagtgtcaggatgaagggaacattttctcccgaggagagaacaaatttgaaacgttgtttagtaatagaaagttttatgagttcaaagataatttgaaaagaggattcaagaaaatgcgtcatcgaaaaaacgaaaatgagaacgaaaataaatgctctacagacggaaaaattgcaaaactggattcagataattttgagaaatccgaagattatacaccttgctttaacaaattcagtacaaagccgcaagattttgaaacgcaattcgattatgcaaataaaaatcaaggttctaataagacttacctagataatgagtcctgttggaatttaagtgaaagattgattccttttaataatttgaagtatgaagacttgaaacattttgaagagaacttgcaaagcttagctcctgtaacctttaccccaattgagtcaaacgaatcgcttgttgggtcagattctacacgtggcacgaaaagaagcattcgcaacgattctagcaatattgcttccgaaaaaaggatatgcttgaagcaatacttaaatgaaccaaggtctgatgactctatggaaagcacaccctccatatacattaccaaggaagttcaacaaagaattgaagttttaagctccacagattcatttttcattgagaaagtagattttacttctaatagtaaagctgacgccagcatttctgatgacaaaagctatcatgattccatacaaatggacgaagaacctataagtaatgttaagagtgggaacgaaaaaaacattgacattgctgaccctaatagcaatgcagaaagcgcagctgaaaagccaacggaggtaagctcagtcttaaaggatagggatatagacgctgcgagtagtagctattcagatgaagcggggacaacccctgaagtgattgattcagacgaaatttctgacttatccggaacgagttcaagtgatggtagcaaagtttacaccatcccaacttttcgaggccttagcaagcaagtaaacatttcccaaattctttcaaactttaagaaagagagtttgactcaagataagttaacacatttaatcaaaaatcatcaaaataagaagaagcgcataggattcaaaaataaaaaattctacgatgccttcaatccgtatcttgacagccaagaggagattgaattggctgacattgaaaatacctcaccagttgatatagatcaagatattaaggatagcagtacttccagtgtaaggtttgatcataactcgtatctgttgatttataagaagtctaagaagtcgagcagaggtgggagtcagggtagttatgtgaccgctggaacaaggtcaatcttaaaggcaaagaaaaattttcagcatgatgaggaatctcaaagagcttcaaagtgtgatacagtgggggttgctcagtttttacattatttccaatacacagagtataaaaggcaaaggaatgaagctgaaaattatagactaagaggagaacaattgagcaaatactattctgaagaatatcctcctgatattttgagcgtggagggtgataactccatcaatgataaatcagagattatctcaagtatgagagccacagaaagaaatattggtagacaattgaaaggagtaggcagtcaaggagcgcaaattatttcgcttgatgaggatgtactgggctcaagtgaaaaaaatctgtttacagatattactccatag

SEQ ID NO: 3486 - DNA, 234 bp, Saccharomyces pastorianus
atgcaccgtaccatcgtcatcagaagagcttacttgcattacattccaaagtacaacagatacgaaaagagacacaagaacgtcccagttcacgtttccccagctttccgtgttcaagttggtgacatcgttaccgtcggtcaatgtagaccaatctctaagactgtcagattcaacgtcgtcaaggtctctgctgccactggtaaggccaacaagcaatttgctaaattttaa

SEQ ID NO: 3487 - DNA, 1647 bp, Saccharomyces pastorianus
atgcaagcattgaaaattttagaaaaggccactcgtctgattccacaaagtatggaccttttaactgcgtatattaacctccaaaactatgatgatgctaagaaaactttgaattgcagtaggaaggctttaccacaggaaccagagatttgggtcttagctgcgctattagaagaaggtaacaatcctaatgtaggtgtgaataggttggtcgatttactgaagaagggtttatcagaactttccgaaaatgggtacaaaataactttatctacatggttcgatcgagcagaagctttgagtgatacgcctaattcaaaattgacatgcgaggccattgtttatgccttgatggaattgcttaaagaaagtaccggtgatagtgatggattgaaaaacgttgatgaaacactggaaaagatggcagattcaatggtaaaaattgctgtcttgaaaaaacttattcaatgggatccttgtgacatagcgctatggtctagactaaagactgttgctgaaaaccagaatgaaatcgagcaatttttagtgttctttcaagaattattattttcatccaaggacagtgattatacgcgatcagtcattatagaagaaagccccagtttgtttatgatgtatgtgcacgaatattggagggcacataagggagatatcgaacagacactaaatgtagtcaaccaaattataggttttgtaccgaaccatttagacgtgcgcttctttaagataaaacttttgggccaatcgtcacaatttgataaaatgcaagagttcttccttcagtcttttaaagccttgagtgattcccatgtaaatggcatagaacgtttgtattataaatacgttaattttctacggtatcaaggacttacgggccaagctattgaaattttgaaagaaaaatgttcaactggttttcgtaattgtcacaagtttttcttacagctgggtcaaatttaccattccgtcggcaatatcgagttagctagacaagcatatttatcagggacaagggaaatccccaactgtcctttgttatgggtatcgttatcaaaaattgatgaaatagatctcaaaaatccaataagggcaaggtccattttagatagaggacttttgaaaaacggtaatgacgcattattttacatcgcgaaagttcaaatggagataagacttggaaacttagatcaggcagagttgctcacaattcaggcattacaacattttccaaacgatgcactagtttgggttgaacgaatcaagttgttgaactatgggaagaaaagtttatcgagaaagaccatttttcaagacgcattgaaaaaaacgcaaaatgaccatagggttcttttggaaattggaatatctttctacagagaaactcagtatcaaacatcatcaaaatggttagaaagagcaatgaggaaatcccccgtttatggggactcatgggtttggttattcagaacatacgcaaaattgaaaaaagatcccgctgagctttataagttgtttgaccaatatgaaccaatttacgggcccgaatggatagctgttgctaaacatgtaaaaacgcaatattatacaccaagagcgattctatcgcacttaattgacaaaaaataa

SEQ ID NO: 3488 - DNA, 2349 bp, Saccharomyces pastorianus
atggcagaagcgctactagaaagcattactgttcctgcagttgtttcaaaagatgaatgcatttactgctacgaatccccttataatgagccattagcccctaacgcatcgcctaaacattccctgaatatatgtctgagctgtttccaagccacctgtggtagacacctcccgctacatgcccaagttacaaagcatgcttgcgattctgttcattctaattacttaaccattgttaaagtggaaaaacccaaacaggaaaatgtagaagaaggcaatattaataaaaaaatgaaactacaagtcattgagaaatcagaagatgagactcatgacactttttggagcttgcaaagtttttgtagcgagaattcagctacaaatgtacttttagaatcaacaaatacgaatgtatcttccgcagccttggaaaagattaaccagatactgagagcaaagtcacaagatttcgaagataagaaaaattcttgggaattagaaattagaacatgccctcatacagaaaattttcaagttcctactaagcctgaccgcgctgtgaatttgaacctatgctcttcatgtgatctcactcagaatctttggttatgtctacactgcggtaacattgggtgtggtagagagcaaatcggtattgaaggccattcgcatgctttggaccattaccgtaacaataataatcatcccttggccattaagctaggctcattgagctcttcgacttgtgatttgtattgttacgcctgtgatgatgagactagattcccagacaatgtcaacctaggtactgcactgaaaatatacgggatcaatattcaagaaaagatagcagatgagaagaccctagctcaactacaaatagaacagaacgaaaattggcaatttagaatggttgattccagtggtaaagaactcaaaaagcttccctcaagtaatgagtacggttgtgggctgatcaatttaggtaattcatgttacttgaattcagtcatgcaaagtctactgaatggtggcgttccaagctggtctttagattttttaggaaacgaattcccattggatgttgtgtatcctggtaataatttgaaatgccaatggattaagcttctaaatgctatgaaacttgaaccagaactttacgcaaacggcattaaaccttctgctttcaaaaaatgcatcggtcaaaaccatgaagaattcagctccaatagacaacaagatgcaatggagtttttgactttccttttggattccttggacaggaagtttttctcggataattcagcaggagcctcaaatccaaacgatttgatgaggtttatgatggaggatagattacaatgtaataagtgtggtaaagtcaaatactcttatgaaccagcagaggctatacagcttcccttgaaggaaaacgatgaatctcaagatgttctagagagaataaaggcatattttgatggccaaacaatcgaattcaaatgcgccaattgcaaggaatcagtcacggcaaataaaaagcctggtttcaaatctcttccacatacacttgttttgaatccgataaggattaagttgcaaaactggattcccgtcaaaacgagtaatgaactttcgctaccaggcttaactgacaaggaagatgtgcttgatgtttcttcgtacttatcccaaggatttaactcacaaacagaaaccttattgccagatgatgacgaaagcgatacaaaatttaccccaaataaatgtggcatctctcaattaattgaaatggggttcactgaaaattctagtgcacgtgctctattcaacacgggaaatcaggacgctgagacggctatgaattggttattccaacatatggacgatcccgacttaaatgatccattcattgcccctcctctaaactctaagaaagacaagacagacgttgatgatgattcgttagcttcaatgctttctatgggactaagtccaaagctatgtcgtaaatctctgataatcaataatggcgatgtcaaccgtagtgtagagtgggtttttaataatatggatgataatggagagttgcctggttctgaagggcaatctgagcaacaacagcagcaacaaaaggatctcggatattcgactactagtccttacgctttaactgcagttatctgccacaaggggaattctgtacactccggtcattatgttgtctttatccgtaaaatggtagaaggtgagtggaaatgggtcctttacaacgatgagaaattggttgtcgctgaaagtatcgaagatatgaaaaaaaatggttacatatatttctatacaagatgctaa

SEQ ID NO: 3489 - DNA, 3039 bp, Saccharomyces pastorianus
atgagaaacgaagtggaggtgatgaagaaactgaaaggcgctgccaatgtagtacagtattacgattctaatgcttctcgtcgtcgggatggtgttcaagggttcgaggttcttttgctcatggaattgtgtccaaataaatctctactagactacatgaaccaacgattgtcaaccaagttgtcggagtcagaaattgtgaaaatcatgtacgacgttgctctttcaatctcacagatgcattatcttcctgtacccttgattcatcgtgatatcaagattgaaaatgtcttggttgatgctgagaatagttttaaactggctgatttcgggtctacttcaacaagttttccaattgtgacgacccaccaagacattgctcttttgactcaaaacatttacgtccataccactcctcaatatagatctccagaaatgattgatctctaccgatgcttgcccataaacgagaagtccgatatatgggctttaggtatcttcctttataaattattgtttttcactacgccttttgagatgacaggtcaatttgccattctgcattccaaatatgaattccccgtgaataagtattcatcaaagctaattaacttaattatcataatgttggcagaaaacccaaatttgagacccaaaatttatcaagtgttgtaccatatatgtgatattttgaatgtcgaagtgccaatcgaggataaatatcaggaaggtgcgtatgactttgctaagtataccaagtttcagaataagttacaaaatgttcaaatacagttgtaccaactacagcaaaaaaaaatcatgcagaacaataaattgagtgagtcagaagaaaacctgttgaatgatatgtttctttcctcttttgaagtttcatctaaacttccaatgaatgctagtgatggtactgtgataaccggaagaacatcatcccaacccatcagtaaaaaaactgaagaaaaggaagaaggctcttccgaaaagaaaaagtccaccgtgtctgaagacaaaacatcaagaaatacttccagcgttactaattccagcacgcttaatgttcctcaggaagttaatacaattcagtctccaggaatagcagacaagtcgatttttgatgataaaactcctggagagttatattatccaagtgtgagcgaattagatacttatctagacaaagaaatagtgaagcagccaagtgacccgagtgtatctgatcaaaaccctcatttgaatacacagtcactcccacaaagacagaagagtacaagctcatattcttctggtgggagatcgatgaagagtacatcttacggggcagcaaccattggatcagacgaggcgttgacaaacgaaaaaaatgtagggatcaataaaatgaaacagcataaatcaaacaatcccttcccaaaaatgaatgttgcttatcattctacaaatgaattgagtaatgatgccagtaatttcttcttggaagaacaacagcaaaaccaaagatctcaacaagcacaaaatcagcctagcgcacaagggcaaacttatccagaagaagctcaatatcaatctagggtagaacaacaacagcaaccacagcagcaagaccagcctcaagcgcccgctaattataaccaaagagcgttttacactggaagagatagagccggtcaatccatgcagttgggtgcaactgttgcaggtgatagcaatagaagggtcaacttccagaatatttctcaaaactatgttgctaactctcaatcaggatatcttccaggtcaaaattcctcagtaaatccgattggaagacctatcattcccatgaaccagcaacaagcgcagcaaattcaagcgcagcaattacaagctcagcaaattcaggccacgcagcaaattcaagccaagcagcaaattcaagcgcaacagcaaatgcaaattccaagtgctagtaaaaatgccagttacgtttcaggcagagcaaaccaaaccacggatgataccagaaattcccaggtaggtgagcctacggttacaatgggcaatactctcaatgagccaatgcattcgtcgaccaacaatgaaggtcttctgattgagctatcgcctttgaaagaagatgcaagaaaggaaccttttgaagataaaaaagtacctcaacccggggctccggaagacgcagggattaaaggaagtaatggtctgaacaattatcgaaatggtgttcttaatctaagtttgaatgaaatggacttgtcacgagacgatactggtgctgcagtttcttcttcattttcttcgtcttcgtcatcatctttatcaattcaaccggctaaactttctggacgtaaaggaacgagcaagaagaagaactattccacagacgatttggacgacagtatggtctctagtgaaagtattgatattgatctggacgatgcaagaagaggtaaagcgtctgaaagaaggccgctgcataatgaaagaaatcgtaaagaactaccaagagcaaccgatgctaaaaagccgaatcaatttgaggacaaggatcacagtgcatctacgaggcagccccgccaaccgttggatttgaacttccaggaagtaaacctctcctctccaacattaactcaagagcacagaaataaatctgactcaccagctccgcaatcacatcactcgcacagagttccgcctcattcttccaccacaataagtgaaaataagcgccacagcacaggtcatgaatcaacccgatcaagcggtaagcatgatatgcatagaaccaattccaagccaagacacgacttggaaagatacaggcaatccaaggatagggacagcaatagcagcatcacgatcagtacatcgactccatcggaaatgaggaagtcctttgctagagcccgccaatcactggacctcgagagaattcgtcgtgaagcgacggcaaataacggatccggaagtggtggcagtggtgggaaaagacggtctattttctcagtatttagaagtgagaaatga

SEQ ID NO: 3490 - DNA, 291 bp, Saccharomyces pastorianus
atgtcgactacgaatggcacttctaggagcgtttcagcaatgggaaatccggcagttgagaggtatactccgggaaaaattgtctgcgtggggacgcataaagtcgagattgtaaattatctagcagaaggtggctttgctcaaatttacgtggtgaagtttttggagtatttgaatgaattcgataatacagcgagtctgcccttaaagattggagatgtcgcatgcctaaaaagagtgttggttcatgatgagaatggattgaacgagatgagtaacgaagtgaggtga

SEQ ID NO: 3491 - DNA, 741 bp, Saccharomyces pastorianus
atgtcggaagtcgaaagcgcatataatatgaacacggcctatctggcgtctttagtactgatcgtatcagctatatatgtcgttagactagtgacgatcctgccttttttccacacccaatcaagggtaaggaaggagacacgagatgaggctagtgttttgaggacgcagaagttatcaaagaagccgctcaaaattttcgtattcctggggtcgggaggccatacgggcgaaatgcttcgtcttttacagaattacaaagaccttttgctagaccaatcgattatatacgtaggctactctgaccaggcctccaggcagaaattttgcagccttgcgcagaattttccccgctgtcaagtgaaatactacgagttcatgaaggcccgagaagtgaaggcgactcttttgcaaagtgttaagactatcataggcacgttggttcagtctcttgtgcatgtgattagaatcaggctttccatgtgcggctctccgcacctcttcttgttgaacgggcccggaacgtgctgcatcatcaccttttggttgaaaaccatagaactcgttctacttttcttggattcttcccacatcgtctacgtggagtcgttagcaagaatcaacactcctagcctgacggggaagatactgtactgggtggtggacgagttcgtcgtccaatggcgagaattaagagacaactgcttacccagatccaaatggtttggcatactcgtttga

SEQ ID NO: 3492 - DNA, 2769 bp, Saccharomyces pastorianus
atgcagataccaaaattcgaaaataaaccgttcaagcctccgagaagggttgcatcaaataacagctcccaacttaagccaaccaaaaccagctcaactcccatatctagattaaatgttacgacccactcaaaaagaaatgtcccagcagagacacccctgagtgttgctaaaaagcctaagattctagtctcaaatcaaaaagtcagctattttactatcatgtataggaagccgaccaccaaaaagcacaagacttggagcggcgatggttatgctacattgaaacctgatagcaccaagatgacattttataatgaaacaggaaagcttcttgggtcaagtgctttaccaaatgactcgggttctatttttgagacatttttcaaagtgggttctaatgaagtgcagttagattatgagttgaaggatagaatagaaatagaaaatgccaaacaaactttatcacaagcaaccggaaattctagctcggccgccatagatacaacaaccatagtgccttccgcgaacaatattagtggcaaatttcaaatgcctttgtctcaactatttacgttgaacactgtgaaaaggttcaagtcagtaacaaagcaaatgaacgagcatatgactgtaccaactaacaacgttcgaaatcttcaagcaaagaaatattatccagtgttcgatgttaataaaattgataatcctttagtaatgaacaaaagcgaagatgctgaagtcgacgtgatcgttgatcctttgttaggtaagtttctacgtccgcaccaaagagaaggtgtgaaattcatgtacgattgtgtaatgggtctagcgagacctgatactgaaaatcagattattgattgtacttctaaaagtttagtcttggaaaacgactcagatatcaacggatgtctattggccgatgacatggggttgggtaaaacattaatgagtataaccctgatttggacactcataaggcaaacgccctttgcatcaaaagtttcacgttcgcaattaggtataccattgagtggcctctgtaaaaaaaccctagtagtttgtcctgttactttgataggaaactggaaaagagaatttggcaaatggttgagtctgtcaagaatcggcattttaacattgagttcaaaaaattcacctgacatggataaaatggcagtcagaaattttttgaaggtgcaacgaacttaccaagtcctaattattggttatgaaaaattgctaagtgtttctgaagaattagagaaaaacaaacatcttatcgacttgttggtgtgtgatgaagggcatcgattgaaaaatggcacttctaaaatcttgaatactttgaagagcttagacgtaagcaaaaaacttctgctcacgggcactccgatacaaaacgatcttaatgagtttttcactatcatagatttcataaatccaggagtcctaggaagctttgcttctttcaaaagaaaattcattgcaccaataacaagggcgagagacaccgcaaacagatataatgaagacgtgttggagaaaggggaagaaaaatcaaaggagatgatagagattacaaaaagattcattttaagaagaacaaatgcgattctggaaaagtatcttcctcccaaaacagatataattttattttgtaaaccgtatgatcaacagattttggctttcaaagacattttacaaggagcacgattagattttggacaattaacattcagttcttcgctagggctcataactctactgaagaaagtttgcaactctcctacattgatcgggtcagattcatactacaactcgcatataaaggataccaaatcccaaggaagttacagtcgttccttaaattctggtaaattaaaagttttgatgacattattagaaggtatcagaaacagtacaaaggaaaaggttgttattgtatctaattatactcaaacattagatataattgagaacttgatgaacatggcaggaatgtcacactgcaggcttgatggctctatacccggcaaacaaagagattccattgtcacatcttttaaccggaatccagcaatattcgggttcttgttgagtgcaaaatctggaggtgtggggttgaatttggttggtgcttcccggcttatattatttgataatgattggaacccctcggtagatctacaagctatgtcgaggattcatagagatggtcaaaaaaatccatgcttcatataccggttggtcacaactggatgcatcgatgagaaaattttacagaggcagctaatgaaaaacagtttaagtcaaaaatttttgggagactcggaaacaaaaagtaaagggtcctctaatgacgatcttttcaacaaagaagatttaagggatttattttctgtcaatataaataccaaaagcaacacgcatgatttaatttgttcgtgtgagggtttaggagatgaaattgaggaacttccagaaaatgaacaacaagaagtcataaaaccggaaaagcgtagtcccacaacatggactagcgccttggagttacaaaaagaaatgaatgaagtagacaccaaagacgttgcaaaaaagtcacagtccatacggcagtgtcttgcaaattataaacatatagatccaacaaggcaagatgaattatttgatgaggttattacagaatcttttgcagcattgaaagacgatatcacatttgcattcgtcaagcctagcgaaatatgtcttatcgaagaatga

SEQ ID NO: 3493 - DNA, 2931 bp, Saccharomyces pastorianus
atgaatttaacaaatctgttcagatcagtcctcaagtaccgaaaaacaaatctgagcttacttttgttgatcacctatgttgttattgcagtactctacgttttcgaccatgagtattataaatttaacttgccaaaaaaagatgaacaacccgaatttaatgaactgttagaaacggcatggacagatttacaaactattacagcttctttccatccgtatacgtctagagataatgacaaagttcatgattacttactaagcagagttcaggagattacaaaaaatgtttccttcgcaagcatttccgatgataatgatagtaaaagatcgatactatttcaacagcgggacgttttcaatgcgtcctctgatatctcaagagtgatttattttgaatcttccaacattttagtcaagttagagggacaaaatcccgaccaagaaggattacttctatcagctcatttcgattctgtgcccacaggccacggggctacggatgacggcatgggtgtggcttctttattggcgaacctcgaatatcatatcaggcatagaccggacagaaccttaatcttcaactttaataataatgaagagtttggcctgttgggagcatcggcgtactttaatcatccatggtccgttctaactaaatacgtcataaacttagaaggaactggtgctggtggtaaagcagtgttgttcagaacatccgatacttcaactgcaaagatatatcagcaatcggttagagctaacccatttggtaactctatttatcaacaaggtttttatagtggatatgtcagaagtgaaacggactacaaggtttatgaacaaaatggcatgagaggttgggacattgcattttataagcccagaaatctttatcataccatgagggactccatacagtacacttccaaggcatctttatggcatatgctacatacctctttgcaattaagttcgtacgtggtgtctaattcactagacacggaggatcaaacacctgcttgttatttcgattttatcggacagagtttctttgttatgagttccaagacattattttactggaattgtgtatttttgttaatttcacccattgtcgtaatcggcctgtatctaatttcccgggataggatgacttggaaatcctattcttggctttcgtggatgcgctttccactttcattgttattgggtattgttactgaaaagattttctccaacgttgtaacacgtataaaccctttaacgttttcgagaaactacttttggcctctttcagtgtttttcactgaagtactcttggccaattacattgtaatcaatttattgaatcgcttttccccttgtaacgatatgaaaagtttatcaatcaacgaactgtttatcatcttatgggtcactttattgtttacgtcgaaaatgttgtatagttctggatacaagtatacaggcctttatccactctcggtattgtttatactaactactggggctgctatattgaggctgttaggatctgcattgaggccaaaaggaggaaaggggcatggcagagaatttatggatcaccactctggttatagctctcactctcaaatagatatcgaagaagaaaaccacgaggacactcaacagttccaaaatcaatccgcatcgctgcaggacgaacaaacgagtatacaagaggataatcgatcaaccactctttctggggcgccacttcacgttaacgatgatcaggacactgattcagaaccaccacaacatgatgaaagggcacctttattaaagagatccagtcacatcaataacctaccaaatactatagaagcttcttcaaaaccaaaatacatcgactatgcatggattatacaatttttagtaattgtaccattatcgtcattcattctgttcagtagtgtggatgctattatggatgcgctaaaccaaactgtccaggaagggaataaagctacacttgacataattaaatttgggatgaagggtagtattttaatcgcactaccaattttaccttttttttacaaagtcaactatatgactatattattgactgtactacttttcttgatttccatatcaaaaacacttttggaaccaccgttcacaaataacaatccattaaaggtaagattctctcaaaatattaatttgtcccatggcgatgatgctaatgtacatgtcctaggaagagaaggaaattttttgaaaccaatgcttgaggatttaccaagtataaagcacagcttcacaccaataaactgtaatactattgcaaatggaatggagctttgcacgtatgacggaatgaggccaaacttattgagctcaaattggaaaacgaacatcagtgacatgctgaagatccatattctacacgatagtcgaaattcaactaacagatccccttacgaaccaatagttgcggagctgcttctggaggtgaaggagaatagagcatgcacgttatcgtttaatggtaagtcccatgaaaaatcgcctgttagagaagttacagtttaccaaggcagaagttctactttgcagggctcaaatacttcaaaaacgatcaaatgtagttctggcatagatgaattgcaattgcataaacttgacttcgatcaagaaagttatcgaatcggggtccagtggttcccaaaaatcttaaccgacaacaatatagaagatgataatctggatacaaaagacgagctatccgtatcgattagttgttattggggagagtatgactcggattcagttgtgaatggtactgctgttaggaaagtcccagcatttgacgaattattgaattatgcaccaccagctttttcatttacaaacgagcaaaaggggctagtgattgttcaagacgctgtaaccttataa

SEQ ID NO: 3494 - DNA, 1062 bp, Saccharomyces pastorianus
atggattatggctattttcccccttcgcaacacatggaagaaacaaatggtgtggatttctggatagatagtaatgtcgaatttacgcagtataaaaggcccaactcttctacgtccacacttacaagagtcttaacggacactactaatatatcgaataacagcggatctctgaaaaggaaaacagtcaagcacaaaaaattctcgcaaaggaaaatattcaacaacagtgagtattttgacttcgacaagggaagttctgactgtaaacacgttttgaaaagtatttccaagcaactaattttcctcccaagatgctttcaacatcacagtatccgaggttggatgaaagaccggtactcagagtttggctacaagataaagagaaaccaacattgccctccatctgcatgtgtacagacactttacaacacgaacaggtgtgataacgggctgtttactcccagtgatttagactctctgatcttatataaattcatgagatactccgacaataaaaaagagctgatgtgcagattttgccagggcagtaattgggtagttgcagaaaactttctaaagcatctattttttgcgcacgggatttcgtctgaattcaagccacacacactgtaccaatttgagtctaagcttctgaaaatccaaggaaaaaatgtcaatttcaagatacaagtttcgaaagagtcgcagttcagcaaaaaaatcctgagctcactcgtcgtatccgtcatcccctctcccttggcatattatacacagacgttgaatggggggtttagaagaatacacgtgaaatgcccctgctgtgaaagttggattcgtttaggttggtgcgaatacgatgagattatcaaggattcctaccaggatttcgagtcgcttcgaaatctcaatgcaaattacgacgggatgtcgtatatccaaacccgcaatcgggaagagattgaaggaatatacgaaaactatttcacccactatatcctatgcgatttggcaaggttccgaaccaaatgtctatatgttcaagttataacaaaataa

SEQ ID NO: 3495 - DNA, 156 bp, Saccharomyces pastorianus
atggaggatctgcacgcgtgtgttggccagatacccaatagcgacctcctgctgctgttccttgcggatagtacgtttccctacgggttgttggtggtcaagatagaaaaggccttgagggaactgaccgatttgtatggttacagactaggttaa

SEQ ID NO: 3496 - DNA, 222 bp, Saccharomyces pastorianus
atgcttcattttgaaaacgtcaaagtgttcctggagaacactttgaagccatacgatctcagctcggtggatttcaagacttcccacttacagtcctcgatactgctaaccgccacaaatggtggtatactttcctatgcgacctcggacagtagcgtgccgaaaaactcgataaacgaaataaactcggtcaataatttgaaaatgatgagcttgctgatc

SEQ ID NO: 3497 - DNA, 975 bp, Saccharomyces pastorianus
atgcaagaattgactattttgacctctgcttctttcggttctttggaagaagtcgactccattaacttggtcactttgcctgccatctctaccttctctaccgatttgcagaccgccaacaacatttatgtttctgacactgcattggaaagtgtcgaaggtttcgccactttgaagaatgttaacactttcaacatcaacaacaacagatacttgacctctttccaatcatctttgcaaagtgtctctgactctttacaattttcctccaacggtgacaacaccactttggctttcgatgatttggtttgggccaacaacatcactttgagagatgttaactccatttctttcggcagtttgcaaaccgttaatgcttctttgggtttcattaacaacactttgccagctttgaacttgactcaattggccaaggtcggtcaaagtttgtctattgtttccaacgacgaattatccaaggttgccttcaccaacttgactgccattggtggtggtttcatcattgctaacaacactcaattgaagaccattgacggtttcagtaaagtccaaaccgtcggcggtgccattgaagtcaccggtaacttcaccagtttgaacttgtcttctttgaagtctgttagaggtggtgctaatttcgattcttccgccagcaacttctcttgtgacgcattgaagaagttgcaaagtaacggtgctattcaaggtgactccttcgtttgtaagaacggtgctacttccacctccgtcaagatgtcttctacttcttccggatcttccaagagctctgccacctcttccgcttcttcctctgatgattcctctaacgctcaagccagtgtttcctcctccacttcttcatcttccaagaagtctaagggtgctgctccagaactcgttccagctacttcattcatgggtgtctttgctgccgttgccgttgccttgctatag

SEQ ID NO: 3498 - DNA, 333 bp, Saccharomyces pastorianus
atgggccccgccgattctccatatgccggtggtgttttctttttgtccatccatttcccaaccgattacccattcaagccaccaaagatctccttcacaaccaagatatatcacccaaatatcaacgccaacggtaacatttgtctggacatcctaaaagaccaatggtcccccgctctaactttatcaaaagttctattatccatctgctctttgttgacggatgccaacccagacgatcctttggtgccagaaatcgctcacatttacaagactgatagatccaagtacgaagctacagccagagaatggactaagaaatacgctgtataa

SEQ ID NO: 3499 - DNA, 192 bp, Saccharomyces pastorianus
atgatatctaataagtacttagcaccgaatgtcaaatctacgggttggtccatttccaatttgatgcttgtttcaggatgttccatgtcaacaaatggttttattatgacggatcctgaaccgatatcaccatccgctacgaacttgattgtttccttagtgatcatgatattaatagaatcgctcagttga

SEQ ID NO: 3500 - DNA, 237 bp, Saccharomyces pastorianus
atgataccatcttccttacattggaaattgaccaattggacacagtctttgaaaccgtcgatgattcttttgaaaagggatgcttcttcgaatttagcttctaacatttttttgtctttcaactgtactttatttgtttgctggttactgacgttgacaaaaagaaggatggggggcaacgagaatggcgagaagaggaatggaaggaaggctaaagcaaaaaagtatcttatataa

SEQ ID NO: 3501 - DNA, 111 bp, Saccharomyces pastorianus
atgatggagtccggtgtgttgtcagcaattaacgttaaagtgtcggtgttgttaccgcaacgtagaatcttacttagcgaggtcaaatccatacccagtgtgacaggatga

SEQ ID NO: 3502 - DNA, 1308 bp, Saccharomyces pastorianus
atgaaggttcaggatcttggagccaacaaggtgggactagaagacaagagtttgctagcgaatgaatctagtataattagcgcattcaccagaagaataataaaggaaaaaagcggtaactaccaggtgctgaaaagatctattgatgggaaattgatctaccctgaagctactggagtatcttccaatagaggtaataagctgttgcagaagagtgaagtggttaccaggagagatttgaataattctaagcccattattgagcagaccgtcttttataacggttcagagcatcgccttttacaaacaaatattgcggctgataataaaactaacaggagacgtaaaagaataaaattcacacccgacatcaacgttgagccagtctcaattggtggtgaaaacaacaccaacgaaagcaacgaaagcgacgatggcatcactgatgattatgacggcgatgaagatgaagacgacctatcaagattagtgaacattaaggagattttgaccccaattctttcgcttggggacgtaataaaccataaaacaatctcaaaaaccttttcaagcttaattttgaagaacctggctacccaaattattctaatgattgaaagggagcaaatgtcagttgttagatattcccagtttttagaagtgtttttgggtgatcatccagaaccgatctatgaatccaacttatacctaccgccttacaatcataacttaactttacctgaggactgtaaagcaaccggattaaccggaaatagtccaaagaatagtatcaacgaaactaatgtcaacaccaccatgactacagaggatgaatactccaataatgaaacggaagaaactaaagatcaagaccctttttttgccctaccaaaactagaacaatctaatgcacttctatcattgctaccatcatcatccggatccgtctctatttcgacgttaacagcagcggaacaacaacaattgaacgacgaaattgaatcagctagacagctatcacagatcgcattacaaagaaacaaagaattcataagaaacttgcaaaaaattagaaaatccgtgataaaggccaatagaataagggggaggatattaagctggagccgagagttcttgggcatttcagacgatgatattactattccagtagcgctgcgtgttgtcaagagagggttgatcagtgctacaacaaacaagacaacaaatttcgaagaagaaattgagaatggcatggaagatggcgtggctgatgataatgaacctgacgatgaggctaatagagcttga

SEQ ID NO: 3503 - DNA, 2490 bp, Saccharomyces pastorianus
atggcggatcagcttgtcgatcccgcgttacgggtttccttgattcaaacgatatcaggaatttcagttcttttaggcactgttacattagagcagtacattctgccgttattgattcagactatcacagattcagaagagttggtagtaataagcgtcttacaaagtttgaagtctctattcaagacgggattaataagaaaaaaattctatatcgatatttcgaaaacaatctcccccctactactgcatcccaataattggataagacattttacactaatgataatcatagaaatcattaataaattgtcaaaagcggaagtctactgcattctgtatccaataataaggcccttttttgagttcgatgttgagtttaattttgaatcaatgataacctgttgcaagcaaccagtgtcaagatccgtttacaatttactgtgtagctgggctgttagagcctcaaagtccttattttggaaaaaagtctccacaaatcatgtagattcctttggaaacaatagaattcaatttataacaaaggacttctcgagcaagaactatgggtttagtaaaaaaggcgtgaaattggactcttctataaaaggcgttaagtcgccatctactgttcattcctatgataataaggaaatcccgttaacagccgaagatagaaattggattgataagtttcgcgtcattgggctaacagagaaagacatctggaaaattatagccctaaggggttatgtaataaggactgcaaagatcatagcgacaaacccagattttctatatagcaacaagcgccaccacttgctaatacaaaattcgcccccaaatctaaaccttacaaatgtcatgccgaggaatatattttttgatgtagagtttgctgaacaatcgacaagagattcccaagatcctagtatagaaaaccagcaaatatatacaaacgatgaaagtgagcaaactagcaataagttgagcgtcaatagtgctaagcagctatccacgatcatggacattaatgggtcgttaatgttcaagaataaatccattgctactacaacttcaaatctaagaaatgtttttgttcagttggaaccaacatcctatcacaaatattcaacaaatcacggaatgaatgataatgttgacgtcaaaccagaaaggcaagtaatggttagcaacagttatgatggagacgttgagaccatacaaaaatttttgtcaacctttaagattctaccacctttaagagactataaagagtttggacctattgtagaagttttggaaaatccagatatgagtaaactaacaggtaagctaatagctacactaatggaaaacgaacccaattctatcacggctgctactgtatcctgtggagaagtaccgtatttagtaacgggttcagaccagggtgtggtcaaactttggaacttaagagaaattgcactcggtgaggtttactcctcttccttaacttatgattgctcctcaagcataactcagttgactataattccgaagtttgatgcttttgcagtttccagcaaagacggacaaatcattatattgagggttaatcattacaaacaagaaaatgaaacaaaattctcaaactgcgaatgcattagaaaactcagcttaaaaaatttggataaacacgaatatggtacgagaacgagagcgtttgtgaacgatgagaaatctgtattaatagttttaacgaacttatcaagggtgatgatatttgacattaaaaccttagaaagaatacaagtcattgagagttctccaagacatggtgccatttctagcatctgtatcgatgaggtttgctgtgccttggttttggggacaacaagaggtattattgacatatgggacatccgcttcaatgtcatgataaaaagttggtcattcggggatcacacgcccattactcatatagagacatgtgggttttacggggaaaattccataatcgtcgtaggcggtagttcaaaaacatacctgacaatttggaattttgttaagggacattgtcaaaccgcgttcataaactctgatgagcaaccatccatggaacacttcttgccgcttgaaaaagatttggaagatttagggttttgtggagtcaagtctttacatgcattgagtacaatttcagtatcaaataataaaatctttgttactgacgaatctactagatccattatcatgtttgacctgaaggaattatcgctctctaaggcagtggtcagtccatcaagatttgacgatgtctttattccaacacaaattacggccaatcttactatattattgaggaaaaggaaaccttccagcacccacccaggtgacgattcattataccatcatgatatcataaatgcgttggctacaattcaggtcgatcaaatacctctattgattgtttgcgataattctgggcttattggaattttccagtaa

SEQ ID NO: 3504 - DNA, 1944 bp, Saccharomyces pastorianus
atgggggcacagctatccctgttggttcagacgtccccttccattgccattttttcatacatcgatgttttagaagaagtacactatgtttctcagctgaactcatcaagatttttaaaaacatgcaaagcactagaccctaatggcgaaattgttatcaaagtgttcatcaagcccacagatcagtatagcttacagccttttcttcaacagataaaggcccaatcgtttaagctgggacagctaccacacgttttgaactatagtaaattgatcgaaacgaatagagccggctatatgatacggcagcacctgaaaaataatttatacgataggttgagtttgaggccgtatttacaggacattgaattgaaattcattgctttccaactgctgaattcgttaagagacattcataatctaaatattgttcatggtgatataaaaacagaaaacattttagtgacaagttggaattggtgcatattgacagattttgctgcatttatcaaacctgtatatctgccggaggataatccaggtgagtttttattctattttgatacttcaaagagaagaacttgttatttagctccagaaagatttaactccaaactttatcaagacggccattccaaaaatgatacgttaaccaaagaaatggatgtatttagtcttggttgtgttatcgctgaaatatttgctgaaggcagacccattttcaacctatcacaactattcaaatacaaaagtaacacatatgatatcaataaggaatttcttatggaggaaatgaaatctgtcgatttaagaaacatgattctagacatggtccaattagatcctggaaagaggctatcgtgtgatgagttattaaatagatatcgcggaaatttctttcctgattatttctacactttcacttacgattatttcagaaatttagtaactatgacaacaagtacaccaatcacagatagtgcttttactaatagtacattagaggataacctgaagcttctcgatgaaactaccgaaaaaatttataaggatttcccgcaaatctgtcattgtctagattttcctctaaccaaaggcaaggacaagataaaagcagattcattaacattcacatctgatgtcatagatagagaagatagtcagctacttaacgccaacttgtacttccccggaaaccatcatctagttttgcagaaattcacccaagtatcggaaaaagtaaaatcggttaaagaagaatgtgctttacttttcatctcgtatttatctcatagtctaagaaatattgttttgaggactacaaaattaaaaaatttagaactattagcagtatttgcgcagtttgtttcagatgaaaataaaatcgatcgggttgtgccttatctcgtgtgctgttttgaagatagcgatcaggatgtgcaagccctatctttgttaacatttacccaagtactatcatctgtgcgaacactggaccagttgaacgaaaacgtattcgtagactacttactaccaagactgaaaagattactcattaccaatagacaaaatagtaattatctaagaatcgtattcgctaattgtttgagcgacttagctgttatcatcaacagatttcaagaaattacttttgccaagcactataataacaactcaacagataacaatttggaaattatggaaagcgccactaaatattcagcaaaactgattcaaagtgtcgaagatttaacagtactttttctaacggataatgatacaaacgtaaaaatggcacttttgcataacatcttaccactttgtaaattttttggcagagagagaacaaacgatatcatattaagccatttaataacctacttaaatgacaaagatcgcgcgttacgggtttccttggattcaaggatatcaggaattcagttc

SEQ ID NO: 3505 - DNA, 135 bp, Saccharomyces pastorianus
atggccctcttgagtttattcaaatcacttaatacaagtatcacatgttttccattctttgaaaaaaaacgtatcttcctatacaattccttcttctgtgatgtatattgttcaaaaaattcctgcgcatcgtaa

SEQ ID NO: 3506 - DNA, 813 bp, Saccharomyces pastorianus
atggacgtagagaacgtcactatactctggaatgtcttgagtggcactgtcatgcaacattttgagttgatggaaaatagggaatcttccgctactgctgaaaactcaaacaatagtggcgaggattcacttggtgttgatgtcgagtgggtagatgatgacaagtttgtcattcctgggcctaaaggtgccattttcgtatatcaaattacagaaaaggcacctataggtaaattgattgggcatcatggttccatcagtgtcttggaatttaatgacaccaacaaacttctgctaagtgcgtcagacgatggtactctaaggatatggcatggtggtaatggtaattctcaaaattgcttctatggtcattcacaaagcatcgtatctgcgtcatgggtgggtgatgacaaggtaatatcatgctcaatggatggatctgttcgtatatggtcattggaggagaatacactactggcgctttcaatcatggatggtatccccatttttgttggaaggctatcacaggatggagaaaaatacgcagttgcattcatggatgggcaagtgaacgtctacgacctaaagaaactaaacagcaagctactgaaccgtaagcaacaatcgttgtatggcggcaatagttgcactaccacgggcagcagcattacaattccacaacccattcctctctacgctagctaccaaagtaaccaggacaacgattgtgtctttgacctgtcgtggaaccatacgggggacaaaatttctgtagcatattcgcttggggaaggttcagttgtagccatataa

SEQ ID NO: 3507 - DNA, 612 bp, Saccharomyces pastorianus
  modified_base (558)..(558): a, c, g, t, unknown, or other
atgagtgttacgagtgaagaactaaattatctaatctggaggtactgtcaagaaatggggcatgaagtgagcgcattggcgctacaagatgaaacaagagtgttggattttgatgagaaatacaatgagcatattcccataggtacactagtaaatctggtgcagagaggaattctgtatacggagagcgagtttctggttgataataaaggcgatatcagctctttagatgaacagcatctttctgaggactttaatttggtgcaagcactacaagttgataaagaaaaatttccagaaatctctactgagggaagatttgccttagaaaatgattccgagaataataattgtggcaagaatgactcaggcacgactgatggactaagcctaggctctgatgtggcatctagcggtactggtgatagcctagatggatttgtcaagacgttgaaggagattacgaagctagataatattgtttcctccatttggaatccattgaatgcatccattcttgcatacggtgaaaaggattcagttgcaagattgacccanaataatagagactctagaggatccccggtaccgagctcgattgtatcatgtata

SEQ ID NO: 3508 - DNA, 117 bp, Saccharomyces pastorianus
atggcttatatggctacaactgaaccttccccaagcgaatatgctacagaaattttgtcccccgtatggttccacgacaggtcaaagacacaatcgttgtcctggttactttggtag

SEQ ID NO: 3509 - DNA, 3093 bp, Saccharomyces pastorianus
atgggattttgggaggataacaaaggttctattacctcagggctgaagagcgctggaaagtatggttaccaaggaactaaattcgtcgccaagtcaggatacaaggcaggaaagaaacactataatactagtaaatcgcaaagggaaaagaaaaatggcaaaaacaaaagtgatgaagagatcgaaagtgacgaagaagaatacgaaagaaaaccggccgatataagaactttgaaaaacccgaactctttccctcctccacctttaaaagctggacagagaacgtatacaggacagcaacagcagcagcagcaaatgccaggcgaagaatcctatggtgcttctcaagcagtatatcaagctcaacctggtgtttctccaatggggcagtcacaatatgcgcagccacaatacgcgcagtatccacaacagcaacaagctccggtggcacagcagacgcctacatatggacctcaagggcaacaagtgccgccgtatggatcatattctaattcgactagtttccagtctttgccgcagcagaatcaacctcaaaatccaattcaaagtcaaacatccttgaactctgggtcccagcaaaacacaggttttcccgcacaaagcccagggtatggatatcctcagttagctagtccaacacaaccacaaccactgctgcctcaaaacaataatcagtatcaacagcagcagcagcagcagcagtccccacagaatccagctattcggtatgggtcgcaaggcctacccaattatggacagccccaatatccttcgaatccacagcaagtgggtcagtcacagcagcagccaccatcccagtttggtcaacaggtcttaccgccgcctgtacaacaacagcagcatcaattccaaccccaggccggtcaaccaggcttgcaaacccctggacagtcttcttttaatgcctttggtcaacaacaacaacaacaacaacaacaacaacaacaacaacaacaacaacagcccctaaatcaaaacactgtttcaggaccatatagtaataacgaattcaattcagcaagtgcgtacggccaacctatgccaaacagcataaacatgcaaggaacaaaccaaaattatggagccccacccatgcagagtcaacccccaatcggtggacagccacctatacctgagaggatgcaaccgcaaccgcaagcacttccaccaagaaatgcttaccaggccgaaccatctattgattcctcccaatccactcctcattttgaagtcgcaccgtatgatcctgatgcacctgctcctaggcccaaaattgacatgcctatagtggatgttagtaaccttcctccgcctcctacgcatagagatagaggggcaaccgtaaaacgagaatcgacaccaagtgtcggaagcttaccagacactaataagaaaactctgccaagcgtgacttcttcgcctgcaatttcattgttacaaaagaacccagagcctattgccataagcaatgggcctgagcctattgtcatgagcaatgagccagatcctgctgtcatgagcaatgaaccagatcctgctgtcatgactaatgagccagagcctactaaggagccagattctagcgccaaacaaagtgaagagaatactactaagccttccattttaggacattatgatgttcaagtaaactttgctccacctccgaaaccttttagacataagcctaattccgaaccttctgaccattcccggaaactctttaccccagaacaaaaagcaccacaacttccttctcgaaataattccgaactttctgaccaaccatcacggacaaagtctaactccaccgaaccagtgtcaccagcaagctcagggggagtacatgaagctcctatttctaattttctgcctccaccgaaaccgttcagacacactgaaaaccaacaaggccaaggtgctggattgccgtctttcaaaaagaagaatgacatttcacaaacaccctctcgcgaggaaattgaaaatgtcaaaccgccattgcagcctaaatcagactctcgatttcaacctcgatccagaccagttctcatggagacacagtctattgaaagctttcaaccaccaccaaagccatttagacgtccacaaaaagaacggtcattttctagtgataatgacagtactactgataatgacagcgccaatagagttgacgagagcgaagcgaataacagtcgtggtcgtggtcgtatagtaaagcatgatggcgctcatgatgcacatgatgctcatgctagatacaaaagtgagaattctgatgaaaaagatcatgatgagtattctcagaatacgtccgctggatttggaagaaaaaaggtctcagcacctccacctccacctccacacaagccccagagattaggtgaggcagctgtagcaacggaaattaagaatgtcaaaggcttaaatacccatgaaaagtcaccgttttcaccccctgcggtcagcttgccttcaagacctcctatgcaagcgtcagaatctattaagaaagcacctccacctgttgtgaaacccaaacctaagactctctctttgaagaataatgagcctccaaaagaattggtcaggaaaaacaccgcagatttggtaaagggggctgggcaagatgaaaagttgaatagcattacaaatgaattatctcagtttaaattgaggaaaacgaatgtaaatttggaagatttgggtaactcaaaaaaactgaaagaatcgagtccgattgattcagatctggatgagaactatgtttctgcatcgggatctgtttccccaccaaggccaccgccttcgaggtcgagcgctatcaaggttccaccgcttgttctaaagaagaatgacaatttgaagaaaaagccaccaattgttcctaagaaaaagtcattgctaacagcccttgaaccgagacccatcggcatggaaaaagctggttcattggacaattctgatgacagtgatgatttgaatccctttgagagatataaacgaaacgttgttcctcaagaagaagacagactgcataagcaaaaataa

SEQ ID NO: 3510 - DNA, 336 bp, Saccharomyces pastorianus
atgagatcattgggtctttcgcccagtgaagccgaagtcaacgatttaatgaatgaaattgacgttgatggtaaccaccaaattgagttcagtgaatttttggccctaatgtctcgtcagctcaaatccaatgactccgaacaagaactcttagaagctttcaaagtattcgataagaacggtgacggcttaatctctgctgctgagttgaagcacgttttgacatccattggtgaaaaactgactgatgcagaagtagacgatatgttgagagaagttagtgatggctcgggggaaatcaacattcaacaatttgctgccttgttatctaaatag

SEQ ID NO: 3511 - DNA, 708 bp, Saccharomyces pastorianus
atgttccctctaatcgcctcaaaaaatagaagacccatttcccttactattagcaaattatttcgaacaatgagcattgttaagggcaaaccagaggaagccaaaatagttgaagcccgtcacgtcaaagacacatcggactgtaaatggattggtttacaaaaaatcatatacaaagatccaaacggcaatgaaagagagtgggatagtgctgttcgtaccactagaaactccggtggtgtagatggtattggtatattgacaattctaaaatacaaagatggcaaacccgacgaaattttattacagaagcagttccgtcctcctgttgaaggtgtgtgcattgaaatgccagccggtttgattgatgctggtgaagatgtcgacaccgctgcactaagagagttgaaggaagagactggttacaaaggtaaaattatttcgaaaagtccaactgtattcaatgatcctggtttcaccaacaccaacctctgtcttgtaactgtcgaagttgatatgagtttacctgaaaaccaaaagccagtgactcagctagaagacaatgagttcattgaatgcttcactgtcgaattgcacaagttcccagacgaaatggtgaaattggaccaacaaggctataaattggatgcgcgtgttcagaatgtagcacagggtattctcatggctaaacaatacaatatccaataa

SEQ ID NO: 3512 - DNA, 669 bp, Saccharomyces pastorianus
atggaaaacaacaataaactaacttgccctgtttgccacatcggtctcagtatcgatttgtctcaacctgctttagaagtagacatggaatccttcaagaaacaaagtattgtgagtcgcttaaacatgagcggcaagtggcagtcgtcgacaaaaatcgaagcgttggtggaagaactatacaaattgagaagcaacaaaagaacaataaaatccattgtattttcccagtttacaagtatgttagatttagtggaatggagattgaaaagagctggtttccagacagtaaagcttcaaggtagcatgtctccgacgcaaagagacgaaacaatcaaatactttatgaacaacattcaatgtgaggttttcctcgtaagtttgaaagctggtggcgtggccctgaatctttgtgaagcttctcaagtatttattttggatccatggtggaatcctagtgtagaatggcaaagtggtgatagagtacatagaattggtcagtaccgacctgttaagatcaccaggttttgcattgaagatagtatagaatcaagaattattgaactacaggaaaagaaggcgaatatgattcatgcaacaattaaccaagatgaagccgcaatcggtagattgaccccagcagatttacaattcttgttcaataactga

SEQ ID NO: 3513 - DNA, 1581 bp, Saccharomyces pastorianus
atgcaagaaggtggtttcattcgtagaagacgtacaagaagtaccaagaaaaatgttaactacaacgaactaagcgacgatgatgcaggtgtgaaaaattcgaaatcttcggatctgaaaagggagagagaagacgtagtggacatccaagacgtcgaatatctcgacgatgccacactggtaaagactcctgacgagggcgacgaggaccgcatcatagatctgacggcttccgataaagaacggaccgccactgatgatgatatatttttgatcaagagtgaagacgataagataatagaacctaagaacgagctagacggctccgatgatgacgaacccctaacgaaaaaaaggaaaaccgctagcaaaaggaagaaaaaacccactaccaaaaggaagccacccaaagtgactccatatgaaaggaacactttgcggttatacgaaaatcatcctgaactgaaagatgttttttcagttttgaaacaagcgcccccctacgtagcccaaaggtcagagcaacccgatggtatgaccatcaaactgctgccctttcaactggaagggcttcgttggcttatatcccaagaggaaagcatctacgcgggcggtgtcttggcagacgaaatgggtatgggtaaaactattcaaaccatcgctttgttaatgaacgatctgacaaagtctccctctctagtggtcgccccaactgtggcgctgatgcagtggaaaaacgaaatagaacaacacaccaagggacaactgaagatttacatataccacggtgcctcaaaggccaccaacattaaagacctaaaggactatgacgttatactgaccacttacgcagtcttggaatctgtgttcagaaagcaaaactacggattcaaaaggaaaaatgggcttttcaagcaaccttccgtcttgcataatatagacttttacagagtcattctggatgaggcgcacaatatcaaagatagacaaagtaataccgccagagcagtgaacaatttgaaaactcaaaaacgatggtgcctatcgggtacccccttacagaatagaattggtgaaatgtactctctgatcagatttttgaacatcaaccccttcacaaaatacttttgcaccaaatgtgactgtgcctcgaaggactggaaattttcggatcgcatgcattgtgaccactgtaaccatgtcatcatgcaacacaccaattttttcaaccatttcatgctgaaaaacattcagaagttcggtgtagagggccccgggttggaatctttcaaaaacatccaaacactgttgaagaatatcatgctcagaagaaccaaagttgaaagagcagatgatttaggactcccccccagaatcgtcactgtcaggagagatttctttaacgaagaagagaaggatctctacagaagtttatattctgatattaagagaaaatataattcgtttgtcgaggaaggtgttgttcttaacaattatgcgaacattttcacccttgatcacaagaatgaggcagctggcagaccatcccgatctggtatacaacagagtaaagactctacc

SEQ ID NO: 3514 - DNA, 156 bp, Saccharomyces pastorianus
atgtgtgttgaagctttcagtgaatacccaccattaggtagattcgctgtcagagacatgagacaaaccgttgctgtcggtgttatcaagtctgttgacaagaccgaaaaggccgctaaggttaccaaggctgcccaaaaggctgttaagaaataa

SEQ ID NO: 3515 - DNA, 678 bp, Saccharomyces pastorianus
atgtccaaccaaggatttctgacttttgccagtcatgttgatgcaaacaagttcttaaccaagtacaccacgacagcactgaagattcagggacgtaaagtcaaaatagcggcggcccgtacgaattcgttattggggctttcaatggaaatgcaaaataaagatagtggtaaaagcccccattcgaccttgaagaaagtgctaaggtccagaaaactcaaatccaaattacgcaacgatgacacttatgcaaagaaatgcaagctaaaaaggcaaataagacgtctaaaacataaattgagattgaaagctatagatgatagtgaatttagtaggattgtcaaagagtttgaagcccgtagactacaggaaatggagtcccaacgagaaaaaccaaaagaattgcaagatttttcgaaagaagccagaatctcaaacacaatagagaatccaccgaacaaagtcttgcttgtacaaaatttaccaagcggcactacagatgcgtcattatcacagatacttggaaacgaagctctagtcgaaatacgattagtcagcgtccgaaacctagctttcatcgaatacaagactgtttcggatgctacaaaaatcaagaatcaattgggtcccgtttacaaattgaaagacaacgatgttaccataggatacgctaagtag

SEQ ID NO: 3516 - DNA, 534 bp, Saccharomyces pastorianus
atgttgaagttcatattcgggaagcggtttgcttccacggggtcatatcctggttcttcaagaatcactttaccaagaaggcctgcaaaaaaaattcatctggggaaatctcgaccggccatttatcaccaattcgatgttaaaatggagttgagtgatgggagtgtagttgttcgcaggtcacagtatccaaagagcgagattagattgattcaagaccaaagaaacaacccattatggaaccctagtagagatgatctggtgatcgtggatgctaattctggtggtagtctggataaattcaaaaagaggtacagttctatgttttccgtaaatacagcatctgctggttctggttctggagagcctaccgttcccgaagggagtgaaaaagaagcacaagttaaaaaggaagaggaaaaggaagttgttgaagaagcatttggtatgggtgactacctatcgctactagacgatggtgaacaacagattaagtcaggtaaattggccaataagaagaaagataagaaataa

SEQ ID NO: 3517 - DNA, 861 bp, Saccharomyces pastorianus
atggggcctgggagaaacacatatattaaatttggaacagaccctagaagttctccagaatatgcccaatatcaaactgaatattttaagattgaaagaaaattgttgtcttctccaagagtgaaaaaaaatgtacccaaaccaccacccttagtatttgaatctgacacaccaggcgatattgatagtaggtttaaatttgacggggaaagaataccgtggtatttgatgttacaaattgatttgttaatcagtgagccgaatatcgcagaggtttttagtaatgtcgagtacttagataaggcaaatgaattgacggggtggttcaaagaattagacttggtaaaaatgagaaggatagtgaagtacgaacttggttgcatggtccaagggaattatgaatacaacaaatataaattgaagtactttaaaacaatgttgtttgttaaagaatccatggtgctagaaaacaagaattcagaggaagacaacacgggagttaacgacaatttagacgcagacggggatatagatatggatgtcggtactcaagggtcatccgcggtttcaatcacgaacgtcgatattgctgttggcgatgatgatgacgataatgacgctataactgaggagccagatgatgccgccttagaaaatgaagaaatggataccaatcaaaacttgaaggtaccggcaaatgcagacgatgatgttgacgcagatgaagaagagcaagaaggtttcgatatcaaaacagcaagtttccaagatattatcaacagaatagctaggcttgatcctaaaacggccgccactatgaaaagggatcttaagggatttgtcaatgaggccaatttgtag

SEQ ID NO: 3518 - DNA, 834 bp, Saccharomyces pastorianus
atgtcatcggatggtacagaagaacctcttgcgaccctttcggcaattccggattctaccgctgatcaagcaccgccggtaatagcagatgaatttacattagatctacctagaattccaagtttggaattgccgcttaatgtctccacaaagcacgctagtatacaaaaagccataagaatgtgtggagggattgaaaaagtgaaggaagccttcaaggaacatggccctatcgaatctcaaaatggcctagaactatatttaaacgaaggttacgatagagacggctctaaaacgtattttaacgaacaccctataattggcaaaagagttccctttagagatgaatctgtaatactaaaagtcacaatgcccaagggaaccttagccaaaaacaataatagtcttaaagattcaatcacttcgctgaaaaattctaataaattgagagtcactcctgtttccatagtagataatactattaaatttagagagatgtcagattttcaaattaaattagacaatgtcccctccgcaaaagagttcaaaagtagttttggttccttggagtgggataacttcaaaaattttgtcaattctgtaccagataatgactctcaacctcaggaaaatatcgggaatttggtcttggaccgtagcgttagaataccaagtacggacttccaattaccaccaccacctaaattatcaatggttgggtttcctttactgtataaatataaagctaatccattcgcaaaaaagaagaaaaacggtgttactgaagtcaagggaacatacatcaaaaactatcagttattgtccacggtctaa

SEQ ID NO: 3519 - DNA, 546 bp, Saccharomyces pastorianus
atgtctttcgaccataagccgcaacacataggtgaattgatacgtataaacgataacggaggcaccgtttcccttggcagagtgggcggagtattggctctcagcagagcatttagcgatttccaatttaaaagaggtgtcacatatccacacagaagaacaaaactaacaaatgttactcaacacctaaccggcgggactccgccgcaagaagcgcaagtcactgccgaaccagatgtactgatgcataaaatcgactacactaaagatgagtttttagtgttagcgtgtgacggtatatgggatatttataataacaaacaactgatccattttataaagtaccacctagtgtcaggaacgaagttggatgctataataacgaaattgcttgatcacggaatagcgcaggcaaatagcaatactggtgttgggttcgacaacatgactgccattattgtggtactgaatagaaaaggcgaatcgctacaagattggttcaataaaatgaagacccgcttagagagagaaagaggtttagtgtaa

SEQ ID NO: 3520 - DNA, 1062 bp, Saccharomyces pastorianus
atgctgttcaattccaagctggtaagcaggttcatttggagcagctgcgccggttttattttggcatcccttacaataccaatgatagcgggccaggctgcgccatcaagtcagcatgaaattttgatagcatcaaacctgatcaaaaagccatcaacttcccaaaataagactccaatagttcaagccagtccagacaacaacgatggaaaggcagatgatgtaacgttgtctatacagaattatcatcatcaccatcctcatttgtggtggccgcgatcaacggaccaccattattggtgtgtcctgaggaaaaatcaatttgcttattacaagacccaagatgaaagagaagccataagtgtcataccgagattcgagatattaaattttaagattagcgagcttgacggaatattgattgtttacacaccatccaaggatttaatgttcaagtttccaccagggcagaatgagcagactgacaaagaactaatgcacgactggaaaattgcgcttgagaaatttttatcgagtccaagtggaagtgaaagcgttactacaggcagtgattatgacgaagatgaagacgaggatgatttgattgtagtcgatgaaaaggcgggtccttctagcagaaagcattcttgtagtttgacgatggatgaacaactgtctcatgaagataaaaagttctataggatgtttgatcccaggaatccagagcaccaagtctgttctggaattctgtatactagagttaagaagaagaaaatatttaatagagccaaatggcaaaaattcaatgtggaacttactaatatctcatttagcctatactcctttaaaacaggaaagataaagaaaagtatcaaactgaataaaattgttgactgcatcgaaattgacaatagttccaagaacaagagcggtgatacaaatttcgctttaattacgtttgatgaaaggttgtcgttcaaagccgctaatgatcaagatatggtggactggataataaatttcaaaagcggcatccttataagaaaaaaaataaaaagctag

SEQ ID NO: 3521 - DNA, 3108 bp, Saccharomyces pastorianus
atgaacaacctgcaggttgattctttaaaaatgtgctatgaatcaattttcagggttttcgaatattgcaaaaaatgggtaactcagtttaaacaaaattatagtagattacaaggtacttttatcataaaggacacaaaaaccgttaacatgctttcaagaatagaaagattcctggaaaccactccctcggttttactagcccagcgttctttagagacggattcattcgaaagatccgctttatacctcgaacaatgttaccgacagaatcctcatgataagaatcaaaacgggcaattactgataagtttgcaagttacgtacgaagaaatcggagacattgattctcttgatggtgtgttaagaacttttgctaccggaaacttagtttccaaaattgaagagttacagtattcggaaaattggaaacttgcgcaagattgcttcaatgtgcttggaaaattttcagatgaacccaaaactactactaggatgttaaagtccatgtatgatcatcaattgtattctcaaataatatcaagtttttctttacattcatcagatggtaagatctcattagcttcagatgtaaaagaatggtacagtataggtcttgaagccgcaaatttagaaggtaatattcaaactttaacgaattgggtagagcaaatagaaagcttaaaaaaggttgatgatagagatgtgcttttacaatataatattgccaaagctttgatcactatttcaaatggtgagccattgaagactcaaaaatatatccacaattcctttagacttgttggaactaattttataaccgcatccaaggaaacgactctgttgaagaaacagaatttattaatgaaattacacagcttatatgatctcagtttgttatcttctgctaaagacaagtttgaatacaagactaacaccactatacttgattatcgaatggaacgtatcggagctgattttgtgcccaatcattacatactttcaatgagaaaatcatttgaccaattaagaatgaatgaagaggcaaatacggatttgggcagaacatttttcaccttggctcaattagcgagaaataactctaggttagacatcgcatctgagtcattgatgtattgtttggaaaagaagttacctcagtcggagttggagtttgctgaaatattatggaagcaaggtgagaatgatagagctttaaaaatagtacaagaaatacacgaaaagtatcaagaagattcatctgttaattcccgtaatcgcgccactgtacttttgaagtttactgaatggctagatctttcgaacaattctgcatcagagcaaattataaaacaatatcaggatatattccagatcgattcaaaatgggacaaaccctattactctattggcttatactatagcaggttacttgagcgtaagaaagcagaaggctacatcactaacggccgcttcgaatatagggcaatatcttactttttattggcattcgaaaaaaacacagttaaagtaagagagaatttgccgaaggtggtcacgttctggctagacactgctgctgcatcaatttcagaaactccaggaaacagaaaggaactgttaagtaaagcaacggaggatatatgtagccatgttgaagaagcattgcagaattgccccacatacatatggtattttgttttgactcaattactgtctagattactacattctcatcaatcatctgctcaaataataatgcatatccttttaagtttagccgttgaatatccatcccatattttgtggtatatttctgcccttgtgaattccaattcttcaaagcgagttcttcgaggtaagcatattttggaaaagtataggcaacattcgcaaaaccctcaggatttggtgtcttctgcattagatttaacaaaagcattaactcgcgtttgcctacaggacgtcaaaaccgttacaagtagagcaggaaagtctttagaaaaagatttcaaattcgatatgagtttggctccatctacaatggctgttccagtaagacagaacttagatataatctcacctcttgaatccgattcaatgagaggttaccaaccgttcagatcagttgtcactataattaggttcggatcatcttataaagtgttttcctcgttaaagaaacctaaacaattgaatatcatagggtccgatggtaacatttatggaatcatgtgcaaaaaagaagatgttagacaagataaccaatatatgcaatttgcaacaacaatggatttccttttgagcaaggacatagcttcaaggaaaagaaatcttggtataaacatatattctgtattatctcttcgagaagattgtgggatattagaaatggtgcctaacgttgttactttgagatcaatcctttctacaaaatatgaaagtttgaaaatcaagtacagtttgaaaagtttgcatgatagatggcaacacactgcggccgatgagaaattgaacttttatacggagcaagtaggaaagtttccaccaatactttaccaatggttccttgaaaacttccctgacccaatcaattggtttaacgctagaaatacctacgccaggtcatacgccgttatggcaatggtaggacacatattagggttaggtgacaggcattgcgaaaacatattgttagacatacaaaccggtaaagttcttcatgttgattttgattgtctattcgaaaaggggaagagattacctgttccggaaattgtcccatttagattgacaccgaatctactggatgcattagggattattggaacagaaggaacattcaagaaatctagcgaagtcactttggccttaatgagaaaaaacgaagttgcactaatgaatgtgatagaaacaattatgtacgacagaaacatggaccactcgatacaaaatgcactaaaagttttaagaaacaagattcgtggcatagatccacaggacgggttggttttgagtgttgctggccaaaccgaaacattgattcaagaggcaacttcggaagagaatctaagcaagatgtatattggttggcttccgttttggtag

SEQ ID NO: 3522 - DNA, 3846 bp, Saccharomyces pastorianus
atggaatcacacgtcaaataccttgatgagctcataatggccataaaggacctgaattcggggatggggccgcaggtgcagatcaaaaaagtgcccgtggacccgccttcttcccaggagtacgccaagagcttgaagatcctgaacacccttgtaagaaatctgaaggaccagagaaggaacaatattatgaagaacgatacaatctttgcgaaatccgtttccgctctcgccctgctactggagtacaatcccttcctacttgtcatcaaggattctaacgggagtcttgagatacaaaaactgatagacgacttcctaggcatatccgttctgaactatgacacacaccataggatatggttcatgagaagaaagctgggcaactggtgtaaggcttgtgttcagttttacgggaaacccgttaaattacaactttccacacatttggaaaacatcataaaccgttacgagcaatctttgacagaagttctgcaggggaacacagagctcgccaagttttatgacacgttgaaaaacttatacattctcttgtactggttcacgtctgaccatagtacatttgggaactcaataacattcttggattcttctttagggttcaccaaatttgacttgaactttcaacggttgataaggattgttctttacgtattcgattcctgccagctatcaactttagaatacgctgaactccaactcaaatacgtgtccctaatcgtggaatatgtgtgtaacaggacaatagccaccggcttggatacaccatcgttaatcagcagtgagcaattaaaatttgcactgaccacaatctaccgctttttggataacaaatgtggcctgctggataatgatcccacaatggcaaaggcgattcttcgactttactccctttgcatttcaaatggtttttcaaaatgtttcatagaccacttccccattgaacaatgggcagacttttcacaaacgcaagtcttcccgtttacccaattgactaacaaggccctttcaatcgtttatttcgacctcaaaagaagatcccttcccgcggaatctctgcagtatgacgataagtataagacttggatttaccaattggagcaggactcgaatttgaaaaatgttacctcctcatttgacgatcgatataagcaactagaaaaactaagactactagtgataaaaaaattcaaaaataaacgaagagaaactttgcttgagtatcgtgttaatcaattaagtcctggattttttcaaagaactaaaaatgacttcaagttggtcctaaacgaagtgtcagtatccattcaaacttgcttcaagacaaataatgtaacaaaactgacggcatggactgtagtcctcggaagattagcgtgccttgaatcacaaaagtcaatgtccaaccattcaaatcattcaaggaatttggataactgggacgtttgtcatttatgcgatgttgaaaaaaccggaaacccatttgaacgaataaatccagatcgaccagaagccgcaaacaaatcagaagtttttaaaatactttactcaaactttctaaatcatgcaaacgtggacgaatttagtgaatccttgctgagcggcatcttattttctttacaaagaactttcacccattttcaaccaccaaaacttgtggatggggatgatcgaatgaacaagactttcgagctagtacaaaaatgtttcatgaatacgaatagatacttacgtttattgagtaccagaattgtgcctttactcaacatatcagactcccataattctgaagatgaacacacagctacgctcatcaagtttctgcaatcccaaaagttaccaatcgtgagagaaacttcagtgatggcttggacacaattgacattgacaacttcaaatgacgtgtttgatactctacttttgaaactgattgatattttcaattctgatgattatagtcttcgaataatgatgactttccaaaataaaaaatatggccagaattttgaaaaaacaccctatcaactattatcgccgattttacctgtactactaagacagctggggaaaaatcttgtggaaagaaaggttggatttcagaatctaatcgaattgttaggttactcttcaaaaacaattctagatattttccagagatatatcatcccctatgctattattcagtacaagagtgacgtactgagtgaaattgccagaattatgtgtgatggggatgcaggtttaattaaccagttgaaagttactctattgaaaaaaaatagtaggcaaattttcgcagtggctttggtgaaacatggacttttttctctagatattttagaaactctctttttgaatagagcgcccacctttgacaaaggatatatcacggcataccttcccgattataagacattagccgaaataacaaaactctacaaaaataatgttactaaagatgccagtgataaagaaaacgcaaatatgattttatgctctttgcggtttttaataaccaattttgaaaaggataaacggcatggctcaaaatacaaaaacgtgaataactggacagacgaccaggaacaaacgtttcaaaagaaattacaggacaacattttaggtattttccaggtattttctagcgatatacacgatgttgaaggtcgcactacttattatgaaaaattaagagtaatcaatggtatatcattcttaatcatatacgcaccaaaaaaatccataatttccgcattagctcaaatcagtatctgtttacaaacaggacttagacttaaagaagttcaatacgaggcctttagatgctggcatttgttggttcgccatttaaatgacgaggagctatctaccgttatagacagcttaatagcatttatacttcaaaaatggtccgaatttaacggaaagcttcgaaacatagtatacagtatactggatactttaatcaaggaaaaatcaagtttgattttgaaattaaaaccctacactactttagccttagtaggcaagcccgaattaggtattttagcccgtgacggtcaattcgcaagaatggtaaataaaattagaagcactacagatcttatctctatatttgctaataatctaaagagtagtaacaagtatgtcataaatcagaatttggatgacatagaggtgtacttgaaaaggaagcaaacagagagatccattgatttttcatccaaaaaaggtggacaaacgtccgatataacattggtactgggtgctttattggatacatctcataagtttagaaacttagacaaaaaactttgtgagaagtgcgcgaagtgcatcagtatgattggtgtattggacgtcacaaagcatgaattcaaaagaacttcttattcagaaaatgaagtttacgatcttaatgataatgtccaaaccatcaagtttttaatatgggtaatcaacgatattttagttcctgcattttggcaaagtgagaatcctagcaagcagttatttgttgcccttgttattcaagaatcattgaagtactgtggtttaagttcagaatcctgggatatcaatcgcaaagacttatacccaaatgaagctaaactatgggaaaagttcaattccatctcaaagacaactatttatccgcttttatcttcattgtatctcgcacagtcttggaaagaatatgtaccactgaactacccctccaataactttaaggaaggatataaaatatgggtgaaaaggtttacgctagatttattgaagacaggtacaactgaaaaccaccccctgcatgtattttctctttga

SEQ ID NO: 3523 - DNA, 1518 bp, Saccharomyces pastorianus
atgaagttttcaaaccttgcgtcagtattactaattgctgtcagctacaaatatgtctccctttgtgaagctttttcactttttgaggatggcgttacctttcctaattttggtaagcaacctaagctcgcacagaatattcaacaatcacttaaggcgaaccgcttaaactcagatgattctctaactaccacctttgtctcgcctatggatacggattatagtttgaggctgagaagcgtagatccctctaaattagggattgatactgtcaaacaatggtctgggtatatggattataaagactccaaacatttcttttattggtttttcgaaagtagaaatgatcccgctaatgacccaattatactttggttgaatggtgggcccggttgctcctccttcactggtttgttgttcgaactagggccctcatcgatcggcgttgatatgaaaccaatccacaatccttattcgtggaataataatgcttcgatgatatttttagaacagcctttaggcgttggattttcatatggtgacgagaaagtttcctccacaaaattagcaggcaaagatgcttacattttcttagagctattttttgaagcttttcctcatttacgttccaatgattttcatatcgcaggggaatcttacgcaggccattatattcctcaaattgcccatgagatagtcgttaaaaatcctgaaagaacctttaatttgacctccatcatgatcggcaacggtatcaccgatcctttaatccaagctgattattatgaaccaatggcatgtggtgaggggggctatcaccctgttctttcatctgaagaatgtaagaaaatgagaaacgctgccggccgttgccgtagattgaataaattatgctatgcttctaaatcgagtatcccatgcatacttgccacaacttattgtgactctgcccttttggaaccttatgcgaagactggcctcaatgtctatgatatcagagggccgtgccaagacaatagtactgatggtatgtgctataccggtcttcggtatgtcgatcagtacatgaatttccccgaagttcaagaaacattaggatccgacgtacacagctattctggttgtgataatgacgttttcacaggatttttgtttactggtgatggtagcaaaccatttcagcaatacgttgcagaacttttaaatcacaatattccggtattgatctatgcaggtgataaagactatatatgcaattggttgggaaatcacgcgtggactaatgaactggagtggatcaataaatctaggtatcagagaagaaggttgagatcatgggttagtgacgaaactggtgaagagtttggacaagtcaagaactatggcccctttacctttttaagggtatttgatgcaggccacatggtgccctatgatcaaccggaggcaagtttacaaatggttaacagctggatttccggtaaccatgaattttccaagtccttttcaaaactctaa

SEQ ID NO: 3524 - DNA, 1437 bp, Saccharomyces pastorianus
atgtcggttgtgaacctattggcgaatcaccttgaatatatgccatacattcattcatattttgtatcgagattagcccttatagaatcccatatctattactcatgcttttccatcagaactactcttgacgacacgcttgatgaaattatcgagaacgttttcgagaattgcaaagcactggacagaatgcaggatgatctacccattatactttcattggaaaattacaaacaaaacatgaagattttagctttagagttccccaaactggactttgaaatgaattgctgtacaacaattcttttacatctcaggtggtatcatcaaaagataactttgaacttgtttgttatttccattatcaaagacaatttagaccaatgtgcaagctctcgccatgatgtaattgaaatacttagaacatcaaaattaaattttaaacaaaattgcattgcagtactgaatatattgcaggattttgactattatcctactatccagaacgaattcttgtatttttccctcacgacggtattttccatgttcctatatttatctgagagtatgaaaaatgatgaaaacgctttagaaactggttacataatcgcattacttagggatacgcatacccgtatgctaggatcagaggagaattatcattccatatacaatttgaaatggcagacatctctttttttttataccttttttttacgaactacaatggaaaaattcaatctctcaagtaagtatgcgaaattctatgagtttgatccgaaatattacgatgatatttcaaagaaattggccaagcatgcaagggaatcaaaagacgatatggtagagctcttaaaaacttccttcataaacaaaaaaaagatgactacattcggcagttttgttacggaagaccaagaccaaatgaaagtgtcatttaatctctttaaggaaataacaatgcatgatttgaacttcttgaaagtgtcaagcattccgaaattatggggatacagtactgcgagtgcgagtaaagactttagtgatagtaacgatagcaactctacctctaataaaaacaccaaaaactcgaacgatgaagatgatgctaatgataatgacaacaagaatgatgatgatgatgatgatgatgatggagaaaaagaagaagaaggagaagaagaagatgatgatgatgatgatgatgacaatgataatgacaatgataatgatgttgacgattacgacagatccctattcccaacaggtttcactacatccatagacgagacatattctgagcagggaacaaatgaaaataatgatgaaaacgcgatgtcaaacaaattatttggaaagatcgaagaatacttggaccatggtgtattcttttatgaccgggatttcttttttaggaaactgggcgcaaaaatgtga

SEQ ID NO: 3525 - DNA, 1554 bp, Saccharomyces pastorianus
atgggctcagtttttccaagtggtcatactatgggtgacacaaggaaatcaacctttgaatggagtaatagcatatcgcagaatgatcaaagaaccgagaacgctggaagctctataggctcagtggtccctgccatacccccggcaccatcaaattttcagcctgacctaggtgcccctattacctcgccccagctgagtccttttttggaccaccgtttaagacaacaggccatggcacacatgatttctgccgataagaattttttggcttataatatggactctttcaaaagcagagtgactaaggcatgtgactattgccgaaagagaaaaattagatgtacagaaattgatccgaattatggtagatgcagaaactgtatcaagtataacaaagactgtacgttccattttcatgaagaattgaaaaggaggcgccaagagacttcaaataataaagatatcggaaagccagtcaagaagcacaaatccgataaggaaaacgcatttggcgacgaaaattttgatgcagtggcgccagtaagcagtacttcctctacggacagcatgctcagattacaagaaccaattaaacctcaagaaagctctggggtttatgctgcaagcggagcaagtgatagagacgatgaagtatctgagcataatcccattgatgagaaagtgttgggggaaatagaactaaatcatagaaaggtttctagaaaagtttttgtgcttgaagaagtctgcaagaatatgaaggaaatgatagagaaattagcagaaaatactggaacagacgttgtcaatagagagtttatgaaacgaccaaaaagaaaacaatattcgaaggccttgttaactaaacaaaaactgttgcattttagacagaatatttctccacatttaactgacgaagaatttgtagcaccaataaatgatatgtttacaacaacttttaaatactctattttgcaaaccaaaatggcactggatttttcttttcgatctgcctcatctccgtcgaaagagaatatcttgtatccgttaccttctttggcgattgcgaagcgcctgatcggaaatataagatgcccgtcattagcttctcttctccacataattgatataaaccagtgtttgagacttgccgacacatattatagcccctccaaagggaatcttacttcgtcacaagcttttttgtttaatatatgcttgtgtattggagctactgtgacgaacttcaaagagaaacaagagctcattggtgaaaacggtcatgaaattttttattttgagaagtttgaattgtggaaattgaggtcgttcaccttcctcaattccgtctactactaccataaactgggtgtgacacgggttgacatgacgacattaaaggcattgcttttactagtgaagtttactcagcaaaaaatcagcgcctcgtcagccgttaaggtactttctgtggcaatcaaggttgcattggatttgcgactcaatttgcactctacctatgaagatctagagcttgatgaaataatttaa

SEQ ID NO: 3526 - DNA, 762 bp, Saccharomyces pastorianus
atggacaaattggaacatagagaaagccaaaggttgagcacttttagttttccaaacacaggaagtcaatccagtacttctatcaaatcacttggtagcccactccatggaagatttagctcgctttcttcaaacgaatctcagtttgatagtggcaagcaaccacaagagtatgaaaagaatttttattttgaggaatctcaaggtgaagccatattcaataagttgaaaacctactctttaccaggagacaaggatggggtgaaagcaaggagagactcttccatatgtccaaaaagagccactgcaatatcccctctaagaatggacagtaatgagttaccgttacatttacgttcacaatcacacgaattcatgaaaccatcaggaagaagaaagagctatcacaggaagagtcatgcaatctcatttagcaggtcttataagccagatttcattgacgactacgattccatctcaaatacgacctctaactcaagaaaaacctcaatggcgagttccattttagatagagaattacactcttcattggatacttcatacactcatcaagaatctcccaaaagtacgatactaaacacaaatgaacaattaagaaggaacgtaagcggcaatttcggcaatttggaagaatttgcaataagaaatcaaatcaatattaagggtaagatattcgccgataaaccagaaactggagacatcctgcaaccattaattgatttggatattggcaacgaatga

SEQ ID NO: 3527 - DNA, 156 bp, Saccharomyces pastorianus
atgagcgctccgattttgatcgaagcatgtgaacgtattacaaagttgattgatgaggaagaaaacaggatcaaaagaatcaactcctttattgccttgaaagatatgacagcctgggctaatgcagatgacgaaatgcaggacaagctatggtga

SEQ ID NO: 3528 - DNA, 696 bp, Saccharomyces pastorianus
  modified_base (568)..(568): a, c, g, t, unknown, or other
atgaaattagaacgcataagcagtaatggctctttcaaaagaggtagggacattcagtctcttgactctccatgcacaagaccttcgaaaaagatatcaccgagtgcatctttcacatctcttaaacacaaaaggcctttcaaggatattgtaagaaaatataaaggacatctctatcaaaatgattgtatttccagctctagcaaagtgaaggcaacaaggcctgatttgtctctaaaaacaagccaaaacttccttcaaaacaatttaccaaccacacctgtaaagaaagcctgtaatgaatacatcttaacaccggaagccacgccactaaaaaatacccctattgaaaatgcatgggcttcctctagaattgtttctgccaccagtctttcaatcgtgacgccaactgactttaaaaatgaccttgtcgatgaattctctgaattgaggttggtgcagccctcgattgttcagcatcgaccaacacatgcagtctttgaaattcctgaaatcgtagagaatatcataaggatagtggtttctttggagtctgctaacataccanaggaaaggccatgcctacgaagaagcccaaatcttatgaacactctttgcttatgtataaagatgaggaaagggccagaaagctggacgcaatctcagctgcggaacagtcacattgccataacataa

SEQ ID NO: 3529 - DNA, 2241 bp, Saccharomyces pastorianus
atgattgcaccagactctcaaagattattcggttcctttgatgaacagttaaaagacttgaaactggactcagatgataccgagagcaatagcatcaatagcacctttgcccctatggagtcctctcagcccagcaccaataacggtgccattggtgcgggcataaacgctgttcccgggtccacgtttaggtctaatacacctctcttgggtaaccgacatgcgcttagtagaacctcttctctaatggactctattggtatacagcgtgcagcctcgccgtttgcgcctgccaaagagccctttattccccagaacccaggggtcgtgggtacctcgttttggcacaatgaccatcctgaatcgcgggttggtacgcctgttcaacaaatccctctattgcaaagaaacgagtctacttcttcctttggatatgccgctaatcttggaatgaatttgagcacgcattctttggctgttgatattactccgttgggaacaccaacgattgctcaatcccatgccattttattcccgtcatctgatatacctccagctctggacgtaaatggcatacctcaatttcccacgccaatttcgatcgagtccagttggaaatatatagatacacaggggcagatacatggtccattcactacccaaatgatgtcccaatggtatatcggtggctattttgcttcaactctacaggtttcaaggttaggcagcacgcccgaaacactcggaataaacgatgtatttattaccttgggcgagttgatgataaagcttcaaaagtacgacacggatccatttagtacttttgataaagttcatgcgcaaccacccattaccgaccctagcaacacaaatctgcctgcatattcaaacgaagctattgctacaactgctgataccatggaaactaccgacaacgatattttcaaaccattgactcataaaaacatctgggatatggacagcggcactacagtgcaagaaggtgatattgaattaggttcaacagtctctacaggtcaaacgaagggaaaacccaaatcggaagttaaacccaagaatataatcgaggctagaaaaagcgaaaaagctgaatccatggccaaagtattattggaagagcaagagagacaaaatcaagaaattaaaagaaaagaagagattcgtttgttaaaaaagcagaaacaaaaagaggaacaagagttactgaaaagacaaaaggaagaaaaggaaatgttgaaaaaacggaaagaaagggaaaccttggaagcagaaaaacagaaacaaattgaaaataccataaagaatacacaagtccaaacagtacctctcaaaactccaaaagatctgccttcattgaatgatttaaattttaaaccaacaccatgggcttccaaagtcaagacgaatactccagtaaataatataaccaaaaacgttttgggtaataccgagaataagaaggaagcacctctgaatttacaactgaaaattaccaaggaagaaaaggaaaaacaggaactgaaatctgtgttaaactgggccaacaagtcaagcacagtaccaaattcaactattgatattaaatcacagtttcaaaaaacttctaaaaatgcaaaagaaacgccatcgccaaaagattttgaagacccaaattttattgaagaacagaaaaaaatatgggaaagagttcaaaactcttctaagcagccaaagaccactacttctgcaactactacgacaacatcttggaccacagtaacatcaaagacgaaaaaccctgctggtacagctgtacctttagtgtcaaagtccaatacagggttaaacccttcaacgacgataacaagcagcaccgtcgctacttcaacgactactacatttgccagtatgaacagtatctctcctcgtcaagaattcatcaagtggtgtaaatctcaaatgagactaaactctgggataacaagtaataacgtattggaactgttattgagtttacctacgggaccagaatccaaagagttgattgaagaaactatttatgccaatagtgatgttatggacggtagaaggtttgctactgaattcatcagaagacgcgctgaatgcgaaaggcaaggcagtgacccattaagttggaatgaggcgttggctctttccggtaatgatgatgatgactgggagtttcaggtcgttagtaagaagaagggtagaaagcattag

SEQ ID NO: 3530 - DNA, 213 bp, Saccharomyces pastorianus
atgcactgtccgtcaggggaccagcacagttctgagaatggccttgcatgcgacgtgaccagcgtctgtgatatggcatttttggagacattgtatattagaatactaggtccctgcgttatggccagaaaccggccatcgggtgatattttcgcagaagtagccatcaagccatcctccgtcgccacagctgcaatgaattggaacatatag

SEQ ID NO: 3531 - DNA, 1434 bp, Saccharomyces pastorianus
atgagacgtgtctcgaaagtcgaacgttatcttcagaacactcgactaacgaataaactaacagaaaaagatatgtcagaagtttcaaagtggccagctattaacccacttcattgggggtacaacggtacagtttcacatgtcgttggtgaaaatggttctgcgaagttgagtttgaagaacgataagcagcaagtcgaatttaatacgtttgttaatgaatacgtcccgattttgagaaacggggcccactataaactaagtccttacttgttcacaggtattttacaaactctatacttgaacgctgctgatttatcgaagaagtttcctgtcttttatggtagggaaatcgtcgagttctcggatggcggtgtctgtactgctgattgggtcatgaattcctgggaaaaggaatataatttcgaccaaaacactatgaaatttgatacgaagaagtttggtctcgacgagaaggcgacgcacccagagggatggcctcgtttacaaccacgtacgaggtacctgagagacgaagagttgaaagagcaaaggaaagtagatcttcccctagttgttgtcctccatggtcttgccggaggcagtcatgaaccaatcataagatctctaactgagaacttgtctcgtatcagtaacgggaaattccaagtcgtggtgctaaacacgaggggctgcgcgcgttctaaaatcaccactaaaaacttattcacagcttaccacactatggatattcgtgagttcttgcaaagagaaaaagaaagatatccaaacagaaaattatacaccgtaggatgctctttcggggctaccatgttagcaaactatttgggtgaggaaggtgacaaatcgcctttatctgctgctgttacattatgtaatccatgggatcttcttctttcggcacttagaatgactgaagactggtggtcaaaaaccttgttctctagaaatattgcccaatttttaactagaactgttcaagttaacatgggcgaattaggtgttccaaacggttctagccctgaccatacacctacgactcaaaatccatcttactataaattcacacccgagaatttggaaaaggcgaaacgctttaagtcgagtcttgaattcgatgagctgtacactgcaccagctttgggattcccaaatgctatggaatattatagagcagccagttcaattaacagggctgataaaatcaaagttcctactttagtaatcaattccagagatgatcctgttgtaggccccgaccaaccttattcatttgtggaaaagaaccctaatattctattctgtagaactgacctaggtggccatttagcttacctagatagcaacaacgattcgtgggttacgaaggcgatttccgaattcttgaataagttcgaggaattagttttatga

SEQ ID NO: 3532 - DNA, 2694 bp, Saccharomyces pastorianus
atgccggggcttatagtaattgtctttatcaaaaaagaataccagaacctattagcacctagggaaagtgcatttcaacaccttcattccagataccaagtcgaaacgcataagcttcttaacgctatgtctgaaggaaaacagcagtctcaaaacaccaataaaccacgcaaggctcctacagatcaagacgatgatgcagccacagttgtacctcccatccttacatattcacggaacgaaggccagtttttagctagtgatgctcatagaccagccgatgatcagtccacattgtttgaagaagagggagagcgtagggaggatgacctgttgccgtcattgcgtgggtctaactcaaaagcacatttgatctcttctcagctcagtcagtggaactataacaacaacagagtactcttgaagaggtccattttgaagacgcaagtttttgtggatcaacttcaagaggaaaacaatattcgtcccatttttatcgctgccaatgatgagcgtgaaaaattgcatgttctacaactgaatattaagatcgacggacattataatattaaagaaaggaacggttttaacatggagaaaaaagctctatccaaattatttcaatctcaaatcggggccgtagcaaaccacttaaacgccctgaaaaaaagagtggatgatgtttcctctaaagtgttcatcacaggtgacgtgaatactggaaaatcagctctttgcaactctttattaaaacggcgtttactgcctgaagatcaacttccatgtaccaatgtattttctgaaatactagaggcccgagaaaacgacggaatcgaggaagttcatgcaataccgctatatatagctcccaccctcaaggaggctgttgacatgtattcaatacaaaattcaaagacttacgagattcactctttgaaagagctctccgatttggtgccccagaacgaaaagtatgcattattgaaggtttacataaaggacgataagagacccgcctccacgagtttgctaagaaatggcactgttgatatatctttgattgattcgcccggtttaaatatggattccttacaaactgcggaggttatgtcccgacaagaggaaattgatttggtcatttttgttgtcaatgcagaaaatcagcttacgctatccgccaaagaattcatatctttagcttctcgtgaaaagaaattaatgttttttgttgtgaaaaaatttgacaaaatcagagacaaacaacgttgtaaagagctaattttaaagcagatccgtgatctctccccggaaacacacaaacgcgcagccgattttgtccattttgtttctaaaaacggggatgaaatagcaggttatcatggaggtgacgacagtgaagataatggtgatgaggaacccgataatgacccatattctaacaacgatccagatcccgattttgacagtctagaagattctctacgtaatttcgttctgaagaaaagatctctttccaaattactacctgccaaaacgtacttgtcgaaattgttgagcgatataacatcgatttccaaatcaaacataacaatgtatactgaagaaaaagaaaaaatcaaccaagaactagaaacattaaggcctgagatcctaaccgtccaaacaaagtgtaacgatttgaccaactgtgttgataaaatggcagaagaaaccattgcgttggcctataataatactaaagaaacacttctcagtgctttggatgttccattacacgaatatccaaagtatcaaggtcttgcccagatttatgacttcattttcacaacagaggattttatagtaaaccaaattgatgaagcaataaatttgagcgaagtatttgctaagcaaaagacagacgtgctggtgaagaaaatatatgaagttggtaaatccgagcttggtgatgattttatgtgcgaacgtgttttcaaaagtgaactaatgtttaagaaaaaaaaacacttaatagggaaaaggctaagagtttctctatcgataactgatttatttgctccaagttggaagggatttctgtcttatctaagttggcagaaacctagcacggcaccaatctatgatatagaggaacaaacacaagaaaaacaaaatgggctaatgaaaactttgggattgaaaaactatcctctgacacaatattggtcaagaccatcattacttttcacatcaaaaattcccacactgactttatactttttgggtagtacaaaagtagtaggcaacatcgtattaaacggtatcaaattatcatcatggaattcactcaagaaattgtcggttcccatcatagtagtgggttccctgctaggaatcacatatctaattcatgacttgcctcgtgctctaccaatgaatctttctagcaaatacaaaagaaagctacaagaggtagaatacattcatcttaacgcgcaaagaacttcaaacgaagtacgcgatgttttacgtgtacccacccgtgaaatcctaaggtcatgcgaaataatcatggacaagaagcaagtcaccaagaaagaactggaaagcaaaaacgaaaataacacactatctatcaaattcttcgactccctatacgaagggacaatggctcaaaaatcaatagtcgaagaaataaacttagatattgattag

SEQ ID NO: 3533 - DNA, 525 bp, Saccharomyces pastorianus
atgaagcaaggtgttttgttgccaaccagaatcaagttgttgttgaccaagaacgtttcttgttacagaccaagacgtgaaggtgaaagaaagagaaagtccgtcagaggtgccattgttggcccagatttggctgtcttggctttggtcatcatcaagaagggtgaacaagaattggaaggtctaactgacaccactgttccaaagagattaggtccaaagagagctaacaacatcagaaagttcttcggtttgtccaaggaagatgatgttcgtgatttcgtcattagaagagaagtcaccaagggtgaaaagacttacaccaaggctccaaagatccaaagattggtcactcctcaaagattgcaaagaaagagacaccaaagagctttgaaggtcagaaacgctcaatctcaaagagaagctgctgccgaatacgctcaattgttggctaagagattgtctgaaagaaaggctgagaaggctcaaatcagaaagagaagagcttcttctttgaaggcttaa

SEQ ID NO: 3534 - DNA, 882 bp, Saccharomyces pastorianus
atgcttcagaaatctagcagaatcgttccaaactacgcttatgagatgaacctactaaaaccttcatattttaactctcccacaaagtctttgttgatatcaatcaatagacaacgactatttacaacttcgcggttgactttaaataaggaaagtgaacccacagaaaagaaagacaaaagcaaacagcaggatttcaatcctaggcatttgggggttgcatcagaagtattcattccttcagcctacaaaaatcttcctagcgtatttactcatccccttattgttgcgaatgccttagtcagaagactttacatttttggcttaaactctgttcaagttgcgttatttcgtttccaatcgggcattaaaccatctttcttactctggaaaaacaaagctattgagacgtatgttaatgtaaatacatcatttgctcgtaaaaatctatcggaaataaaaggatctgtctcattatgggttcaagaggccctagaagccagatcccgtcaactgccaagcaatgccacattagactggcaattgatcaagttcaatgctgttccgaaattggtatccatacaacccatcatggtccctggaatgcccctagaacacttacaattaatatataaactcgatacaaaacaaagactaatcaacgtcaatcaacaaaccaagaaaagcgagatattggatcgtgatgttgtggactatgttgcctttttatgtgatgcgacaaccaatgatatgatattgatggggtctttatttgaaaataagccgaatgataaactaccaaagagtcatgaagatgacacgaaagttgccatacatagaatgaaggttaatggagacatatatcgtttgccttcccactag

SEQ ID NO: 3535 - DNA, 165 bp, Saccharomyces pastorianus
atgaatgcatactcaaatcagtcccttgacatcagcggcagaactacaagaaaattaccattgatgtgtctttccgaatacttccggacatttcctgttgaacataatgagttcgtcgtggcattagccatgtcagcgcgaaagctgggcagtgcgcggaaatag

SEQ ID NO: 3536 - DNA, 1656 bp, Saccharomyces pastorianus
atgaaatacgttgttgatctgcaagtgcgaggatcgtctttatgtgttatacggcgtatgtttaaagaggaacaaagttcttcgtcacagtctagtttagactccaaacaagataacagtaatgaaaggttagaggggtttttaaatctgctaaagatggttgttaggagaaagttggaaaccatcccaaacagccgcttgaaggattcgattataacagggcaagagttgatgagagagggacaagggagcattgaaattaaagatccaccaacagatgctcagcagcatttgattagaagtttagcaaaagttttattgcatcagttttcaagcacaagtacctctacaatggcagtgaacgagggacaggataatttatttttatccctatttgttagaaaaatttcgatcgagccagtgtcagtctctcatgctcccactagattgaactttcatgaaaaattgaatttggaccaacatatagattctattttatgttctgaggagattgaagaatcaagaacataccaagtcggggcggttgatgaattcatgctccatcccttttgttgcttggaagagtacaaagactcaaaaagtggtaacatactgtctgcagaattcgacaagattgacttagaagtggatggagaagacaattttgaaggggagactttaaactcctgcaccaattcagtagaaaattttaatattccacttacgaagcagacactcgatctcgtaagcatatcatttcttccaagtaccaacttcgaaggccaatgggagtcattgtatttcggtaacaatattaaagagaggctctatagttatgcaaccatttccctcaaaatagcaaatttcaaacaaaacggaaattcaaatgaagaagacgtcagaaccttaataacaaacaataaattacttcttgttcacggccccccaggaacaggtaaaacaaccttgtgcaaagccctttgtcaaaaactatccgtgaggagagaattctctgaagcttccaataccatcgatacaaactataaggggataataattgaattatcttgttcacgcatcttctctaaatggtttggagagtcatcaaaaaacatatcaataatattcaaagatattgaggagcttttaaaggttaatgaagagcgcgggattttcgtatgtctcttggtagatgaggtagaggcaatagcatgttcaagaacaaacctactgaatagaaatgaatcaacggacggtattcgtgtcgtgaacactttactaactcaacttgacaggctgaaaaaatatcataactttctaacattggctacgtctaatctgctggattcattggacgatgcctttgttgaccgggcagacgggatcttttttattggaaacccaacagcggagggaatcttgcatattttaagagtgtgtattgaagaaatggtatctttaggtataatttcgtttcactctggatcttccggaacctcattctttgagaaatatcaagaaattttaaagaaaattgcaataaaatgctcggtatgtccttttaattatttttacacaattttttttttcatttacaaccattttttactaaccattgtcatcaaagatgaatgcatactcaaatcagtcccttga

SEQ ID NO: 3537 - DNA, 444 bp, Saccharomyces pastorianus
atgttccaacgtgacttcagaaagcatggtgccgtccatctttctacttacttgaagatctacaaggttggtgacattgtcgatatcaaggccaatggttctatccaaaagggtatgccacacaagttttaccaaggtaagactggtgttgtttacaacgttactaagtcttctgttggtgtcatcatcaacaagatggttggtaacagatatctagaaaagagattgaacttgagagttgaacacatcaagcattccaagtgtagacaagaatttctggaaagagttaaggctaatgctgctaagcgtgttgaagccaaggctcaaggtgttgccgtccaattgaagagacaaccagctcaaccaagagaatcccgtattgtttctactgaaggtaacgttcctcaaactttggctccagttgcatacgaaactttcatctaa

SEQ ID NO: 3538 - DNA, 396 bp, Saccharomyces pastorianus
atgattgaattgaatggaccgcaagaacacccaaagaacaatataagagcgaaaagagtgaccaagcttcaacacctagacaagaagagagtacgagatcaaattgaattgctcactaaaaaactagataaaaaccaagaggaaacacgcctactggctaagttgagagatgatttacaagcttctgacgaacgtttaataggttatgaagggaataatagtgaacttggtgtaaggagtatattctatgataaagattggaatccgaagggagctgcaccatcaaattacagaaatattccgtacaatcctggaactttcgaaaggcgaaccgaagttaaagtcagactaaggaatcttggaaatattgtcttaccaggcgaaagctcaaaatag

SEQ ID NO: 3539 - DNA, 465 bp, Saccharomyces pastorianus
atggccttatggcggatcaagcttgtcgatctaaggaccacagaaggagaagctaaggagcactgtcaaaaccacacaggtggcgtaaattcctgtaagtttaattacaggaactctctagtattagcatctgcagattcaagcggaagactaaatttgtgggatattagaaaaatgaacgaaagcccaatcactaccatggaacatggtgcttccatttccactttggagtggaatccaaatttcagtacggtgttgactacagctggccaagaggatgggctagttaagctatgggatactgcccgcgaagagactatatttacacacggtggccacatgcttggagtaaatgatgtctcgtgggatgtgcatgatccgtggttaatgtgcagtgtggcaaacgataattcggttcagatttggaaacctgcggaaaacctcgtgggacaagaacaaccttaa

SEQ ID NO: 3540 - DNA, 867 bp, Saccharomyces pastorianus
atgagccagggtgccgaagaaccagcaggtgaagcttccaatatccctgtcgatttgcaagaaagatattcgcattggaagaagaacactaaactcctttatgattacctgaatacaaattcgacgaagtggccttctctaacatgccaattctttcctgatttagacaccacgttggatgagcatcggatcttattatcctcatttacgtcttctcaaaaacccgaagacgagactatttatattagcaaaatatccactttaggtcatataaaatggtcatctctaaataacttcgacatggacgaaatggaattcaaaccagaaaactcaaccagactacccccaagtcacttggtcgatgatatcagcattttcttcccaaatggagattgtaatagagcaagatatttaccacaaaatccagatatcatagcaggcgcatcttcagatggtgcgatctatatttttgatagaacgaaacatggatccactagaataaggcagtccaaaaattcgcatccgtttgaggccaagctattcggctcgcatggagtcattcaagacgtggaggccatcgatacttcctcggcagacgcaaatgaatccacatcattggcctggaacctacagcaggaagcactcctactgtcttcccattccaacggtcaagttcagatttgggacattaaacaatattcacatgagaatcctctaatagatacacccttagtatcaatagagagcgatgcgagcggtgtgaatgatgtaacgtggatgccaacacatgattcactatttgctgcttgcactgaaggaaatgttgtttcgttattggatccctataatgagtcgtatgatgcggcc

SEQ ID NO: 3541 - DNA, 1128 bp, Saccharomyces pastorianus
atgggtgttgaagggttaatagaagaaacggagagctggacctgcgagcccctttccggaaggccgctagatgagattgtaaaagatgctgagaatgctggtgacttagtgacttatattcgccaaccagaggtaagtttggactttaaattgaagtttattgctgtgcacgaagagttcttttctgtgcaactaccagaccggcaatcaaggataagaacatgtcataacctgggtgataaagggatacagaacgaaattgtattcgtttttgtacctgggttaggtggcaacttggaacagtttgagccactgctcaagctactagattcggagcaaaaagcttttttggcgtttgactcgcctggatttggtcaaagttccgaatgggaagactatccaatgttaaaagtagtggagcttattttcgttcttgtatgtgacgtattcaaaaaatggcctaccagtgggtcaagcgatgatgacacaaatccatttaatggccgcaaaatcatcctcgtaggtcattccatgggatgttttctggcatgtcatctttatgaacagcacttggcaattctcagtgtggtggagaagtttgttctattgacgcctccaaaagctcatattgagcagctttccaagaatagacgtcttttccaatgggcgctttatggcatcttcaagctgccatggttatttgacatctatcgaaacaaattcgatcaagtaaagggtttggaaagttccggcatcaagcagtatttttatcaagataatgatgatgttaagttgaagtataggaaactttggcaatttaaaaataatattagcaataaaagcagaaccatcttaggttatttgcttggatgggtaactgttgattgggacaaatttagtgttatgttgacacaatcggatataaaacaggacattatattgtttggtgcggcaaaagatcctgtagcccccatcaagaattttaaatactatgaggatactatcaataaagaataccttcgtaaagtgataattttaccagactgttcgcataatttatgcttggatcgcccagaattagtatgtaagatgtttctacaggaagtgattaacgaggtcgattcatag

SEQ ID NO: 3542 - DNA, 4344 bp, Saccharomyces pastorianus
atgcaacaagttgctgaagaaccagtcttagtcaactcgagacagggaacatggaccaattttgtcaatttagccgatttagcagcgttagcagttcctgcagggttcagggatgacggcctacccaacggtgtcactttgattggtaagaaattcacagattatgcactattaaacctggcaaaccgctatttccagaaggcatttccaaacgattcaagaagctgtggtgttttcacagaccggaaggtaaaatcagtatatgacagtttgaaaggccctgactacgacccatctacctctataaaattagccgttgtgggtgctcatctcaagaaccttcctttaaattggcaattggagaaggtcaatgcaacatatttatgcacgacgaaaactacaaagtcgtatcaactttatgccttacccaagaacggtcctgttttaaaaccaggtctcagaagagttcaaagcgacgttggatctcaaatcgagcttgaagtatacagtgttccaacgaaccagtttggcgctttcatatctatggtccctgaaccattaggtatagggtctgtagagttagaatccggtgaatggataaaatccttcatttgtgaagagtcaggctataaagctgagggtacggtcgacatcaccaagtatggtggatttagagcatatttcgaaatgctaaagaaagaggaatccgaaaagaaaaagctgttcgatactgtgttgattgccaatagaggtgaaatcgctgttcgtattatcaagacattaaaaaaaatgagtatcaaatccgttgctgtttactccgaccctgacaaatattcccaacatgttaccgaagctgatatttccgtacctttgaatggtactactgcagcacaaacatatctagatatgcaaaagattatcgatgcggctaagcaaacgaacgcacaagccattattcctggctacggtttcctatccgagaatgcagacttttctgatgcctgtagcaatgctggcattactttcgtaggcccttctggagacattatcagagggctgggactgaaacattctgccagacagattgcagaaaaggccggtgttccattagtgccaggttctttgctgatcacctcggttgaagaagctaagagagttgcagcagaattagaatacccggttatggtcaaatcaactgctggtggtggtggtatcggtttgcaaaaagttgattccgaagaagatattgaacatatatttgaaactgtccaacatcaaggtaaaacattttttggtgacgctggcgtgttcttagaaagattcattgaaaatgccagacatgtcgaagttcagcttatgggtgatggttttggtaaagcgattgctttgggtgaacgtgattgttctctacaacgtcgtaaccaaaaggttattgaagaaacccccgctccaaatctaccagagaaaacaagattggcattaagaaaggcagccgaaagcttgggatccttattgaactacaagtgcgctggtactgttgaattcatttatgacgaaaaaaaggacaaattttactttttagaagttaatacaagattacaagttgagcatccaattacagaaatggtcacaggtttggacttagtcgaatggatgataaaaattgctgctaatgacgcgccagattttgattccacgaaggtcaaagtcagtggtgtttcaatggaagcacgtttatatgctgagaatccattaaagaatttcagaccttctcccggtctattagttgatgtggaatttcctgcttgggcaagagtagatacttgggtaaaaaaaggtacaaccatttctccagaatatgatccaaccttagccaagattattgtccacggaaaagaccgtaacgatgcaatttttaagttgaacaaggctctggaagagacgaaggtatacggctgtgttactaatattgactacctaaaatctattatcacctctgacttttttgccgaagcaaaggtgtcaacaaatatcttgaattcttaccaatatgaacctaccgcaattgaaatcactttgcctggcgcacacactagtatccaagattacccaggtagagttgggtactggagaatcggtgttccaccctctggtccaatggatgcatattcatttagattggcaaacaaaattgttggtaatgatcacagaacacccgctatcgaagtgactttaaccggtccatctatcgtgtttcattgtgatactaccattgccattactggtggtactgctctatgtacactagatggtgaagagatctctcaacacaagccagttgatgtcaagagaggatcaactctatctattgggaagttgacaagtggttgtagagcatacttgggtattaggggtggtattgacgtgcctaaatacttaggctcttgttccacctttactctgggaaatgttggacgttataacggaagagtattgaaattaggagatgtattattcttgcctagtgatggaaaaaagaattctgaattagaaaataacacccttccacagggtattcctcaatcattgatcccacaaatttccgaaactaaggaatggaaaattggtgtaacatgtggtccacatggttccccagatctattcaaaccagagtcgattgaagaattttttagcgaaaagtggaaggttcattacaattctaataggttcggtgtccgtttaatcggtcctaagcctaaatgggcaagaagtagtggtggtgaaggtggtatgcatccttcaaacacacacgattatgtttactcattgggtgcgattaatttcaccggtgatgaaccggtaattattacttgcgatggtccttccttgggtggttttgtttgtcaagcagtcgttcctgaagcagaattgtggaaagtcggacaggtcaaacctggcgattccattcacttcgtaccattatcttacgagtcctccagattattgaaagagtctcaagacgttgcaattgaatcattggatggttccaaattaaaacgcttagactctgtatctatattgcctacatttgagaatcctattcttgtccaaatagaaaaaagaagcaatctttcaccaaaggttgtatacagacaagcaggtgatcgttatgttctagtggaatatggtgacaacgaaatgaactttaacattgcctacagaatagaatgtttgattgctcttgttaagaaaaacgaaactgttggtattgttgaaatgtcccaaggtgttagatcagtcttgatcgaatttgatggttataaagtaacccaaaaggagttattgaatatcttagtagcatacgagactgagattcaatttgataaaaattggaaaattacttccaatataatcagactgcctatggcgtttgaagattctaagactttggcctgtgttcaaagataccaagaaacaatccgttcatctgctccatggttaccaaacaacgttgacttcattgccaatgtcaacggtatttcaagaaaagaagtttatgatatgttatactcagcaagattcttagttttgggtttgggtgatgttttcttagggtcaccttgtgctgttccgttggatcctcgccacagattcttgggaagcaaatataatccaagtagaacatacactgaaagaggtgctgtcggtattggtggtatgtatatgtgcatatatgctgcaaacagtcctggtgggtaccaattggttggtagaacgattcctatctgggacaaactatgtttggccgcttcgtctgaagttccatggttgatgaacccatttgatcaaatcgaattctacccagtttctgaagaagatttggaaaaaatgactgaagattgcgataacggtgtatacaaggttaacatcgaaaagggcgtttttgatcatcaagaatatatggactgggtcaatgcgaataaagattctatcaagtcattccaagaaggccaacttggtgaaagagctgaagaatttgccaaattgattcaaaatgcaaactctgaattaaaagaagttagctctgagaaacctgatgaagaagaacagtaccctgaaggtgcagaaatagtatattcagagtattccgggcgtttctggaagtccatcgcatctgtcggagatgttatcgaggcaggccaaggtttacttattattgaagccatgaaggcagaaatgataatctctgctcccaaatcaggtagaatcctaaagatttgccacgggaatggtgatatggttgattcgggtgatgtagtggctgtcttagaagccattgcatag

SEQ ID NO: 3543 - DNA, 768 bp, Saccharomyces pastorianus
atgacagtcagttctgatactgccgcagcaatttcattgggttggtccgtccaagattggattgacttccacaagtcatcgagccctcaagcttcactaaggcttcttgaatccttactagattctcagaatgttgcgccaacagataatgcatggatatcgctggcctcacaagagaatttattgcaccaatttcagattctgaaaagtagaaataataaagaaaccctgcctctgtacggtgtgcccattgctgtcaaagacaacatcgacgccagaggcctgccaacgactgccgcctgtccgtcatttgcgtacgagccggtgaaagactccaaagtcgttgaattactgagaaacgcaggtgcgattatcctgggtaaaaccaatctagaccagtttgccacaggcttggtcggcacacggtctccctacgggaagaccccttgtgcctttagcaacgagcatgtgtctggcggttcctccgccggttctgcatcagtggtcgctagaggtatcgtgcccatcgcattgggaactgacacagctggttccggtagagtcccagccgcgttaaacaacttgatcggcctaaaacccacaaagggtgtcttttcctgccaaggtgtggttcctgcctgtaaatctttagactgtgtttccatttttgcgttgaaccttagtgacgctgagcgttgcttcgagatcatgtgtcaaccggacctgaaaacgatgaatattccagaccctacgtctccaatccgttaa

SEQ ID NO: 3544 - DNA, 159 bp, Saccharomyces pastorianus
atgatgagccaaagtaatgaagacgagtcgatacaagatgactcaaacatcttggatattgcacgtttcggtaacctaatggatccatataatggacttcttgaaaagatcaataacataaatgaaaaactctctaatgaattacaaccaactctataa

SEQ ID NO: 3545 - DNA, 687 bp, Saccharomyces pastorianus
atggatagagacactaaactagctttccggctgaggggtagtcattcgaggaagacagaagatatcgatgatgatgcaatcgtgttcagaacgctgaatgtgctatatcgggagaccgaatctcctgtccgatctcctgctcaccgcatgttgtcttcgccaagacttgcaaacccttttgaatttcccaccgatgctggtgatacaaaggcacaggaccgctctgaacatgaatatcaacctgcggaagatgaagactatcctatggctaaccctgaaagcgagcgcgctgataacgaaccgcagcaatatgtgagaaacgatgaagagcttaccactgagtataatttcgaagatattcccattagacagttatcgtcatctatcacttcagtgaccacaatcgatgttctatcatctttgtttattaatttattcgaaaatgatttgattccacaagctttgaaggatttcaataaaaatgatgatgaccaattcagaaagttattgtacaaattagatctgcggctctttcaaactatatcagatcaaatgactcgagacttgaaagatatactggacattaatgtatctaacaacgaactctgttaccaattgaagcaggtgcttactcgaagagaagacttaaaccagcagatcatatcggtgcgaaatgaaattcaataa

SEQ ID NO: 3546 - DNA, 201 bp, Saccharomyces pastorianus
atgaaaggtaaaaatttgattggtaaatatgacgttgaagacccgttcattgatgattcagaattattatgggaggaacaacgtgctgccacaaaagatgggttttttgtttattttggtccattaattgaaaagggacactatgcaagcttagaacgtgcaaacggtaccatgaaaagaggtggtgtcaagaacaaatag

SEQ ID NO: 3547 - DNA, 279 bp, Saccharomyces pastorianus
atgcaaccggatactagagttcaaatcttgaataacgataacaacattaagaaagaacctgaaactgacaacgaagactctttgagtaaaattttaaacagaaggacgaataagaaaataccaaatattgctgaagagttagccaagaacagaaaccacgccaaaggtgcctctccatcgcccatcctagtctcgacattttcttcttcagctccttcttcggggcccccttcctcgtctacaaactcggtagatataccaacagcaaaccgatttagc

SEQ ID NO: 3548 - DNA, 558 bp, Saccharomyces pastorianus
atgcgatatcgcttcttacaatatgtatccagagtttacgaggatttccaaaaggtgagagaaacgtatggtgacttatcagtactaccaaccaagaatttcttagccccatcagagccagatgaagaaattgaagtcaccattgaacaaggtaagactttgattatcaagttacaagctgttggtgacttaaacaaaaagactggtcaaagagaagtctattttgaattgaacggtgaattaagaaagatccgtgttgcggataagactcaaaacatacaatcagttgctaaaccaaaggccgatgtacatgatacccaccaaatcggcgcaccaatggcaggtgtcatcatagaggttaaggtacataaaggttccttagtgaagaaaggtgaatcagttgccgttctgagtgccatgaaaatggaaatggttgtctcttctccagcagatggtcaagttaaagatgtcttcattaaggacggtgaaagtgttgaagcatcagatttgattgttgttttagaggatgaaactctgcctccatctaaagaaaactaa

SEQ ID NO: 3549 - DNA, 2916 bp, Saccharomyces pastorianus
atgagcagcaagaaattggccggtttgagagacaatttcagtctactgggcgaaaagaacaagatcttggtcgctaacagaggtgagatccctatcagaattttcaggtccgcccatgagctgtccatgaggaccatcgccatatactcgcacgaagaccgtctctccacacataggctgaaggcggacgaggcatacgtcatcggcgaagagggccaatacactcccgtgggtgcgtacttggccatggacgagatcatcgcaatcgcaaagaagcacaaagttgactttatccacccaggttacgggttcttgtctgagaattccgagttcgctgacaaagtggtgaaggcaggcatcacttggatcgggcctcccgctgaagtcatcgaatctgtgggtgacaaggtttccgccagaaacctcgcagcaagggccaatgtccccaccgttcccggtaccccaggtcccatagagaccgtacaggaagcacaggacttcgtcgataaatatggctaccctgtcatcatcaaggccgcctttggcggtggtggtagaggtatgagagtggtaagaaaaggtgacgacgtgggtgatgcgttccagcgtgctacgtctgaggcccgcaccgcattcggtaatggtacctgtttcgtggagagattcttggacaagccaaaacatattgaagtccagttgctagccgataaccacggtaatgtggtccatcttttcgatagggactgttccgtgcagagaaggcatcagaaggtcgtcgaagtggccccagctaagaccctgccgctcgaagttcgtgacgctatcttgacagatgctgtcaagttggccagagtttgtggctacagaaacgcaggtaccgccgagttcttggtcgacaacgaaaacagacattatttcatcgaaatcaacccaagaatccaagtggaacatactatcaccgaagaaatcactggtatcgatattgtgtctgcgcaaatccagatcgctgccggtgcctctttgccccaattaggcctgttacaggacaaaatctctacccgtgggttctccattcaatgtcgtattaccacagaagacccatcgaagaatttccagccagatactggacgtttggaagtctaccggtctgccggtggtaatggtgtcagattggacggtggtaacgcctatgccggtgccactatctctcctcattacgactccatgttggtgaagtgttcatgttccggttccacttacgaaatcgttcgtaggaaaatgatccgtgccttgatcgaattcagaatcagaggtgtcaaaaccaacattcctttccttttgactcttttgacacatccagtcttcattgacggtagctactggacaacgttcatcgatgataccccacaactgttccaaatggtttcctcgcaaaacagagcgcaaaaactattgcattatttggcagatttggccgtcaatggtccttccatcaagggccaaattggtttgcctaagttgaaatcaaccccaagtgtccctcatttgcacgatgctgaaggtaacattatcaatgtcgttactacgtcgccaccatccggatggagacaagtgctactagaaaagggaccagctgagtttgctagacaagtgagacaattcagtggtactctattaatggatactacttggagagacgctcatcaatccctgttagccacaagagtcagaacccatgatctggccacaatcgctccaactaccgcccatgccctagcaggcgcctttgctttagaatgttggggtggtgccacttttgatgtcgctatgagattcttgcatgaagatccatgggaacgtttaagaaaattaagaaccttggtgcctaacattccattccaaatgttgttgcgtggtgccaatggtgtcgcctactcctccttaccagataatgccattgaccatttcgtcaagcaagctaaggataacggtgttgatatattcagagtctttgatgcgttgaatgacttggaccaattaaaagttggtgtagatgccgtcaaaaaggctggtggtgttgttgaagctactgtttgttactctggtgacatgcttcaaccaggtaagaaatacaacttggactactatttggaagttgttgataaaatcgttaagatgggtacccatatcttaggtattaaggatatggcaggtaccatgaagccatccgccgctagattgttaattggttctttgagaactagatatcctgatttaccaattcatgttcatagtcatgactctgctggtactgcagtagcatccatgtctgcatgtgctttatctggcgccgatgttgttgatgtagccattaactcgatgtctggtttgacttctcaagcatccattaacgctttactagcttccttagaaggtaacattgacacaggaattaacattgaacatgctcgtgaattagatgcctactgggcagaaatgagactgttatattcttgctttgaagctgacttgaagggtccagatccagaagtctaccagcatgaaattccaggtgggcagttgactaacttgctattccaagctcaacaattgggtcttggtgaacaatgggcagaaactaagagagcctacagagaagcgaactacttattgggtgatatcgttaaagtcactccaacttccaaggttgttggtgatttggcgcaatttatggtctcaaataaactaacttctgacgatatcagacgtttggctaattctttagatttccctgactctgtcatggatttctttgaaggtttgatcggtcaaccatacggtgggttcccagagccattaagatctgatgtgctgagaaacaagagaagaaagttggacatgccgtccgggtattag

SEQ ID NO: 3550 - DNA, 1605 bp, Saccharomyces pastorianus
atgagtggtgccaaaagaaagagatctgaggtcgctgaacaggtggcacaacgatggaagagtttcaggtatagtgcagatgctggaaaaaaaactacaaatggtaaggacgatgacgactgtgtcataatcgatgaatcagaagttatcgatttgactaagtcggaacaagaggcggaggaaaaggaaacggtggatgacacgacaaacaaggcaactttcaaactaatcaggtcagatttctatgaaggaaaggcttccatggttgaggccgacgatttgatcactttgaaagatatattctgtgacgcaagactcaaaaaaagcatactcttcagtttccaatatgagctcgattttctgctgagacaatttcaccgaaatattgagagtataaccattgtgggccaaagggggacgattgtacccgtcgaagcaagttctatggatgcagcgctgtcgctagcacttcgcaagatcaagctgatcgagatcactatgcccccgtatgcttctcaccacactaagctgattataaacttttacgataatggtgaatgcaagatatttttgccctcgaacaactttaccgccatggagaccaatctccctcagcaagtgtgttggtgcagtcccgttttacaaatagaagaagagcagtcgttagtaccgtttaaggccggcttgatagactacctccgctcatatcatgtgagggacatcgacgagctaattttgaaaagcgtggaatccgttaactttgcaccgttaagtgaattggagttcgtgtattccacgccgtccaaattccagccgtcaggattgactatgttctacaataaacttcaggagctttcagtcggtgcggagactagtgatgctatagagcattatttgtgccagacctcatccatagggacgtcgctttcaagagcgaaggacgaaaatttatggacacatttgatggtccctttgttcacgggcatcatacctgcgctagtagagggcaccaagaaagtgcacgtaccggcgacggaatccttattgaccgcctatgcgcagaggaagatcaagccgtatattgtctttcccactgaacaagagttcaccacgagtccattaaagcgggctagttccgggtggttccatttccagtatctgcaaaaaaagagctattatgacatgctacgaaaccgattccgagtcttctacaagcaagacccagcaatggttaccagagcacgtggtaccacgcccgcgcactccaaattctacatgcattccaccacgaagtcgaccgaaccctgcgatgcatcgcgagtgttccacgagctggactggtgcctctatacctccgcaaacctcagtcagactgcatggggcaccatctcgaggaaaccacgcaactatgaggcaggtgtgctttatcacagtagcaggttggcggatacccagaaggtcacgtgccgcagcttcgcacgtgagcgccgggcgaaaggagagggtatccaaagtcacgtggcagtaccttttacactacccgttgtaccgtacaacgctgccggcgacgaatgcttttgttttgcccgtcacgagaatgaatag

SEQ ID NO: 3551 - DNA, 285 bp, Saccharomyces pastorianus
atgactacaggtttaatacgatgtgggatctgcgagaaagagattgactacacatctgaaaaaaaagtcttaaaaccgttcgttgcactttgcgataatgaaaaatgcggatgtattagtcatttgaaatgcctgtatagatactttttagatgatgaacagttgataatgggaaaaagaaacttgatacctaaaggaggtaaatgccccaactgcgagaaactctggcaatggacgacattggtcaagtattctacaagaatgaaaatagcatacggaaagtag

SEQ ID NO: 3552 - DNA, 633 bp, Saccharomyces pastorianus
atgtcacagcaaacaacacagcatcagtttcctcagttttattgctgctatctgctacaatcgatcaacaaaagacagtcgttttatataggatcaactccaaacccaatacgacgtttaaggcagcataatgggaagctgacagttggtggggcatacagaactaaacgtgacggttcaagaccctgggaaatgataatgattgtacgaggcttcccaagtaaaatcgcagctttacaatttgaacatgcgtggcaacatggatatcaaacgcattatatagctgagaacgatcgaatagtaaagcataaagcaggtggacgaactctgcaccataaaattgcattgatgaagttactactacggcatgagttcttccaacggatgaacttgactgttgaaattttcaatttaaagagctggggaatttggaagcaagataaatttaaaattgaaaatggatcaattgaaataaatgttcagatatgtgagaatgctcttaatgaaccaaagggaaacaccatagacgatctcatggatcatagtgacgagaatctgaaactgatagagattgtttacaccaaggttcttgcaactgaaaagacgacatttgaatcttttgaggaaaaatga

SEQ ID NO: 3553 - DNA, 1710 bp, Saccharomyces pastorianus
atgtcgtctattgggtaccaccagtgcagatggaactacaacgatgaaacggatgttctcaccgtggatgctcagatggacgctaacgagattccgtacgatttcatttggctggacttggaatacacaaacgacaagaaatattttacatggaaacggaactctttccccaacccaaagagactgttatcgaaattgaacaagctgggaagaaacctagtcgtgttgatcgatcctcatttaaagaagggttacgagattagcgacagtgtaattaacgaaaacgtcgccgtcaaggatcataatggcaacgactacgtgggccattgctggccaggcaactccatctggatcgatactatgagtgagtacggtcagaaaatctggaaatccttttttgagaaatttatggacttaccagccgatttgacaaatttgttcatttggaatgatatgaacgagccttcgatattcgatggtccggaaaccactgcaccaaaggatttaattcacgacaatcataccgaggagagatctatccataacctgtacggtttatccgttcatgaagccacttatgatgcggtcaaatcaatctactcttcatccgataaacgtcccttccttttaacaagagcattttttgccggctctcaacgtacggcggctacatggactggtgataacgttgctacttgggactacctaaagatttccatacccatggttttatcgaacaacgtcgctgggatgccatttatcggagccgatattgctggctttgctgaagatccgacacctgaactaattgcccgttggtatcaagcaggtttgtggtacccattctttagagcccatgctcatatcgatactaagagaagagagccttacctgtttgatgaccctttgaaatctatcgttcgtgacaccattcagctgagatatttcttattgcccaccttatacactatgttttataaatcaagtaccactggatttcctataatgaatccaatgtttattgagcacccagaatttcccgagttatacgacatcgataaccaattttattggggtgactcaggtttgttgattaaacctgttacggatcctggtcaatcggaaattgaaatgatttttccacccggtgtcttttacgattttgaatcaatggcctctttcgtaaacactggagccgacccagcagtgaaaatcattcctacaccactagataagatcccatttttcattgaagggggacacatcattaccataaaagataagtatagaagatcctcaaagttgatgaaaaacgatccatatgtcctagttattgctccagatgtcaaaggtcatgctgtaggtgatttatatgttgatgatggagagacttttggctatcaaagaggtgaatacgcaaagactcggttcgttttagaagacggtcatatcctaaaaaacgttccaagtcatactccagataatctgatggacattcacaatgacgtgttgagaaatacaaatattgaaaagattatcgttgcgaagaacgaactacaacgtgatatagcattgaaggactccgtgacaatcaaacaaggtggtgaagaacgatcattccccactaaactatcacatgaagatgacaataagattatcatcatgaacccaatgctcgatataaccgaaaactgggaactaatcttttag

SEQ ID NO: 3554 - DNA, 885 bp, Saccharomyces pastorianus
atggtccttttgaaatggctggtatgccaactggtcctcttcgcgtcactgtcgcatgcgtttaccgactatcttttgaagaaatgtgcgcaatctgggttttgccatagaaacagggtctattctgacaacatcgccaagtcgcatcactgctactacaagctggacgcccaatctattgctcatgacccgcttcagaactccctttctgccaccataatcaaaaccataccaagactggacggcgctgacatagccgttgagctgcccttttcgctttcttttctacaagaccactccgtaagattcactatcgatgagaaggagaggaccgttgccagcgggggctctctactcgcctcccaacggtacaatgaaacctggatgtacgccttcgacgagaagttccacgacgaggcgaacaagaccaacttcccagagctacgctttgccaagcaagaacactccacagactcgctttggtcgagactgtcctcattcctcacccattcgaactctactacggacactatccatttgcaaaatggtaacatatcgctggaaatcctcaccgagcccttccagctgaaaatctactggcagaatagcttaagacttatagtaaatgagcggaactttctaaatatcgagcaccaaaggtctaaagaggaaaattttgctcacgtgctcccagaggaaaccactttcaacatgttcaaagacgatttcatgtactccaagcacgacactatgcctctggggcccgaatcggttgcgttggatttcaccttcttccaatccacaaaacttttcggtctaccggaacatccaacttccctacggcttgatggacacttcagcatgcggagccttaaaggctgttaa

SEQ ID NO: 3555 - DNA, 417 bp, Saccharomyces pastorianus
atgactatcctgcttttccccagtgctaaacacgacaacgctagtccaaacgcccaccctgaagacaagggccatcatcacaacaacaagaaggactgcgccatcgagcacttgaaggcgcgtctcaacgacgcctctgctgccgcctgcagctatctgcacgccttcgtcctcaaggcccaggacgtggccagagtgtgccttctagaactgcaaaacccggtcgtcctggtcaacctggtgctgcactcctccgtgctgtgctacctgtgtaacggctacgcaaaccataacgtgcggtttttgaagggcaagcccaactccaccgtcttgaccacaaccgccggcgccctggggctgttgaccctagacggcctgatctccaagaaatactattccagattcgacaagaagtaa

SEQ ID NO: 3556 - DNA, 972 bp, Saccharomyces pastorianus
atgtcagacacagagacgaaggagaaggatgcaaccaaccccgaggacgccgaggatgactatatagaggacgaagacgaggatttccagccggaaggcgagaagtccggggacggcagcgacgacgaagatgacgatgacgacgacaataacaataacaacagagaccgggacaacgcccgcggcaaagtcgactactcgcgcatagagagcgagagcggcgggctggtcaagacgagaagggcccgccaggaggaggaggagtatgcgaggacgcacaagtacgaggcgctggcggtcgagtcgatcccggccaaggtggacagcatctgggaggagctgcagcgggcaagccgcgaccgtctttccagcagggcgggcgaggtgggctcggtgctgggcagcgaggccacggcggcaacggcaacagcagcagcaacagcaacaacagtttcggcgcccagcacagagtcgcagtcgcagtggcaggaggacaagattctgatcgagcgaagctacaagtttgccggcgagacggtccacgaaaagaagtgggtggcccgcagcagcgcggagggccaggagcacctgaacagtctgaagttcaagcagacagcgccgacgcaggacaagagggccgtcctcagtgccagcgccagcgccaacgccagtggcgctggcgagagtcggctgcgcttgcggcgaccgctgaagcgcccgccgctgctggagcagatcatctcaggcgggctgcggcccaagctgacgacgctggagaagtcgcagctcgactgggccagctacgtcgaccgcgccgggctcaacgacgagctggtgctgcacaacaaggacgggttcctggcacggcaggagtttctgcagcgggtcggttccgcggaggacgagcggtaccgggaactgcgccgccagcagctggcgcagcagcaacagcaggaggacggtgggccctag

SEQ ID NO: 3557 - DNA, 297 bp, Saccharomyces pastorianus
atggacttttactctcatccagcattacaagctgcaacggcttccggtgcatttgatgaatttgctgctgaggctacatcttcacatatgccagttgacggtagaatggttttgtacctgaaaattgttaaacgttactctccatattgccgtgattctaggcaattagccagattgacgacgggtactgctgtcaaatattccgttttacaagaggttttgaaccaatttcaagccttagttgtcaatgatattcctattcctgaattacataatttgaaaccaacatgtgtttga

SEQ ID NO: 3558 - DNA, 150 bp, Saccharomyces pastorianus
atgggctccgttgacgatgcctccaattcagaaattttacagagatggatggatttgatccgtaaatcagatgaaattggccaaagattcatcgccaatgccgatggggctgctttaagagatgccactgttacatggactcaaaaatga

SEQ ID NO: 3559 - DNA, 615 bp, Saccharomyces pastorianus
atgatcaattactttcatccaaatttatccgttggcatgattagagcctctctatctgctagtgaaaatgacatggctttgaaattatttcaaaaattatgtcaagaatcaactgagatgaaatacggttatttgatagaaacccatctttcctttattggtgaatgtaaggatttgaacgtggctcaaacattttttgacaaagccctaaacgatgaaatgccatacaagatagacttacaagtctcttatgtgaagtcctttttaagaaacatctggagccaaactcgcgatttcaaccatatctatcaaatttggtacaaatcctctttgcattatggtagaaatgttaaccatggtatctcttcatctttgaatgatacattcttcgacatttttttcgagaattatgctgttgataagatgcaaggtttccaaactttacaaaatgttattcaaacctataacaacatcaagcatatagacgaaccattcttcaacatcatcttagccaaatgtactgtctggcatgatcgcagtattttagaatacatagataagagctacgaggcctatcacatcccaaagacaatcgttgcttatagaatttattga

SEQ ID NO: 3560 - DNA, 966 bp, Saccharomyces pastorianus
atgaagtttaacagcacaattgcaatggaacaccatgagcataattacgccattccatacactcctgctaacttcaatagtccagccgtgggcccataccataaccaggtaaaccaggccaaccaatttgtccctcattttggtggcaacatggggtctaacaataatcatcacttggctcacaataacaacaataacaacaatcatcacttggctcacaacaataataataacaacattcatcataacaatcgtaatcaccataacaataataacaataacaacaacaatcgtaatcatcaccaaaacaaccataatcataacaagtataacaattccaaccaaggaaattcgattagtccagattccccatggtttcacaaagtttgtgcttttgaggattgcgtatcacagacgctttacatgtcccaaactccaagacgtcagaacatgaaacatcattcagagcatccaaattccaatgctaatccgctattctgggattctataggaagggcaatggggctgtatcatgacttgctcactactccagaattgaactctgatcgtgtctccaaactggtacatttacttcacaacgggttgagagccaacagaaatcaattgacaagactgaataagaagcctgattacgattcgcaatcgtttcacaaagaaatgaccaactatctttgtaaatcgctcagagaaatctcagaagatgtccttaacggcaaggtagaattgaacgaatacggggccatgcatttgatcactgcgttcaaggaacttttgttgtttgaagaagctgtcgatatttggaaggccgcgattaatggccaaaatgcctacacgtctaacatttttttgaatcaagagtcgtcggtgttatactaccaatattatatgacaatggtgtttcttatccagaaattcaagccctttacgaaaaatcttcttccatga

SEQ ID NO: 3561 - DNA, 714 bp, Saccharomyces pastorianus
atgacagtaacggtaacggataaaaaggcatgctctacttcaattgatgtggagaagacacgtttaaccaccacctggagcccccaagatcaaatccccgagtttgtgagaaatgagctttccaaaccccacccaaactacatcctggcgtttttaaacgttgtgcaacaattaaaaatccaaaagaggaccggttttctcgactttggcatcgttgaatgcgagagtatctcggaccatatgtacagattaggcataatcactatgctcatcaaggacccgaaagtcaaccgtgacaaatgtgtccgaatcgcactagtacacgatattgccgaatccttagtaggcgatatcaccccagtcgaccccatcgggaaggaggaaaaacaccgtcgtgaatgggaaactataaaatatttatgcaatatcttaatcaagccatacaatgagatcgcggcaaaggaaataatggacgattggctgtcttatgaaaacgtcacttcattggaagctcgatacgtgaaagatattgacaaatatgaaatgctggtgcaatgttttgaatacgaaaggcaatacaaaggaaggaaaaatttcgatgatttctttagagctgtaaccagtgtcaagactgacgaggtgaaaagctggactgatgaccttgtcatacagcgccaagacttttttgctaagttgcctcaattgaacgaataa

SEQ ID NO: 3562 - DNA, 1098 bp, Saccharomyces pastorianus
atgttcttttacattccatttattttttacaagtatatggtcattaccacctctggcggtggtcaccgtgatatatcagtagtcgaagataatggtatggactctaatattttccctcatgataagttgtctgagtatttgagcgctatcttgtgtttggaaagcacagttttactgggtatcgcggatgatttattcgatttacgttggagacacaagtttttcctgcctgccatagcagctataccattacttatggtttattatgtggactttggcgttacacacgtgttagttccgggcttcatggaacattggttgaaaaagactagcgttgatttagggctatggtactatgcttatatggcctcaatggcgatattttgccccaactcaatcaacatcctggcgggtgttaatggtctagaagtcggccaatgcatagtgttggccatcttggcgttattgaacgatttgctgtatttttctatgggcccaccagccacaagggattctcatagattttctgctgttttgatcattccattcttgggcgtatctctagcgctgtggaaatggaaccgctggcctgctacagtgtttgttggagacacgtactgttacttcgctggtatggtgtttgcagttgttggcatactggggcatttctctaaaacaatgctcttgttattcattcctcagatcataaatttcatttattcctgtccacagttattcaagttggtgccctgtccaagacacagactacccaaattcaatgaaaaagatgggctgatgtacccatcaagagccaacttgaaggaagagccaccgaaagcttttttcaaaccgattttgaggctattatatcgttttaatttgattgacctagaatttgataacaacaatgaaataattagcacttctaatatgacgttaataaacctaacgctggtatggtttggccccatgagggaagataaattatgtaacaggatcttacaattgcaattctgcatgggtattctagcgctcataggaagacatgccataggcgctattatctttgggcacgataacctatggaccgtacgttaa

SEQ ID NO: 3563 - DNA, 180 bp, Saccharomyces pastorianus
atgttgcggcttctatcattggtactggtcacatgcttaatctatttttacaaaaaccagggtccttctgcgcttgtcgctgccatgggatttggtatagcagggtactttgctacagatatgctaattccacgtgtggggaaatcgttcattaaaatagtctgttcggtaaggatctga

SEQ ID NO: 3564 - DNA, 1833 bp, Saccharomyces pastorianus
atgattggaaaagagtcagatctccaaaacatacataataacagtttttctttagctttcaaaaaccatccaccaaacttgaaagaaggaagaattaaagtcggatcaagaatcgttttgtatctttctaagttgcgtatttgtgaggtaaagggtgaaagattacagcaagaaatgacagtagttcacgtgatcgatgttgaaagtggtaatttacaatcgctaaccaatgcaattgaacatttagggtaccaagtacaactggtaaaatcaccagaagatttcaatataaacgaaatatcgagattggtcttaccaggtgtcggaaattatggtcatttcgtagacaatttgtttagtcgaggatttgaaaagcccataaaggaatacatcgaatcggggaaaccaataatgggtatttgcgttggtttgcaagcgatgtttgccggttctgttgaaagtgctgggagtccaggcttaaattacattgatttcaaattatccaaattcgatgattcagaaaagcctgttccagaaataggttggaattcttgtatcccttccgaagacctgttctttgggctagacccatacaagagatattattttgttcattcatttgctgccattttaaatttggaaattgaaaaatcgctacaaagtgatggttggaaaatcgccaaggccaagtatggctcacaagagtttattgctgccatcaacaaaaaaaatatctttgctactcaatttcacccagaaaaatctggcaaagctggtttagatgttattgaaaacttcttgaagcaacaaaatcctaacattccaaactataccccagaggaaaaaaagctattaatgaatgactattcaaattatggtcttacacgtagaattattgcgtgtcttgatgtgcgtactaatgatcaaggtgatctcgtggttactaaaggcgatcaatatgacgtacgtgaaaaggacgttggtaaagatgtcagaaatcttggtaaacctgtacaattagcacagaagtactatcaacaaggtgcggatgaagtcacgttcttgaatattacttccttcagagactgccctctaaaggacactccaatgctagaagttctgaggcaagctgctaagacggtgtttgtgccgctgactgttggcggaggtattaaagacattgttgatgttgatggatctaggatccctgctttagaagtggcaagtctatacttcagatcaggtgctgataagatctcaatcggtacagatgcagtttacgctgctgaaaagtactacgaattgggaaacaaaggagacggaacatcaccaatagaaaccatctctaaagcatacggtgctcaggcagtcgttatttcggtggatcccaaaagagtatatgtaaattcaccaacggataccaaaaataaagtcttcaagaccagatacttggggcctgatggacaagattattgctggtaccaatgtacaattaaaggtgggagagaagcaagagaccttggtgtgtgggagttaacaagggcttgcgaagccctaggtgctggtgaggttttactgaactgtatagacaaggatggttctaattctggttatgatttggaattgatagaccacgtcaaagaagcagtcagaattccagtcatcgcttcaagtggtgctggtgttcctgcgcattttgaggaggcttttctgaagactggtgcagacgcttgtttaggtgcgggtatgttccatagaagtgaatacaccgttaatgacgtgaaggaatacttattagagcacggcttgaaggtcagaatggacaaagaatga

SEQ ID NO: 3565 - DNA, 531 bp, Saccharomyces pastorianus
atgctaacgcgttcatatttaattaccaaaaaaatgaatttctcgagaagagagatttcatataacacaccaagccaaaaaattaagatgaccaccaccagtgaccaaatattgaagatccaattacgctcagcatatgcaactgtgcccaccaagggctctgccactgctgcgggatacgatatctacgcatcccaggatatttccattcccgccatgggtcaaggcatggtccccactgatatatcatttaccgtaccaaccggtacctacggtaggattgcgccaagatcaggcctagcagtgaaaaacggtattcaaactggtgctggtgttgtcgacagagactacactggtgaagttaaggttattttattcaatcattcgcagaaggatttcgcgatcaagaaaggtgatcgtgttgcccaattgatcttggaaaagatcgtcgaaaacgcacagatcgttgtcgtggactctttggaagagagtgcgagaggtgctggtggctttggtagcaccggcaactag

SEQ ID NO: 3566 - DNA, 471 bp, Saccharomyces pastorianus
atgaaccatatattgacaaaaagatggtttgtattcgcagtcgtattcaataatatatcttggaataatgattgtaattggcccgtattattttactactacagaatgagcaatcaagcactttatgagaaactcgaacaaacaaggacgatactgtccgtgaagcttgcagaattgataaatatgactacaatagctgatagagatgacgatgacgatgactcgtttgcacaagagaactcggaactcgcgatagccactggcagtgtcatgatggtgaacaaccagaccatgcagctgatcaaaaacgttcaagatttgttgagcctgactagatcgataaaggaaaaatggttactgaaccaaatacctgtgatgggccattcggagaaggcacgtttcgatgagaaccagatagaacagctattggacaattgtataaaatcttttatagcggaagaaaccacataa

SEQ ID NO: 3567 - DNA, 159 bp, Saccharomyces pastorianus
atgggtgctgttttcagagctgataaacagctggttaaatttcaaacgaattattatcgagaggaacagaaaagaagagaaaagattttagacgaggctgccgacagaggtttgtttttggaagacgatagtttgagctcttctagatcaaccacatga

SEQ ID NO: 3568 - DNA, 2193 bp, Saccharomyces pastorianus
atgagaaaagcaaagttaaaaaagggccatgaaatgtacacgaaaattaatgctgaagcaatcttcaaggttaaaaaaaaaagcaagtatcaagtggggagtaagagtttctctttactcatgtcaattcaggatactgtcgccaagtatacggatgtcgtgcataatttatcaatcaattattcaaacaggttggttataaaatcagaaaaactggctcaggttatcgctaactcaaaatctcccatgcaatttgaccattcggctttcgacggtcaaacagtgatatataaatgcatcaaaaaggaactgtttctcagcctcaaaactttgttttccaaagttaccccaaaaactgatatacagctgttcctttacccatattacatataccaaagccatttccaagctttaggaggtcagatcaagagatattgtggtgtaaagaaatacgatgagttgaagtttgcagctattagtcatttagaaacaggggtggaaaacaattatttaacactattagcaatttgggtagtctctttggatgagtttattagaaaagaacaaagatacagtgatgacagaggatccgactttcaaatattttataaactgatggttgaatattcctcttggaaatgggcatcggatagtaaaagacagtatcagttcatgtctcagtttcaagctaaacccaaagaatgtttaaagaaattttacgagtgttatgatcttcaaaattccgtggaccccttggtagaattgattcagccttgggaaagggccgtatttgccgccaacattatagattcgtttactggagaggaaattagaatcagtggtgccgaattattttggacattcagaaatcttgtattttcttctatttcgtcttttgctcttagattaagtgaccttcaaagtatattcaatgcatttaaaccttacggaaaggcgacactagttcaagatttcgcgcacgtacggtctctgaaatggcgtaaggatgaaacgattgaaaggttggttcgtgctttgatttttaacgatatgtttccctacttcactctggagcaaaaagagaagtttgaaaatggaatccttttcttacgtttgttaaggaaaaactttcaggagagcattattggcattaaagattttcatgtccaagtgatgaaatacctaaactctcaactaaaaaataactataacttattgctgatgacttcgaacaatcaagatgctatcaaaaatctccatatggttcccgattttttggaaaacgataataaaatcaaagtgtctctttcttcttcagatggatatacgcatacggctgaaaacaaagaacccttggggcaacacaagttttatccaaagatttactcaattgaacaaaatcctatatttgacacatatgatacatatgagtctcataaaatatatgctatagtttcattattgcgatattatttacctgagagtagaaagtttttccagacttattatctaccaagccttttcaaaaggatcttgtactacaatacaaagttccctaacctgtatcttatgaagaattgcttagagcggtcaattatagaatctcttacgatgttggatccctctttggtccatacgataaataatttagttcaatccagtatagaatcacttcagaatgtaacactaacaacggacaacaaaacaccctcaagtgtcattcttttgccacaaaaagatttcaagtcgctttgtgaagtaaacaaaggtttcaatgagccattttggcctaatgattcatatgcgaatagctggcccgatttagcaaacaagcatatggagcgaggtcaaattttgcacgatacgtttgcattccatatttttgaaatcgagctaccaattatcgttgatggtacaaagaatactcacttaaagctcgtttctaacatgtgtaccgccagcatattattcctatacaatgaaacggattacctaccgtttgcaaccatccaagaaaaactaggtgttttaccatcaagcaaacggaatgagatattattaaacaatttgaataggttagtgaaactgaagctgcttttagtaacagaggacaaagaaggacaaaaggtgtacactttcaatttgaattatgaaaatactggtcaaaacacttcgagaataagacttatttaa

SEQ ID NO: 3569 - DNA, 1254 bp, Saccharomyces pastorianus
atggacacagcaatgaccattcaattacagaaatacacgatatggacggaaaacctggttctaaatacaggtgtaacaatatgccccttagactccatcaaatccatgaagtcccttgccggatccatttccaatgaacgtgatctttacagctttttgaacaagtataaccaaaccgggaagcattcacttctaatcaacaaaaaccttatccctgtatcatacaaaaagcatccatccatgaaccaaggccaaaaaaacaaaacccttccaaaatttgctgtagacccttcaagaaactctattccgaagaggatgatttccacccataatgagtctccatttctgagcggtaataacaacaacaatgccgctaccaacacaattcctaatgccaacacgccctcttttaatacaaacaaacaactaccacctactataacaccctcctctaccaacaccgcggcaggggccatgtcaccatcttcttctattgtaacaagcgatactacgtcatccatgacaaaaactttggatcctggtaacaggagccctcaagtcccagaagaactaatcaattctttggattctgatcgtcccatttcacatattcaaacgaataaccatatgccacccggtgtcctgaaaaatttcaaaacgttcggtgttccattagagtcattggtagagttcgaacaagatacggttcctgcgatagtgcgccagtgtatttacgtcatcgataaattcggtctcgatcaagaagggatctatagaaaatcagcgaacgtactggatgtcagtaagttaaaagaggagattgataaggatccttctaatgtttctataattttaccgtcaaagccacattctgactcagacatttatttggtggggtcactgttaaagacgtttttcgcatcactaccggataacgtattaccaaaggcgctagcttcagagattaaagtttgcttacaaattgaagatccaacaacaaggagaaatttcatgcatggtttaatatataatctacccgatgcacaatattggactttaagggctctcgtgtttcatttgaaaagagtgttagcacatgaacctgaaaacagaatgaatttgaaggctctctgtataatctggggtcctactattgccccagaaaacccggatgatattaatgacgtaaactttcaaatcatggcaatggaagtactgttagaggtttcagatcaagcttttgaacctgaatga

SEQ ID NO: 3570 - DNA, 324 bp, Saccharomyces pastorianus
atggaggaaactgcaaggagatcagtcgacacttccggaagtgcgaaagtttcgcaagacaatggtgctgttgattcggtgcgcctgttcgatacgccagaaatcaacaaggtcctaaattccgatgtggcaattaacgctttgttgagccgtttgaagcaatcgttgttgacctgcgaagagtttatgaagtacattagaaaaaagtacgtcttcgaagaagaacacgtccaggagctatccaaacaatacaagcatttcttcaacgttgatggctctacgaaatcgtccttaaaaaagatgatcgacggccgattgccagct

SEQ ID NO: 3571 - DNA, 1473 bp, Saccharomyces pastorianus
atgttgtctagagtctctatactggccagatctatggctaccgcccaacgtcgtgggctactaagcagtgccgctcaatcgctggtctccaagcctgtttccgatggagatccagagatgtttgacatcttgcaacaagaacttcacagacaaaaacactctattacgctgatcccatccgagaacttcacctcgaaggctgtcatggatctcttgggctctgagcttcaaaacaagtactccgaaggttatccaggcgaaagatactacggtggtaacgaaatcatcgacaagtccgagtccttgtgtcaagcaagagctctggaactgtacgggttagacccaacccaatggggggttaatgtccaaccattgagtggggcacctgccaatttgtacgtttactctgcgatcatgaacatcggtgaaaggctaatgggtttggatttgccagatggtggtcatttgtcacacgggtaccagttgaagtctggaacaccaatctctttcatctccaaatacttccaaagtatgccctaccatgttgaccacgctactgggttgatcgattacgacaacttgcaagtgttggccaaggcatttagaccaaaagtcattgttgccggtacttctgcatactcgagattgatagattacgccagatttaaggaaatctctcaagcatgcggtgcctatttgatgagtgatatggcgcacatctccggtcttgtggcagccaatgtcgttccatctccatttgaattttccgacattgtcaccacaaccactcacaaatctttgagaggcccaagaggtgctatgattttcttcagaaagggtattaagtctgtcaccaagaagggtaaagaaattccatacgagttggaaaagaaaatcaacttctccgtgttcccaggccaccaaggtggtcctcataaccacaccattggtgcgatggctgtggcattgaagcaggccatgtccccagaattcaagcaataccaacaaaagattgttgacaacagtaaatggtttgctcaagaactaaacaagatgggctacaaattggtttccggcggtaccgataaccacttgatcgttattgacctgtctagtactccagtcgatggtgcccgtgtggaaactattttgagtgctttgaacattgctgctaacaagaacaccatcccaggtgacaagagtgctcttttcccctcaggtctaagaatcggtactccagcaatgaccacaagaggatttggccgcgaagagttctctcaagtggccaagtacatcgattccgcggttaaactagctgaaaacctgaaggctttggaaccaacagcgaaactagatgcaagatcaagactcaatgagttcaagaagttgtgtaatgaatctaccgaagtggctgatttgtccaaggaaatttccaattgggcgggccagttccctgtccctggtgaagtttaa

SEQ ID NO: 3572 - DNA, 597 bp, Saccharomyces pastorianus
atggaagcaaccatcaaagtagtgttactgggggattcatcggtggggaagaccagcatagtaactaggcttaaatcaggtaagtttcctgaaaagcatgcggccaccataggtgcagcgttcgtcaccaagacgattgaagtttctactagcgacacatcaatggagaaacgtattcatatggaaatctgggacacggcaggtcaggaacgctataaatcactcgtaccgatgtattaccgggatgccaatattgccctgcatgtttttgaattaaacaatgcggccagtcttcagtgtgcactgacatggttccaagatttacaggaccgtgcgcaagaaacgcaggttattctggtgggcaataagcaagatttggtcagtgaagagcaatctagcaaagtggaaataccggtagagttgcaaggtgtaccgtatgtttccgtcagcgctaagaccggatacaattttgatgccttgaatgaaataataatcagtttggttcctggtgaccaattcaagacatcgaaggacaatgaacaaggaaataaagtagagttaaataataaaagcagccgtagtggttgcatatgttga

SEQ ID NO: 3573 - DNA, 189 bp, Saccharomyces pastorianus
atgttctccaacatattagccctggcaatctccagtagtttcgttttcttttcaagcaacgcctgcctctctcttcttttcagttccttcttggtaacaggcttctctttcccagcgacttcattgctattagcagctgcagcagacactttcgaatcgaatgtctcaaacggtattggtggtaactga

SEQ ID NO: 3574 - DNA, 162 bp, Saccharomyces pastorianus
atgtccactttattacgcagtttctgttccatcaatctttccgccatttcttcctcggtcaattcttcaggctcctcatcttccttgacttccttcttttccttagtctcttctttttcttgcaaagatagtttgctcataccaagaacctctccgtcttga

SEQ ID NO: 3575 - DNA, 417 bp, Saccharomyces pastorianus
atgttgcgcactgttagcagtatgacttaccaccgttcctatgctggagccatggcgttgttccgtggaaagacaccctgcatggcggttagaaacataactactgagagaatccccagtcctccaaagctaccacgagaagagcaggaggagtttgagaaactgcagaggatcgcctcctcacaggaggccatagaccagtacaacgaacaaatagccggcgatcacacgaaggaaagcttaaactcgccacttttgaccaagaatgacattgggtcattctcacctgagttttccaagaccatacctgagttcgaaggcgacgttaatcccaagaccggtgagattggagggcccaagcaggatcccttgaggcatggagactattcgtttaatggaagggtcactgatttctag

SEQ ID NO: 3576 - DNA, 1488 bp, Saccharomyces pastorianus
atgacagttgccaccaaagaacacagcaagatagaagcaatgagggataaggaaacaaactacatagaagagcttcttacgcaattaaagaacgagcttaataaagatgttctatctggggatattaacgcattattaaggaaatgttcattgaatttggtgactattgccacccttccagacatggatgtcaaaccacttctggcgacaatcaagcgcctgataacatcgaacgtctccgacgatgtactaaactacgactatctgttagatatactggacaaactagtgcccatgattgattttgatgaggtgttagaaatttatagtgccgaggatttaataaaggccttagaatcagagatagatctattaagtgtggcagcatgtaagattatcgagaattctcaaccaaagggtttatttgccactactaatattattgatatccttttggatattcttttcaatgggaaactgggaaatgataatcttactgggtccatcgaaaaagtttttgaaagattaagctcagacgaattaattagacgtcggttgtttgataacaatttaccgttcttaatagatgtgaagaacaagatggaaacagtctcttttgttagattgatcgattttttgactattgagttcccgttcatcaatggtcctgagtttaaagaagctgtattttgctttactaaagaagaagtcctgaaatctgtggaagacatttttgcatttatcgaactagtcaactattataccaagttgatgttagatataagaggacaggataaatattgggccttaaaacacgttgagcaaacattgccaatttttgctaaactttttgaagatacagaaaattatccagacgtcagagcattctctaagaaccgcttgttgcagttatttgcagagatttcccggattgacgaagatgagtttgctttcttcaagactatcgataaagactatctgaagattggatctgaaacgaaactgataaacgagtggttacaattgatcaatccgcagtatttgataaagaaccataaggatctggttgtaaaccgattccgtatcagcggttacagtatggaagtgctgagaaatctcgtaacagacaaagaatgttttgatttaataaaggacaaatttaactctgaaattattctaaaattgccatacttggaacaaatgcaattagtggaagcgttgacgagatttgcatatacttcgaagtttctaatcaatgaattacctaaagtaatgtctagtctaataggcgatgggagcgctaatactattgtagaccaggaaacgatacactatagaaattctgcattgataaatttattaaacatgggtgaaaatgatttgaatatatggtttacacctttaatggaagaatactccacggcgattaatggtaagaaatattccaaaggcggtgaaactaagattgcagatgattacatagcataa

SEQ ID NO: 3577 - DNA, 1923 bp, Saccharomyces pastorianus
atgagtgagattgaaggtaaagagaatgaattagaggtagggttgcctccagacattgtccaagctgctttaccatttttgactactgatgatattaagaacctgtcgcaaacgaacaaatactataacacgttgctagattttgaccactctaaaactttgtggcatgaattatttcacaaggcatttggtacactgagaacaaatgatgaacctttccaatgtcaaaattcagccgagttcaagacttgcacagaaagcattttaagggaagcataccccgatttgtcttggcaagatatttatcagttacgggcatacgatgccaagttttatagttggggttacttaaagcacggaaggttagggtttactggcagttcaaatagtgaattggcagctacatcattaaatggaccaagtccgagatttaaatatggtgttaatatccctacggaagttccgtggttcaacagtagaaccaggtccagaagtggcttttgttctccagaggattcgttaaatgcaatcaagaaagacggagatgaaattatagctcaagtctccagcggggggttttcttttcaaatactgactgaatctggaaatttatatagtactggatccactttctctgggggctgcaaaggaccgggccccactggttcacagcatgattacaatccctttagagaaatgattcacaatatggagaggtcctatcctcgaatcacaagtcgtagtagtgggggtactgtaaacaccacagggacatttcacggaagaagaatgagcaacagccatccatccactgtccatgaaccaggagaaagacactcaacttcagttcaaaccactactactgacaggggacaagcacaagtgcccagtccctctcccggaagaaactacggtggtgtgcccagaactaccatgcctgcgatagggcctcatgataatatttatagcgaaatagaaatgttagagcgaagcgctaccaaagcagttccgggaaataatcatattaggagagtttttgcaagaaactcctttccattgtacagtagtagcgatgataatttggaaacgtttaatgatattcaatatattgctgtaacttctggaagaagccattttttggcaatggacagagacaataacatctactcatgggactccccagaatctgaccaaggtgttaaaatcgagtttgcaaatatgcctagccggataacgaatccaattctgaaaattgcatgcggttggaatttcaattgttgctacatatataaggttgggctagttgcatggagcgaaagagaggctgttgaaaaaggtaagagcttttcttttgcaaaatatgaaattatcccaaataccagtgatattaatggcaattctagggtcattgattttgcatgtctacaagataattgcgttttctatatcaataacgatggcgataaattatggaagtatcaccatgggttgagccaagtggtagatctgaacattgttggtaggttatgtaagattaacgtctgttttgccgccttgatagtatttactgatacccattgttatactttgaagatttcaaatggagatgttgataaagaaagcttaacggaaatagacatagaggaaaaggttatatccgtggcaagtggtgactaccataccgtcgcgctaactgaatctggtcatttgtattcttggggtgtagaaagccaagattgtggatgtttagggctcggtccttctgaaagaatggttaacgaattacacattggcaattgggaagggcaaaggaatatcaaggtggtcaagcccaccaaaatagagttacctgaagaatatatttgtgtcagtgtaaccgccggtggctggcaaaccggagcattaattatcaaaaaaaattga

SEQ ID NO: 3578 - DNA, 1620 bp, Saccharomyces pastorianus
atgcatttctccttgaagcatttggcaatcgctgcgttttatgctactaatttaggctctgcctacgtcatccctcaattcttccaagaagctttcaaacaagaagacccaattgagtatcttcctgaacaaaaagaaacactcgacaatgacaattctgtcgttggcgccaccattcccaagccacatgttccttacttcatgaagcctcatgtggaaagtgaaaaactacaagataagatcaagctcgacgatttgaacgccactgcttgggacctctaccacatggccaaccattccacttcagagtacggacaccccacccgtgtaatcggttccaagggccataacaagaccatggagtacatcttgaacgcctttgatggtatgcaagattactatgatgtctctttacaaaaattcgacgccttatccggtaagatcatctcttacaacctttccgacgttgaaacaggccaaacttttgcaaacacaacagctttcgctttgtctccacctgtagacgggttcattggtaaattagtggaaattcctaatttggggtgcgacgaaaaggattacggttccgtggtcccaccaggcttgaacgaaaagcaaatcgccctcattgaaagaggtaaatgtccattcggtgacaagactaacttggccggtaagtacggcttctctgccgttgtcatttatgacaacgaacctaaatccaagggtggccttcacggcactttaggagaacctacaaaccataccgtggctactgttggtgtccctcacaaagtgggtaaggaattgattgctaatattgcgttaaacattgactactccttgtattttgccatggactcgtacgtggaatggatcaagacccaaaatatcatcgctgacaccaaacacggtgatccggataacatcgttgctcttggtgctcattctgattctgttgaagaaggcccaggcatcaacgatgatggttccggtacaatctcactactgaacgttgccaagcaattgacccattttaagatcaacaacaaggtccgtttcgcatggtgggccgctgaagaagaaggtctgctaggctccaacttttacgcttacaacttaaccaaagaggaaaactccaagatcagagtcttcatggactacgatatgatggcttctccaaactacgaatatgaaatctacgacgcaaacaacaaggagaaccccaaggggtccgaagagttgaagaacttgtacatagactactacaaggatcacgacttgaactacaccttggttccatttgacggcaggtccgactacgtcggctttatcaacaacggcatccctgcaggcggtattgccaccggcgctgaaaagaacaacgtcgacaacggtaaggttctggacagatgctaccatcaattatgtgacgacgtttccaacctatcttgggaagctttcgtcaccaacactaagttgatcgcccattccgtagccacctacgccgactctttcaaaggcttcccaaaaagagagatccacaagcatgaagaactgaccgcattgaatgctgaaaatccacaattcaagtacagagctgacttcttgattatttaa

SEQ ID NO: 3579 - DNA, 1881 bp, Saccharomyces pastorianus
atgccttctgccagatccataggcgatcaaccttccaccatttcccatcctactgttggacaacttcctcaattacccaagctaaacttacctaagtttcaaacgattcagtacgacccaccggaatccaagttaccatacccaacgtattggtcagataaaggagcagacacagatactttattgtatgaacaaataattcagcgtgacaaaattaacaagttctccttagtgagggaaactaacggttacgatccattcagtatttatggattcagtaataaagaatatataagcagactgtggcacacattaaaatattatcaggacttaaaaaacaccaggatgaaatctataactaacacctcacagaagatttcatcagcaagtatctgggggaatggttattcaggatacgggaacggaatcacaaatacaaccacaagagttatacctcaagttgaagttgataatagaaaacactaccttgaagataagttgagagtttataaacaggcaatgagtgaaacaacagaggaattggttccgataagattggaattcgaccaagatcgtgacaaattcttcctaagagatacattgctatggaacaaaaatgatgaacttatcaagattgaagaatttgtggatgacatgatgcgagattatcgatttgaagattcgaccagggagcaacacatagataccatatgtcagtccatacaagaacaaatccaagaatttcaaggaaatccatatttagaattgaatcaggatcgcttgggtggtgatgatttacgaattagaatcaagctggatattgtggtgggacaaaaccaacttatcgatcaatttgaatgggatatctctaatagtgataattgtcccgaagaatttgcagaatccatgtgccaagaactggaattgcccggtgagttcgttacatccattgcacactcgataagagaacaggttcacatgtaccacaaatcgctggcattgttaggctataactttgatggatcagtgatagaagacgatgacattagaagcaggatgctgcccacaattacgattgacgatgtttatagacctgcagcagaaagtaaagtcttcactccaaaccttcttcaaatttcagcagcggaactagaaagattggataaggataaggatagagatacaagaaggaaaagaagacaaggcagatctaatagacgtggtatgcttgcattgaccggtacatcgacaaacagtatgtccatgaacggtgctcataatggagcagcaacggggaacgcttcattgttaccatcaggggagattttgctgccggatatcgcagatattccgagaactttcagaacaccagtaccaagtactctaatgcccggcggtgttgacgtgggaccttcagtggaatcatacgaattgagaaccacgactacatataaggctaagccagatagacccaagccagtcccgcccccttgctacattattgaccacattccaggtcattcgctattactttctatcaaagtgcctaagaaagaggaagcccaagaagattttgcgacgatgattgaaccaaacaatagcaccaatccaatgcttccaaggcctggctccctgaagtccagattgaatagtaatattcgcgctggtgtaactattccgacaggtgcgaaccctattggaaatcacgctactacaagctccctcaatccgacactaccgcctgccattccaaccggagtagccggaaagacagttcctgtacctactccaccaacgctaccctcagtagctccccatggtagtgaccggatactttcaaacaataatggtgatattaataatgatgatgatgatacatga

SEQ ID NO: 3580 - DNA, 762 bp, Saccharomyces pastorianus
atgaataatcagccgcaaggtgggaacagcgtccccaatagtatcggcaatatattcagcaatattgggactccgtccttcaatatggcgcaaattccgcagcagctgtaccaaagtcttactccccagcaattgcagatgattcaacaacgacaccaacaattactaatgagccgcctacaacaacaacaacaacaacaacaacaacaacaacaacagccacaaagacagacttcaccaccgtcacaaacacagcaatcaccacctcctcccccttccgctcctctgcaacaatcacagtccatggctagtcaatctgcaacatctaccccgcctcctcctcctcctcctccagcgccaattaatttgcctccccagattgctcagctacccttggctacacagcaactagttttaaatagattgaggcaacaggccatcgcaaagaataatccgcaagtagtggatgctatcaccgtggcacaacaacaagttcaacgtcaaattgagcaacagagggaacagcagactgcccaaactcaactagaacagcaaaggcaacttttggttcagcagcaacagcagcagcaacttagaaaccaaatgcaacgacaacggcagcaacaatttaggcatcaagtccaaatacaacaacagcagcagcaacaacaacaacaacaacaacaacaacaacaacaacaacaacaacaacaacaacaacaacaacaacaacaacaacaacaacaacaacaacaacaataa

SEQ ID NO: 3581 - DNA, 1695 bp, Saccharomyces pastorianus
atggagtcatcttctatcaaacacatcacgttgaaaaagaaaagggactacacttatgatagcatagaagaaagtaggggagaaagtggaatccctaacagccatgtcggagataatgaagagattcaaaatgcggatgacggtgaagatataccactttcaagaattccaaacctatggataattgaggccacactttttgctaacgttttcctggcaggttttgatggcactgtcactgcatcgacgtatcaaaccatcggtaatgagttcaatcaaatgagcatttcaagttggattactaccgcgtacttgattacttcaacttcttttcagcctctctatggatctttttccgatgcactaggtcgaagaaactgtcttttctttgccaatgcatccttcacaattggatgtctagcttgcagtttttctacaaacatctacatgcttagtttcatgagagctttagcgggtataggtggcggcggtttaattacactctctactattgtaaattcagacgtcattccaagttcaaagagaggaatttttcaagcatttcagaatttgcttttaggatttggcgctatatgtggggcctctttcggtggcaccattacttcgactattggttggaggtggtgttttctcatccaggtaccaatatctatgataagttcattactaatgaactactatgtgtctaaccaaaaggaatatgacgatcaaaaaataaatatctttctaagttcaaaaaaaatcttcaaagacatagatatcacggggtcaattcttattatagctggtctcacactgcagcttctctacctgagcttgggtgctagcttttcctggactagcccacctgtattaatggtactgattgctagtatagtaattattgttttgtttatattgaatgagaggaaaacaactgctagagccattatacccatggagttggttaactcctctttcagtttcgtagtactttcgatcagtatacttgttggttttgccagctatgcatatctcttcaccctaccattgttctttcaaattgtgcttggagattccaccgcaaaagctggattgcgtcttacaatcccgtcattgtttaccccaatcggtagccttataactggtatatccatgagcaagtataactgcctacaatcactactctacatcggtatatctctaatgtttttgggtaacttccttttcctgtttattgaaaaaacatcacctaactggttgattggtctttttttgattcctgcgaacctgggacagggaatcacctttcctacaacactgtttacttttatatttgccttttctaaacgtgaccaagctactgcgacatcgaccttgtatctattccgaagcattggatctgtttggggtgttgcaatttcggctggtgttattcaactatattttgcgagatatctacgcttgaatttgaaagatttattagatgaaaacactatagataagataatcgtcaggatcaactccaattcatcatatattggatctctacatggtgaagtgaagaacacagtaataaagagttttgacgcagcaactaaaaaggcccacttaatgtctacattgctgtcactattggcattgatattttgcgtgatcaaagataacctgaaaaaacctaattcaagaaaatag

SEQ ID NO: 3582 - DNA, 1557 bp, Saccharomyces pastorianus
atgagaaatgctgtcgttatagttgtttttactacgatatcatggagtatcacaaggcataaatcgtcagaagagcgtcccataagtattttgggcacagtcccttctggtttgaatgaagtaggtgtcatgaagatacccgaaggcttgctatcaaacatgagttcagaattgcccgcttcaattataattctagttttagaacatattgctatttcaaaatcctttggcagaattaatgattacaaagtggtccctgaccaagaacttatcgcaattggtgtgacaaacttagtaggaacattttttcactcatatccagcaacaggttcattttctagatcagctttgaaagctaagtgtaacgttcgtactccattttcaggtttattcactggtggttgtgttttactagcactttatgctttaactgatgcattcttttttattcccaaggcaacattatcagcggtaatcatacatgctgtttccgatctattgacctcttatgaaaccacttggactttttggaagactaacccattagattgtgtctcattcattattaccgtttttatcacgatattctcgtccattgaaaatggtatatattttgcaatgtgttggtcatgcgcaatattgttattgaaacaagcattccctgccggaaaattccttgggcgtgtcgaagtcgctgaggtattaaatccaacactgcaaaataacgttagtactgtagtatcactcaatgaatctaataagcaagtaaaaactactgttgatgttttgccaactttagaatataaattcagtacaaagtgggttccgtttgatcatgaatactcgcgagagttgaatcgctgtgccaaaatttgtccgccaccgccaggtgtcatagtataccgattaagtgacagttttacttatgtgaactgttcaagacactacgacattatatttgatcatattaaggaggaaacaagacgaggacagttgataaatttaagaaaaaaatccgaccgaccatggaacgatcctggcgagtggaaaatgccaccttcattgagtaccctatttaaattcaaacgaaattcggtgacggataatgaggatccaccggtatcgaatggaggcattaacgggggatcgcatgagaagccgttactgaaagtaatatgcctagatttttctcaagttgcccaagtagactctacggctattcaaagtcttgtcgatttaagaaaagctgtgaataagtatgcagacagacaggtcgagtttcattttgctggaattatatcaccatggattaaaagaagtttatcaagtgtaagctttggaactacgaacgaagaatttagtgacgaatccataattgctggtcattctagttttcacgtcacaagattttcaagtgatgatgatgcagattatactgatgaagatagccatataagtgcaccatatagtaattatggaaccctgtgtgctgcaactggtacaaacttaccttttttccacattgacattcctgatttttctaaatgggatgtttaa

SEQ ID NO: 3583 - DNA, 888 bp, Saccharomyces pastorianus
atgcttggaaataatatttcacatatgagctcaactgaggtttttgacaaccaggaagacctcgatatcgaagtatttgaatcaaaatacagctcttacaggcaatctgagacaacagcaaacagaatcgattttcaaaatgaggaaagttggaaggtcaatagtaagaggaagtttgagcaaacgaaaaatgagtcctcggacgttttgtatgattctattccaagatatgaagagagcacagttactcttaaagaatactatggccactccataaagaaggggttaactgcgaagtcggcaggaaactatatttcctccctttttcccattgtgaaatggcttcctcattataaccttacgtggtgttatgcggatttagtcgcaggagtcacagtcggatgtgtgcttgtccctcaatccatgtcttatgcacaaatcgcaagtttatcacctgaatacggtttatattcctcttttgtaggtgcctttatctactctttatttgccacatcgaaagatgtttgtattggtccagtcgctgttatgtcattgcaaactgctaaagtcattgctgaagttttgaaaaaatacccgcaagatcaaacagaagttacgggtcctattattgccactgccctctgtttgctgtgtggacttgttactactggcctaggtgtactgcgcttaggatttttggtggagctgatttctcttaatgctgttgctggttttatgacaggttctgcatttagtatcatttggggtcaagttcctgctcttatgggctacaacaaattagtgaataccagagaagcaacatacaaggttgttattaattctttgaaacatctaccagatacaaagttggatgctgttttggtttga

SEQ ID NO: 3584 - DNA, 342 bp, Saccharomyces pastorianus
atgggcaagagcagcatgagaaagacgagccagggcaagaacggtggtgttggcaagaagcagcaaaaaaagaggccaatcagcactgctgagaggaaaagaaccaagttacaagtggagaggttaaacaaaagcagtgaaacaatgataccgacactgctaaatgaggcaagcaaacaagacctggacaacaagaagatcaggtccactctggaagccgagggactggtcaaggaccagatgagggactccaaagtacgagaacagattgagacagaaaagtcaaagactaacgacaacatgctgaagcagattaaaatgatatccgggttttccttatag

SEQ ID NO: 3585 - DNA, 1536 bp, Saccharomyces pastorianus
atgtcctcatgcgttcgccacttcctctctgccccacaagaggccggggcgcctggagactccgccgtggtcaagctgtccaccgactccttcaatgagtacatccagtcgcacgacctcgtgctcgcagagttctttgccccatggtgtggccactgtaagaacatggccccagagtacgtccaagccgccgaggcgctggtcgggaaaaatatcaccttggcgcagatcgactgtaccgagaaccaggacctgtgcatggaacacgacatcccgggcttccccagcatgaagatcttcaagaacaacgacgttaactcgtccgttgactacgagggccctagaaccgcccaggccatcgtccagttcatgctcaagcagagccagccggccgtcaccgtcgtggtcgacctgcccgcattcctcgccaacgagactttcctcgccccaatcatcgtccagtccggtaagatcgacgccgacttcaacgccaccttctacaccatcgccaacaagcacttcaacgactacaactttgtctccaccgaaggcgccaaagatgacgctttcaagctcgccatctacttgccctccgccttggaagaacccgtggtgtacagcggcaagcaagccgacattgccgacgccgaagtcttcgaaaaatggttgcaagtggaagcgttgccctactttggtgagatcgacggctccgtgttcagccagtacgttgaaagcggcttgcccctagcttacttgttttacaacgacgccgaagaactcgaacagtacactcccgttttcaccgagcttgccaagaaaaacagaggccttttgaactttgtcagcatcgacgccaagaagttcggcagacacgccggtaacttgaacatgaaggaacaattccctctgttcgctatccacgacatggcccaggacttcaagtacggtttgcctcaactctccgaagaggcattcgacgaactaaccgacaagatcgaactggaaaccaaatccatcgaggccttggtcaagaacttcttgaacggtgacgccactcccatcgtcaagtcccaagatgtcttcgaaacccaggaatcctccgtcttccaattggtcggcaagaaccacgacgaaatcgtcaacgacccaaagaaggacgtccttgtcatgtactacgccccatggtgcggtcactgtaagagattggccccaacctatttagaattggccgacacctacgccaacgccacctccgatgtcttgatcgctaagatcgaccacaccgaaaacgacgtcgccggcgtcaccatcgaaggttacccaaccatcgtcttgtacccagcgggcaagaagtccgaatccgtcctctaccagggcgcaagaactttggactccttgttcgacttcatcaaggaaaacggtcattccgaaatcgacggtcaggccttgtacgaagaagcccaagaaaaggccgccgccgatgaattggccgacgaattggccgacgaagaagaagccatccatgacgaattgtaa

SEQ ID NO: 3586 - DNA, 1317 bp, Saccharomyces pastorianus
atgtctgctgaaaccgccgctgccaatactgttaccgctccagtcccagaagtacaagaacaggagagtgccaagagcaaacaagtcaacttgacaccggcacctttgcccacttcctccccatggaagctttccccagccgatgtccctgtttcctcgatttccatagaagacttggatgcgacaagaaagaagaagaacaggacacctactccaaagtcatctactgccaccaagtgggttccaatcaaggcctccattactgtttctggtactaagagatccggttctaagaacggtggtaataacggcagcaacaacaacaaaagcaaaaacaataagaatgcatcatcgtcgacatcgtcgagcaccgccaacaggaaaaagaagcatcaccaacacaatgttaagaagcaacaacagcaacaggtgaaaaatgatggctccgaacccgccactgaagaagagtcaaaggacactgcccctcaagaaaatgaccaatctacacaacagcaacagccacctcaccaccgtagtcaccaccatagccatcaccacaatagcaacgggcctcaaagaagaaagtttcataacagtagtaacaccagtatgcctcagaaccaagggttccctccacagttcaagccttaccaaggccacaacccccgccctaccaacaacaaccgtttaaagtaccacaaccacttccatcacaaccaacaccactctcaacaacctatggtgaaattacaacaacagttttatccagtccaaccggttctaatggccatcaacaacattgctagacaaatcgaatactacttcagtgaagaaaacttgaccgtcgataattatttaagatctaagctatcaaaggatgggtttgctccgttgtctttgatctctaaattttatagagttgtcaatatgtccttcggcggtgacgctaacttggtcttagctgcattgagagaaatcgtcgctaacgaatctgcaaccgtcaatgttgccgaaggttctttggtcaccaaggaaactgacactgtcgctgaaactgaggaagtggaagaaccatctcctttagacaaatatttcgttcgctccaagaattggtcaaactggttgccagaaactgttgaaactgaagtcaacattgaaaaagagttagtcggcgacgctttagacgagttcatgatatctttgccaactgcccctcaacaagaagaggaaccaatcactgaatccgttcctcaagaacaagaaaccaacgaggaaccggtcccagctgccgccagtgaacctgaatcctctttatag

SEQ ID NO: 3587 - DNA, 1686 bp, Saccharomyces pastorianus
atggtgagtgatagttgtaataacagcggtgacagtggcgcccattacgaaaggcggaatggcagtggtgcaggtcaccgtaaccgtcccagaagcggtcataacggtgctttagtaacgagactgggtagtgggacgctgcccgtcagggggctgataaatgacaagacgggaaccagcaaggtcaaaggctgcgtggaagcgtttatgggcgccagggcccaattgaacacaccttgggaccgtgccgggtgcaactggctagacggagtggcttactatgcccaattgaggaaaactgcgttctcgaaggagctggatctgctcagggcgcctatgattgatgcgtacttggcggatatgaggcaaaagttcgacgcttcatataaacagtccagggcggccctggaggccaaagtagcacagctggaaagggactggtatgcagtgcacggtgatgtgcatgcgaaactggaaacgctattggaagaccgtcgggtcttgaaacggataagcgacacgattgcgcccaccaggaagaagaagtcgctgcggctgcccgcactgactaaagaggatcgtgccatcagtacctgtccacagaccaagggcatgaaggacacgatctggttcgaagcgatccagaagaaaatgctggcaatggacggtacaatcaagcttctggagacggaacaaaaaatgctggcggacgagaggagctgcgtcaggaagaatttttggcccgcggtggaagcgtaccctggttcaaatgagtttgcgtatttggaaaaatgcatcagactgatggcctcccagaaggttgtatgcttttgcctggacatcgaggccttcgaggccaaccagcgggtggtcactgaaatcgggatttccatttacgaccccagagagaacatggtgccgtcaatggtgccgatcacgaagaactaccatttgatcattgaggagtcgctagaactgagaaaccaaaaatgggtatgcgattacaaagattgctatctgctgggcgaaagctacgtcctgaagctgaaggagtgtgtccagttcatccagtcgttaatcaactactacctggtcccggtgaccgatgaggacaaaacgtggtcgagggcctttgtcgggcaccacgtgagcggcgatctcaagtggctggagaccattggtgtcaagtttcctgggagagggtacgaaggtcgactagaccacacgctatttctggccgaccaccccggcgacatggacgtgttcgtcttggacactgagcagttctacaggaagtcgtacggcgaaaaggggagcagtctgggaaagatcctgcggttgttcgagataccgcatgcgttcctgcacaatgccggcaacgatgcgtactacaccctgtatttgttcatgaagttctgcgatatcaacttcaggagaatcagcgggatggacgatgttctcaaggtgatggcccaggtcaaagtctggggcgaaagagacctgcgggagcccaaagttgtgcccatgtcttatgccatctccatcgatgaggcatccaagaactgggggcaccgcaagggtgttaagaacagcaggaaagacagagtctgccagacggaatttggcgggttgacctacttcgggacaggcaaagatgctttttcaagcacgttgtcgacattctaa

SEQ ID NO: 3588 - DNA, 345 bp, Saccharomyces pastorianus
atggctagaataatggtatcccaagaaactatcgatcacgtcaaggaacttattgccgagaaggaaattttcgttgcgtccaagacgtactgtccatactgccacgcagcgttaaacactctgttccagaaattgaacgtgccaaagtccaaagtcctggtcctgcagctgaacgagatgaaggacggcgtggatatccaggcagccttgtaccagctcaacggccaaagaaccgtgccaaacatctacatcaacggtaagcatattggggggaacgacgacttgcaagagttgcgtgaaaccggcgaattggaagaactcttggaacctatcctggcaaactaa

SEQ ID NO: 3589 - DNA, 555 bp, Saccharomyces pastorianus
atgtcgccgatagtagttgaaataagggagaggaagaatattaaagaaatgaacaagttgatcaggtttcacgcccccatactacgcaggactttcccagacagaagaagcattgcactagcacgatattggcatactagcaagaaaatgagtagcgaatcgagcgacatgaaatggaatgatgggctgacacccttacagctgatggtgctcaaggacaaggccaccgaaagacccaacacgggtgcgtacctgcacaccaaggacactggggtctaccactgtgccaactgcgacacgccgctatactcgagtaacgccaagttcgacgctcgttgtggttggccagctttctatgaagaggtctcccctggggccatcacgtaccaccgtgacgagtccctgatgcctgcaagggtggagatatgctgtgggaagtgcggtggacacctggggcacgtatttgagggtgaagggtggaagcaactgttgaacttgcccaaggattccagacactgtgtcaacagtgcttctctaaacttcaaaaaggaataa

SEQ ID NO: 3590 - DNA, 1521 bp, Saccharomyces pastorianus
atgatggacacgacaacaactgtgatgactacagtgttcaaaagatctagttcagtcgtgaactctatatcttcacacatttcctcttccacgagcgcagcaacaccaacgacaacaacgacagcgacatctctgtattctgcaccgtctaatcttttattctctaatgttgcggctcagccgaaatcgtcctccgcaagtacgattgggctctcgatcgggctacccattggcatattctgttttggattgcttgtgcttttgtgttatttttacgccaggagaaattccatgtctatctcaaacacaccgatgtcagccacgatcccaagcgaaggaggaggtccccatcggcacagtaactggttctcacggatgtttaggcagcctggcaccgagcacaagaatttttattctggcgctaaccgtgatctcgagaaatacaacgatacccaatggatagctggggacaatatgtcctctaagatccagtacaaaatatctaggcctataataccgcaacatatactgacacccaagaaaacagtcaagaaactgtactcgtggtctgacaagaacgtgtcgttggaccccaatgccaatgatggcgaagaggagaaatttgtggacacctttctatacactaaaccaccgaatattttccatattgaatccaagatgccctcgtttagtgatttaccttcccagaaaacagtttcttcaaacaggaaaccccctttgaaaacggccgacaagtggaactatgaatccccattatccagatggtttttgaggggctccacgtatttcaaggactacgccttatcaaagacgtctctaaagacgccagctgtggctccacaactgaaacaaatgaagatactttccagaataagcaaggggtatttaaacgaatcagatctcttgcaggatgagcgatcgcccatcctggagtatcataatactgccttacatccaacctgcagtctaaatgacgtgggtaataccacaccggattcgcaaggcacatcttatcgcatcagcaacatcgatctaatcacagcaaagtctaattcggtgatatacgggaccattggccaacaaacgttggaggtcaacgaccgtatcaatggcaatactagcattgataaacacgagatggtgatacccacaatttcaaaaccacacaagaaaagaaaaaagagaaggcaaagtaagatgtacctgtcacgctccaaaccgttaccgctaactccgaccaccaaatccaacgaggatcccagtatccaactggggagaacctacacagttattcaagattatgaacctagactgacagacgagataagtatctcgctgggcgaaaaagtcaaaattctagccacccatactgatggatggtgtctcgtggagaagtgcactccacgtaatggtcgtgtccacgtcagtattgacgataaaagatacctgaatgaagatagaggtattgtgcctggtgattgtctccaagaatacgattaa

SEQ ID NO: 3591 - DNA, 1902 bp, Saccharomyces pastorianus
atgtcctcgtcgacgtcgccatacgaactgaaggacttgaaaaatagctcgactgaagtacatgccacggagcaagagaacgaaatcgagtatttcgaatccgggtctaatgaccgtccctcgcagcagtcacacttggactacgagcaacacaacacctctgccgtgcgtcggttcctcgactccttcaagagggccgacagggatgaagagcaggaggtagaagctacacagatgaacgatctcacgtcggccatttcgccctcgtctagacaacctcacgagctggagaaggatgagaccactgacaagatagcacctcacacgggccacaaatccgactcgttgaagaagactattcagcccagacacgtgcttatgattgctctgggtaccgggatcggtaccgggctgctggtgggtaacggtacagcgctggtgcatgcgggccccgctgggctgctcatcggttacgccatcatgggttctattctgtactgcatcatccaggcgtgtggtgagatggccctcgtttacagcaacctgactggtgggtacaatgcataccccagtttcctggtggacgacgggttcgggttcgccgttgcgtgggtttactgtctacaatggttatgtgtgtgtccgctggagctggtcacggcgtccatgaccatcaagtactggacgacgtccgtgaacccggacgtcttcgtcatcatcttctatgtcctggtcatcactattaacattttcggcgctcgtggttacgcagaggccgaattcttcttcaactgctgtaaaatcctcatgatgaccgggttcttcattctcgggatcatcatcgatgtcggtggagccggaaacgacggtttcattggtggcaagaactggcacgaaccgggtgcgttcaacggtgtacactccattgacagattcaaaggtgtcgtcgccactctggtcaccgctgcctttgcctttggtggttccgaattcatcgccatcaccactgccgaacagtccaacccaagaaaggccattccaagtgccgccaagcaaatgatctacagaatcctgttcctgttcctggccaccatcatcattgtgggtttcctggtgccatacaactccgaccaactattgggttccggcagtggtggtaccaaggcttccccatacgttattgccatcgcatcccacggtgttcgtgtggccccacatttcgtcaacgccgttatcctactatcggtcctatccatggctaactcctctttctactccagtgctcgtttgttcctaactttgtccgagcaaggttacgcccccaaggtcttttcctacattgacagagccggtagacctttgattgctatgtgtgtctccgcattgtttgccgtgattgccttctgtgcagcatcccccaaggaagaacaggtgttcacttggttgttagccatttccggtctatcccaacttttcacatggactgccatttgtctatctcacgtcagattcagaagggccatgaaagttcaaggcagatccttgggtgaattgggtttcaaatctcaaactggtgtttggggctccatttacgcttgtgtcatgatgatcttgattcttattggccaattctgggtcgccatcgcccctatcggcgaaggtaagctggatgctcaagcctttttcgagaactacctggccatgccgatcctgattgcactatacgtaggttacaaatgctggaacaaggattggaaactgttcatcagagccgacaagatcgatttgaactctcacagacaagtcttcgacgaagaattaatcaaacaagaagatgacgaatatagagaacgtttgagaacaggccctgcctggaaaagggtcctggccttctggtgttaa

SEQ ID NO: 3592 - DNA, 3102 bp, Saccharomyces pastorianus
atggctatggcgaaaccctcgaacagtataggaccctggaggcttggtgaaacgctgggattcggcagcactggcagggtccacctggcgcagcacgagcgcacgggccacaagaccgccgtcaaagtgatttcgaagaccatcttcaacaccggagacgatggcgccggtccttttgcgttgccttgcaacattgagcgcgaaatcgtcgtcatgaagctgttgagccacccaaacgtcctgagcctttacgacgtctgggaaaccaacaacaatctataccttatcctggagtacgcggagaaaggcgagctgttcaacttgatggtggaccgcggacccttgcccgaaagagaggccgtcaagtgcttcagacagattgtcatagcgatctcgtactgccatgcgctgggcatagtacaccgcgatctgaagccggaaaaccttctgctcgacagtgactacaacatcaaaatcgctgattttggcatggccgctctgcagaccgacgcagccctgctagagacctcctgcggctcccctcactacgctgcccccgagatcgtatcgggtctgccgtacagggggtttgctagcgacgtttggtcttgcggtgtgattctttttgccctgttgacgggcagattgccctttgacgaagacaatggcaacgtgagagatctgctgttgaaagttcagagaggccagttcgaaatgcccgatgacactgaaatttccaaggacgcacagaacctgatcggcaaaatccttgtcgtagaccccacacaacgaatgaaaacaagagacatcctaacacatccgctgctgaaaaaacatcaaaccatcaaggactcgcaaagtatcagaaacctgccccgcgagaacacgtacttgtacccgctagcagacgtaaacaaccataccaatgccaccatcgatgactcgatcttgcagaacttggtggtgctatggcacggtacgcctgcagacgaaatcgtagccaatttgaaagccaacggaaccaacacagagaaaaccctatatgcgctgttgtaccgtttcaaacaggaagcaaataaaagaagtcgccacaagatcaaaaaaactaaaaataaaactagaaacgcattgctatcaacatcatcaccatcatcacacaaccggctttccgaatccacgccccgcagacgtacggctaaaaggcgttccgtaaacttttcatccagcaagaagaggtcctctttcatactcgcctccaattccaacaatggttctccaataccttcaagaagcagcaaaagaactccgtttctcaacacggcgtctgggaacgttccgccaatgccagtgaaactcttgaattcctacaagcgaaattccaaacgatcaagcaaaagactgtcctacatgcccaatgtgaaaagaggttcactgacgtcgaactcgctatcaaaatataccggcctgatagacgaagatgattgggagtacatcgaaaaggacacgaaacgaacaagctcggatttcgctacgctgatagacgaaatatttgaacctgagaaattcgaactggcaagaaaggaaaaagccgaattccaaaggaaagtacaagaagccaagagacacaaactatacattgctaagaccgaccaagaaaacggggttgtaactggagaatttgatggaatgggagtgttgaagaaaatcaataataaagtctcatcacccttgatgaactatgagtattcacaacaggaactgttgcaagacataaacaccttactcaccaaccgttgtcaactctccgcatacaccagacccatttcaaaactggatcccggtttgatgcccgtacctgaaacaatgccctacgatataaaggaaaaaacagacctgttattggacacagaaatgaagatattagaaacaatacgcaaatccaaaattctaggcccgtcatcaaacctcagaaaagaggtaccgcaagacagagataggctgccacctgtagaagaatcacccatcgtttcaacaacgcccttgatgtataacaacgatccaaaagaagtctgcaagatatccgatattcaagtcccacatttcacgagaaaatcaaaattttttaccaacacaaataacaggcggtctgtgttatctttgtattcttcgagacattcattcaagggcttgagccagcttctggatagcgaagatcccagtacaaacccgtattcacacaatagtggaccagtgggtgaagaaattgatttaaccgaagatattgccaacatgaagaacatcgacaataatattaataataaaaataacaataatagattatacgacgtttcagaaagcgccattttactaccaggaaataatgataataataacgatgatgacgatgttgttgctgatgatgatgataattatgattatgacaatgacaatgacaatgactcacaatcaattcaatcctcaatgtcgaataacacagaacctactacatttgtgaaacttccatccttaaactctttccagaggaaaaacgccagtggattgggtatttaccagagagagccttccaataagtctttgccagaagttgctactaacgtcgaagacattgatgaagacggagaaaatgagaaaggaaaagaaattcagtacgaaaatgttaccacgagtatatcaaacagcaacataaagaaaaacgtcaacaccaaagatacagtaagagaatcctctaacgtttcattcctgaagaagttctccaagggtaaaattctagagctagaaatacacgtcaaaataccggccgagagactctttgagggcctgcataaattactggaaggctggaagcaatacggattgaaaaatttgagatttgatacccccaatatgattatcactgggaaattagtaaatgacaatatcttatccttaagatccacgctttttgagataatagtcttaccaaacggagacgatcgaagtttgattaaattcaataaaaaaacaggctcaaccaaaactctaaagaaactcggttacgaaattcaaatcgttttacaaaaagagggtgtcttggatagctga

SEQ ID NO: 3593 - DNA, 456 bp, Saccharomyces pastorianus
atgggctcattttgtttggtatgtacgaatgcaagcactaacgctttgatatcttccaaaaataaaacacaaaacaccatgaaacaaactgatcgagaagagcaatgcgattcaatagcttcatctgatttgacgaatttcgatgtagaatccaactactcgaatgattctgctaacttactttgcgaacaatatgcttgtaaactgcctatgaaagatgaatcccaaacaaagttcaggctcacttctatgaatcaaaaatcatacaagcaaagtgctctatacgtacctttgacattcaaagaacgcttttcctcattcaccaaatgcatcaagagtacttgggccaaggttccaagctgcatgccaaatagatacgtcaggataacctttatttttgctttgttaatttcattagctgtttgggtattttacatggacgttcatgtgcactag

SEQ ID NO: 3594 - DNA, 1137 bp, Saccharomyces pastorianus
atgtctgcaagcggcaagatctctgttcccgaaggagtagtcaattggctgttcaaggtcatccagcccatctatgacgatggaagaagaacattccacgactcgttggcgctgctggacaaattccaccgtttgaggccaaggacaagagtattcacacattccgacggcagtccgcagttgctgttgtccatttatgggactgtcggcgacagcctgcccttgatcatgtggatacccagcctgtacccggtaaaaccccccttcataagtatagacttggaaacattcgatgtgagcgcaatcagtagttccttgcccgttcaagcgtacattgactctgatggcagggttgcgctgcccatactcgatcactggaaccctgcgacgatgggccttatagtcgttgtgcaagaattgatgagtcttttgagtgagccatcgcgagatcgggtgcccagcctaccgccaaagcccgacgcaatgcactctccactaaaacacacagtgccccccctaccaccgaagcccaagttcccacacgtgcagccgccattgcagccacctccaccaccgcaaccaccctccagtgcggtcgacctgatggacatggacaatacggatctctcccccaccaaccaccatgaaatgctgcagaatctgcagtccgtgctcaacgagctgtaccgcgaagacgtgcactacgtggcggacaagatactgacaagacagaccatcatgcaagactcggtcgccaggttccacgaaatggtcgcggtcgacaagacccgcctgcaggccgtggaacagaccatcgagcagaccatgcacacgctaaatgctcagatagaagtcttgacagcggaaagggccaccgtccaggagttctcctcaacctcgccgttcgacgacgaggacgtcgacaccatagccgtggcgcaaaccgacgggctcaaccagctgtaccagctggtcgccaaggactacgccctcacggacaccatcgaatgtctgtcccgcatgctgcaccgtggcagcgtacccctcgacacttttgtcaggcagagtcgggaactggcacgccagcagttccttgtgcgatggcacatccaacgaatcacctcaccgttagcgtga

SEQ ID NO: 3595 - DNA, 492 bp, Saccharomyces pastorianus
atggttttaagacaattatattattatagatcaaccaaacatatctaccaaggtatttccatcacttctacgataattttgagcgttttccttatattgagtatattcacatatgggtgttccatatctaacttacccttgaaggattcaggtaaatttggtattttttacttagagcacataaattatctttgggtgatggcaaatttggttaaaagtttcaagtacattccgcaaatgagtatcaattggatggggtgctctacaatggggctatcatcaaagttcgtcttgatatcagttttggcagaatttattgatttcgtaggtaggttatttgtaccgaccagtgctttgttttataagattccgttcaactcaacacctttttgggtgaaattgatacagtttattactctactggtcatactttgtcaagttcaatatctttatgtggggcggaaaccacgactaccaaaagggaaattataa

SEQ ID NO: 3596 - DNA, 747 bp, Saccharomyces pastorianus
atggagcacggattgcatatgcagtcgcatttcaagagtgatgatgtcaacaacgatgttaagttgtgtacaatgaacgaaggcatctcggatgagcccaatgcatctttgatcgcagactatatcactcttcctagcaacatatttacctcaaaatttccccatctattttacgaaatggctcactttaaacctttcgtgtggttatttctagtgctcgcgatttccattttatctgtcgtgtattgccataataatgtcttttacaatcttattgtcttagtggttgttccttatttcatgtgtttgtttgcgctgattgcatttaatcagccgatctctgatgaaagcttcaaaataaaacttttgatggaggtaattacatacaaaccagcggtaaacggaagggaatggagaactatcacatacaatatgaatcagtacttgttttgtaatggtttatggactactccgtactatttttacagtgaaatgacgtgctatgatttttttagaaccctcattaaaggaaggatttccggtactccttcagactcgtcaacaagtgatgccgaaaatacacagccagaggtaccagcagcagatgctccggatgatgcagctaggtctcatattttcagtcctgacccaattttcgaagcgtactatcttaaagctgtagaagtggaaaaagaggcccaaggaaagtattggagcagccaatatccaaataccgatataccttaa

SEQ ID NO: 3597 - DNA, 450 bp, Saccharomyces pastorianus
atgatgacagtgttaccagaagtggaactcttgacgacttcgtccaacaaggacttggtaccagcggcgaacttttcgaattcgaaaacacctggtggaccgttccagacaatggtcttagcctttgcgacagtggcagcgaataattttctagattctggaccactgtctaacccttgccagccagctggaataccttccttgtcagagacaatcttggtgttggcatcagcagagaaagcatcagcaatgacgaaatcgactggtaagacgacttcgacacccttggccttggccttttccatcaactttggaacgatttcagcaccggccttgtcgaagatagagtcaccgatttcagtgttttgcaaaaccttcttgaaggtgaaagccataccaccaccaatgatgatggagtcgaccttgtccaacaagttgtcaatcaattga

SEQ ID NO: 3598 - DNA, 888 bp, Saccharomyces pastorianus
atgacagaaaaagcacaaccctataagaccaaaatgtctgaaaatcatattcctgcttggaagagaattgctctaaagcaaaagagtacagaaaaccaaaatgaagtcaacgagcaaaatcaatctaatatagtagatgatgatccgttaaatattaccacacatttatctaccggtaacttaacaaagaaggagaaaagacgaatcattaatggcgaaaataaattacctaccaaaaaggagaaacgtgtgtccaaaccaggttcgaaaaagaaggaaaaattatcaagagaagaaaagaactcaaaaaagagtaaaattcttaaagaccagctacgttacttaatagagttcttcaaaactaagtcagaaacaaaattcccacactctgttttagaattggaaagtgtgaaggaaaactatggcgattctttaaataaggttatatcagcagaatctggtgttgttgaagtttggaagttttctaaacaaaagcaaaattggctcatcaagcatctttttaatttagatgaaattccgtctgtgtacaatgatcttttgctattatatttcaaggatctacaaggaagatcaaaagatgaactaatatcgaaatgtcaagaaaaactaaaacagtggaatgattatgcagaagatcaagaagaaaaaataaaagcactagttgaaggagaaaaaactagtgaacagtctaaggaggaaaacacggatgacagtaaggaagatgatgaagccgtaaaagaagaacaaaaagttgaggtacaaatgcccaataaagagcttgtgcaaagaagtttggaattattagagacttggaaggatgacagctcgaaaacaattgagctaaaaaacttttctatcgacaattaa

SEQ ID NO: 3599 - DNA, 282 bp, Saccharomyces pastorianus
atgtttctacgtactcaaacacgtttctttcacgctaccgctaagaagatggacttctccaagatgtccatcgtcggtcgtattggctctgaatttgctgaacatacctccgccaacaacaaccgttacttgaagtacagtattgcctctcagccaagaagagacggccaaaccaattggtacaatatcaccgtgttcaatgaaccacaaattaattttttgacagaatatgtcagaaaagggtatgtcttttttttttttgctatttttatggttgtttga

SEQ ID NO: 3600 - DNA, 279 bp, Saccharomyces pastorianus
atgaaggtcaaggctgacagagatgaatcttccccatacgctgctatgttggctgcccaagatgtcgctgttaagtgtaaggaagttggtatcactgccgtccacgtcaaaatcagagctactggtggtactagaaccaagactcctggtccaggtggtcaagctgctttgagagctttggctagatccggtttgagaattggtcgtatcgaagatgttaccccagttccatctgactccaccagaaagaagggtggtagaagaggtagaagattatga

SEQ ID NO: 3601 - DNA, 5748 bp, Saccharomyces pastorianus
atgaccatagaaaatcagatgtatctggagattaaggaaggccaattttgtgtttcaaatgataattacatgatcggcttatttgaaaactttgaatttgaagtaggaaacttgtactttattgcggttataattgatcaaaataaccgaatatctttatatgttgatgggaatttaatcaaccagatcacgttatttgaaaattcaatatttcaattaagtacctgtgaactaggatccatgatttcctctttcaagctttacagattttatttgtgggatgggctactaacagaatcgactattagactacttcagcatatcggaagtaattatcagtatacatttgataaaaagaacaaattttgtggtatattgtcgagttgccaagatgtgttgataacaaaaactcgtttgatgatcaagtcacccacagaaactacatgcacaaaattccttgacgaaattaagcttcttgaaatggagaatattataattgatatgaacccgaataatatgtgtcaagattatgccaaatcctctaatttcacaataacattcaaagaaaacaaggggaactcgaacgatatccccggcatgggaaaatgctatttatatcaaagctcgaacttggttgctaagtttatctctatcgattgcatacgttttgcgtttttgaacatcacagaatgcaatagtatggacgacttacttcgtcacgtatcacatttactgaatcttttgcgtaatactgaaattcttaattgcttcaaaagagactgtggctttcctttatttgcttatactctgaggcaaaaaataacacaagatctattgcagcctctgaatattcagtttttcaatttattcatagaattttgtggttgggattttagagatatctcaaaatccataatttcggatacagaagcctacgaaaacttagtactgaatttagatttatggtacgtggacgaagatgaaagttcccttacatcaggaggattagaaattatcaggtttcttttttttcaaatttcaagtttactggaagcttctatttatgctaggttcaatgctgaaaaatttaagacaatgaaaactctggaaaagttgtgtttgacttatcaagctactacaaagaaagggaagcctacgaacaagtttgatgtgctgtccaatgatgtagtatctgtactgcttgccttgttgaaatacaatttcgataaatggcatttacaatggttgttacatctttcgtattacttcattagagccaaggatatacgttccggagaaattatccttcaaacggtagaccaactcttttcgttcttcttagaccaagacaacgacgagaatgctaaattactttctaaaatgataccgattaaactgatactgatgatcatggatcaattaatgcaaaataatgaatcgaaccccaccatttgcttgaacattctattcaagacaaccctgattaataaatctctcttcaagcaattttacaaaaatgatggtctgaaactcatattgaccatcatatgtaaggcggatgaaactcgtcaggaagattttatctccttacttttcacctactcaatggataactatagcacaactaacgaactcgtctcagatgcgggaagcgacatttttaaagaaaatcacaccaatgagataatcacgaaggaaattatttacttagccatcaatttcatagagtggcatgtggtgaactcagaagccaatgactattcttcgttatcagatctgaacaaccacatatcaagatttatcgaaaatttggaattcttaagcaaggttccgattaacgcacctgtatttgatcctagaactagttatgtggccgtctcattactagatctcttaataactttaaaccaatcaggaaatgtctcagaattcgaaacctcttcgaaattaattacaagactgattaaaaacaatatactatatgctcttacaacatacgcgacctatgattttgaggtttatattaacgaatttttctgtcacaatgcagaatacaagctggttcatcccaaaactgtgataaacaataccagttatttggagctcgcatttatagtaaacattctgccgaatatccttgataccttagtaggtagtgacggtagattgaactcaatgatactaaaatacccatatatgatgtcaaatctcctttatcttcttcggaaattccaacctgatacattgcaaattgtcatgcctgaacagttttatttttcaagttatacatgtcttttgaattgtattagtctgattggtaagtcaacttgccatcgttttaaaaacgttctaaggtcccaactattgcaggacttcaaaatttgcttgataagcctactctattccagtacatccaagcaaataatttgggaagaccaacaatacgagatgctttgtaaatcgctattacagcggaaagaaactttatttgagaatatatactgggcgtgcgataatgagactatcagtttattactaatattcttagccagtagattgcatgaaactggatacgaagaagtgaccttcaattgttttagagtgatagttcaagaaaaaaaaaaaaaactaaaggaattagcaaattactttgacatagaggacaagcatgacgttattgttgccttgactcattttatatcaagcgatagttgtgatctagtgaacttctcaatagaaaattaccctttttttttcagcgatgtacaaaaaaagagatttaagaattctgctaccagttttctatatagaaataccgatttttcagcattaagcataaaacagattaacagccaagttcatgaatggaaacatgcaagattcgaatacataactaaaaacaatcaaaagtgtctcgttctatttcggaaagacaatacgcctttagagtttaaaatcaaaaaatctatatcgaggtacatttccaacttcaaaaccgacagagaagaggactctgtattttatcaaaataatttagaccttttaatttttcatctgcgacatactctggagatacagtcaggctcaaggatttcttgtaaatggtcactggattttgtggaagattttgatggaatgaaaagaaggcttttacctgcctgggagccaaaaaatgaaccacttttcaatgaggaagatacgaaaagtgaaaccattacgagtaataacagacaaaggagggaaagtggaagcattttatcctatgaatttatcgaagatatggaaactcttgacttggaaccgttaggtgatttgaatgaaaacagaaaaattcttagacttttgaaagataacgattctatttccactatttggaattgtagtttaattatcgggttagaaatcaaagagggcgttttagtccacggtaataactacctttacttcgtaagcgattactattttggttcagaagataaaaaaatcctgaaattatcagaagtgtcccaagagttacgagacataaacgttagtctaatcaacggtacggaccctgaaaaagtatcaaactctctcaagcatgaagttttcgtttggaaacttctcgatctcacttttgttactaagaggccctttctacttcgtgatgttgcaatcgagctattatttgaagaaagagttagtgcatttttcagttttaataataaaaaggtgagggatgatgttctgcgggtgttgaataggattcccaaacaccttccagctgatccggttttttcgagtgttctacaagagataaacaatcggggtaatactatagtagcaaagaacggtataggtaaagcaagcattgcttctaaatttaccagtgttttctcaaccaacaacagcctaatagacggatttgaacttagtaaaaaatgggtcaggggagaaatctccaacttctattatttgatgtgtatcaatactctagcgggaagatcatttaacgatttaactcagtatcctgtgtttccttgggtcattgcagattacgaaagtgacgtgcttgatctagaaaacccgaaaacttaccgggatctatcaaaacctatgggcgcccaaagtatgaaaagaaagctgcagtttatggaacgctacgaagcgttggcttctttaaatgatgctggttctccgccatttcattatggcacacattattcatcagctatgatagtatcttcgtacttgataaggctaaaaccttttgttggctccttcctattgttacaaggcgggaactttggcctcgcagaccgtttgttcagctctcttgaaagagcttggtgctctgctgctgccgagaatacgactgatgtaagggaattaacgcctgagttcttttttttacctgaatttttaactaacatcaataaatataactttggtgtagatcaaagtggaaaaaaagttaacgatgtcattcttcctccatgggcaaatggtgacgcaaaggtttttattcagaaaaatagagaagctttggaaagcccgtatgtatcaaagcatttgcatgagtggattgatttgatatttggctttaagcaaaaaggtaagaatgctatggattctgttaatgtattcaacaggttaagctatcccggtgccgtaaacctagataatattaacgatgagaacgaacgtagagctattacaggcatcattcacaattttggccagacgcctttgcagatattccaggaacctcaccaaagaaagttggtctttgatattcgacagttaccgacagaagtatggcataaaatcccaagtaagccgatattcgaaaaattggttttgaattcaaatggaaagaacaggcccgtgagttatgttatacacgatttcaattactttgattctctttattggagaggattcgcttttccaaatttgtttctcaaaacagaggaaggagtagtgtcgttcaagattgttcataaaagttcgtttagaattggcgtagacttcttcgaaaaaacacacatggcacaaatcacttctttcacaaattggaaatctggtcagtttataactggagatgaaactggattaataaaagtttggaaataccataaaaacaagcatggcgccttaggacaccttgaaaagaaaaaagcaatgctagggcacttatatgaagtaaaggaaatatcttgctatttagattacaacatgcttttaactttagatgttagcggcttagtctatgtctgggatatgataaatttcgaactggtaagagaaatatctgctaatgcgaagcggatagcaatatctcaacacaccgggagtataatggttctaactgaaaagaatgtcatatccgttttcaatttgaatggtgaagagtatacttcaaaggcattcgaagcggttaaaattgcaagctctatcgaatttctagattttacaaaactagacaccggttacagacagcatatctattggaaagaaaatgaagtactgttagtcggtttcgaagacggaaaaatagaaatttatgagctccatttgaactctcgtaacgaatgggcgatgaaattgctcaaagagctttctacagggagaggaaaagcaataactagtattaaggcacaaggtaaaacatacctatcccagaaaacacacaaggacccaaaagagcaaagcgaaatagaagtgatttcaggcactggagatggtaggctgacaatctggtactaa

SEQ ID NO: 3602 - DNA, 519 bp, Saccharomyces pastorianus
atgcattcaatcatcaatgctgcttcgaaagtcttgaaactccaaggggatatgaagaagacaacactcattttggaagatatactcatactacaaccaattgaccatgaaattgaagcaaatttagaacacccgttacagcacgaattaatagaaataatacagggttattcactacaggacaaaagaagcattaatagtaaaaaaggtattactgaagatgaaatctgtgaactaagtaaccatgtctgccttgcactctcaagaaagtttgaattaaggaatgatagtaaaaacttcaacatagctcaacccaaacgatggatgcaattgctagaaacattaactgacacaaccggctttgccgtggttattcaaatcattattattttatccaacacttctctaataaataaacaaaacttgggaagcctgaaacaactaaggagccaaatttttgaaatattgttaaaaaaaaaaatacatggaaatgtaaactactacagaggactcttttag

SEQ ID NO: 3603 - DNA, 1824 bp, Saccharomyces pastorianus
atgtttgtactgatagataatgtcctggcctaccttcttgaacaagacgaccaatttgtaaccgtacgcttcgccattcagggccaaatagttacaagaagagtaaacaaaatacacctttccaacgttaccgatgtactcctaatacagttcttaagccacacacagaatcataacaacaatatcgtcccaaaaaaaatcctcgataatatgagaacggccgtacggcagttgctggaagcaactgcttgcgtctccagagaatgtctcctgataaaaagaaaccacgaaatacgaagagcaagaaagcgcctactcagtgactggtacaggctgggtgctgacgcaaaccaggatacccttttggtagtcgcaaactctgcttggaggtttctcgccgtttggcgaccgttcgtaacctcaatccaacacgcaaccaaagaattgtttaagcaaatcgcctattaccttcttcatagcaacgtcgacttccaaagggtcgcggcactaatccaggtcataatgggggaggaccatttgcttttctccatggatgaggccctaaaagaggtagtagaaatacaacaatacctcgataaaatgctcccgctcgacacccaccaatggcaaaagccatccccctttgagtctggaaacctgttactaaactttagggactggacaactgacaatggactgctccaagaattgctacactgctatctccaaaataaagacaaacaagagaaacactctgtccttcgcctaatccaactctggctacaatcctattggctagataccaaccataccttgaacgacattctcctcttttggtgcgaccatttggctgattcggaaatgtatgatatgttatttccggaggttgttcaattgtttgcaggtggggcaagaaccagacaattaaaggtgcaatacattggcctacctgaccatgaactggaaaccagcaaaccagttactgattacacaacattatttgaggaatacaaaacagatagaattgacgaaaattacgagctttctcacacaagcgatctcgaaacattgctcttgcaatggaaacaaggtgagaagccagaaggagaaacatttgatcttgatatacctccatggacactcgcaaagacattgaccctcttggagtcggccctgttcttggctgttgaaacaatagagtttccaaagtatttcaaacacagcaatacaacaatcgacttggtgtttaagttttcaaatcagctatcgtactatgtacttgagacgactatacaacagacacacacaatttcatattggttacatgtcgcgttatcttgcctttatctaaggaacctgaactctctcgcttctattatcaccacgctgcagaaccattcaattgaaagactatcttttccactagacgtcaagttagacagcctttttgagaccttaaagaccatagtacaccccaacaacaactacaatgtttacagaagcattatccaagatattgcacacaatgggctgccgtgcgtgccgtttacttccctgttcataagagatataacattcatccgggatggaaacgaaacattcgccaaagatgaaactggtatcaacatgaataaattccatcaaataacgaagattatagccttcgcccaacatttgcaacaaatgcaatataaaactttgacttgtgcggatcttaatgcaaaaaaccttttggtagctatgactgacgtaaatagcttgtacaacgacaataaagatagagcctaccaagtcagtattgctaaagttcccagacttgtgtaa

SEQ ID NO: 3604 - DNA, 2616 bp, Saccharomyces pastorianus
atggtgaatgataaatcggcgagacgacctagaccttcttttgtctgcattccttgtaaatcaaggaagctaaaatgcgacagactacgccctgtttgcagaaagacatcgaaacaatgtgcatatgaaaacgagccaaatctttcaaaaactccttgtttcacggtggagttgtctgatgaaggcaggaactgtccctcacagaccatccgagaccccacgcaagatatttacactccaacaagtattgcacgctctaatgacgtatctgagacaccaatttccaatagcatatcatgttctttcgtagaaaaaacatcaaaagacatggaactgaaactctggcatccaaaggatatgcttgtcaattctggcggtgtaacttttttcgacgccccctttgcatcacataccttgattgagctagatccatttttgagggctcttacggtctcaattcacggcacaacactagtggatttgcagaataatttacttctgtgctctaacgaggaagttagcttttccaattatttagacaaaataaatggggagaagggagaggctcctcaacaaattcttagcccgttaacttttattgataaagcaattgttaaatgggttgataatgccactgaaaacgggaaaaatacgttttctttcaatttcttccattctgcagttctcatattctgcaattccaatatcaaagtactgcactctttgcaacctgtgatcacagaagcttcatctcttcttccagacaaaaaaatagttgacttactactaaaggtattctacgagaacgtgtacccattctatccatatttagacattcggacttttgaggaggagctccagaagattttaatttcttcctatgatggccgttatgaaatttcggtcacgaaagacagtctatcaaatttgtacgtattgtccctttttctcctgatcatggccaatgccttaagaagtatttattgtgatagagaaaattatccacagataaagttgaatgttctggaagccgcgaagcaatattgtgacacagctcaaaagctactccaccttttaaatggttataagaacacgaatgagaaaagtttttgctgtctgctctatttttatattctagtatatttaaatccgacagcttctgaaactttaaactcatacaccaatttgctgaacattaagtgtttatcggaattagcgcttacgttgggactacaccaagaaccatctaagatttccagatatatcaaggaaatagaccccgatccagatctcttaaacttcaggagaaagctttgggttggactacaatctttaaaattcatgatatctattccagaaggcgtttctaataagctagaaaatgagtacctatcaaattttttagggaccgatgaagatatggtaaagatattcgagaaaaactttcacgaattacctggctacgatgtttcactgttaaacgatattgaggacaaatacgagttccataagattctgaactgtttaatatcgagcgctaccccgattaacgggaacccaaatttgctaccaattacagaaaatttaaagagaacaagagaatatatagatctgaacttttcatcaaagcagctcagcaacactggagtttatggcctattaaacgtaaaacaggtcttttgcagagaagcagtgattgaagtcgaaagtataagaaagacagcgattttcatgaatagaattgttggattactttgtattttgaacataaataacgttttagcagtgcattttgaaaaagaggcgaaaatagattggactaaaaatcaagactactatcacctcttttttctcgattgccttacaacgtatactgaattgttcagggacatcgtatcatatttgaaaggagattataagtggtgtattcccaagaagtattcctattccattaacaaacttatttgtttttccttgatgcgattatgggtttttcaaactagtttatgcttaagattttcctacaagcaacttttaagagaaaagggttctcaatccgttgagatttctaatgaatttaacgacatgtatggtaacaattttgacctggccttacaaaagtctttgaagtatatgaggtaccatttgaaattaactttagatttggcctctaaggagttgatggagtcggattctgaatgttttgtatctctgtcaatgtttaaatacatcgcatatctattggacacaggaaatctagcgacatcaataaacgtattctgggaaagaagctttaataccaacgaggtttcaaaaacaattttaaaacaggttaatatgaaatggggaatcaatatgacaagcccccaatatgtaaaacgccatttgatgaactctcaagcgttaagcagcctaacttacccattcttaaaaaatatcaacatcatacttgagagctccgtagatccagacaacactgaagatatcgacgctccttcggaagctttctctatagatactggcgaacagctttcaatgcgtcaaaccatgaaggaaaattatgatttatttgcagacctcatcaacagtaacttgggcgaaattccgacgttgtag

SEQ ID NO: 3605 - DNA, 1902 bp, Saccharomyces pastorianus
atggaaggctggatgaccgatctttggggcaggacggtatcggggagacggaattcaaatcgagtggagaaaaatgggctcacagaaacctcccagagtgcttcgacttcaccacttaagtttcctcgaagaaaccgtttacaaacagtcggaataggaggcaacgctttatctcctactggaaagcctagtactttagggaatgccagtcccaataaatttattgttcatgaggaacagggttatgtagatatggacagtccttcttctactcccacgaaaactctcacaatgcctcgtgtactggaaactgcaagaaactctgtcgaacttgttgtgaaagatatgagcttggagccaaaatttgagttcgctcacttagaaaacgcattttgtctatctgaaactacaactggtgaagatgaagacattataaagctgaaagaggttaaagaaaattcaagtccttgctctaatgtcgaaaaagttttcaaagattatgatctccctaacatgctaaaagaaactcaactaaaaaatgaggagatcgaaattttgcgccagaaacttgatgaaaaggaaaattttattcaagaattaaagaaaaaagctaccttggatgacactagatttgaaaaaatcaattctttacaaaaagcagtacgtgaagagaacagcgctgcttcaaaaagacttagaattacacaacatagtttacaaacaaaaattgaatcactggaacatcaattacaaacatttaaagatgataataaacagttaaaggacgatagttcgttttacgagaaaaggttgagtgacgtttatagctacatgcaaaacctttctctttttgggaaagaccttggtaaatttatattagaagagataaaaaccagtcaagctccttcgactttccaaagccattttaccaaattttatccagatatcaaagatgtcaaagatcctgaaattgtggaacagtgcgagcagttgaagcaaagaatatacacgttggagaaaaatgatcgtatacgccttgaaaaaataatttctcttttcaaattgactagcgaaagattgcatttcatgcagcaacaacacggtcagaaaatagagtgtctccagaaggaggtgtctacaaaagaacagcaattccgattagagaagaggagatggcatgatgtttttaacattaaggaggaaaacttccaaaaactgaagaacgaattaaaagaaaaattgatacttagtgaaaaagttcaaagaaatgctgaagataaactaaatgagtatatgaaagaacatgaaggaattatcggtaggctccagagtcaatcttcagttattgagaacttgaacactcagatggaagaactagataacacgaataagaaaatgtctgaggagttgatgggaaaacaagacgaagcctttaaatttgaagaaacaattgaatttctcaaagaggaagtacttcaagaaaagctaagcttgaaagagttatatggtgatgcttccaccgaacttaattttgaaactgtgggtaaatcgtttccacatattacgaaggataaatatgattctttgggtcttgatattctgatggaccttacttatgtgcaatcccaaaatctaattaaaaatttgttaatcgtattagatatcccactgaaaacatttttaaaagtcgttccaacaattgttattcaacttagatgtgagcttgcgcttcttacgagatttgctaatgatttaaatttgaaggtttttggtaagcaaatagatttcaagagcagaagaaaaattgcaatgaatgagtttctgaacaatcacgatattgccgaagtaaagcatcccctcaattatgatttgcaagcgctgttaaaatatttcttcacttaa

SEQ ID NO: 3606 - DNA, 2418 bp, Saccharomyces pastorianus
atggggaaaggaaaaggtctacataaagagaggcgcattttaaaaagatacttcgaagaatacccgtcaactagtcgtatcggatccaatttagtatattcaaattacacagttacgtttctgagatacaggccccatccttcagtcgaatttcacaagagtcatccgcacgtccccttaatgagcaaactattgttttgcaaatcaaaggtgtttctacatccaactagtgatgccagagataacatagctggttttctactactttccgtagaacccaaccaacaatctcatcaaacagtcctgcaatatattccggaatccagcttttcctcatccgagatagcaaaactgctcacgtatgagtctaagttgggagtgtgtccaagttctacaccattcgtcattgagaactcaataagttttagtaatctgatcaatacctcttcaggccaagccttccagatttctctttcacagatatactgcatccaatttaggcctccgagccctaatgggtggtatgttgggtctctggttatatatcctctggtagaacaattcacaggatttcaaccccctgttctattttttcatgatcaaatctgcccatcaacaaaggacaagttaataaagctacgtgtatctatgaatcccttcgatgactcaaatgagttatattggggtggcgtggatctaagaaacaaaatcaatgagttaacggagctgaagaaatctaatctagaaacagaattttggttagtaaatcctactttgaatgatttaaggaattttgtctctaaggatctattggaaagttataacaatcagaacaaaaataaagctgatcctagcacagctggtgtaaaactaaacgagaaattgcaagagtggaagtggaacgtaatgagcaaaatagcagacgttactaccaagtcaagcaactttattgacagctggttaaccaataactctacaattcaaaaatcacaaatcgacaacgaatacttgcaaaagcttctgaataacgagaaggttaaacagattgagcaagactatgattctgcgagagtatatttagcaaactggtcactgggagtaaaacaagaagctgaaagataccaaaagcagaataaactatttgattcgtatagaaacaacatcttcaacgatttgaatttgactgatgaattaaatgacatagaaataaataacgccctacaaagacaatttcccctaaccgaggcgaaatggaattcgctttgggatgagaacgatgggaggctgagagtcacagtaaacgaagttaaagatttcatattccatggtgggctagaaaataatgatttgagaggaaaagtttgggggttccttttggagatatacccttgggactcttctcaagatgagagattacaaatcgatcagagtttagctgcggaatatgatcaactaaaactaacctggtcaaaggatttcttacagtttgacgacgaagatgaagaagaatattggaaggatcagatatttaggatatctaaagatgtaagacgttgcgatagaaacttgagtatattccaatacaacactgttgacggactgccaccgttgtctcaagagtcgcctgaaaatgaaaacaacaaagacagtgtggaattagccggcgaggagagcgatgaagctgatgacgagattaaaaacccgcatttgattcatctagaaaacatccttactacttataacgcatacaatacgaatctaggctatgtacagggcatgacagaccttttgtcaccaatttacgttatcatgaaggatgaatggaaaacgttttggtgtttcacccatttcatggatgttatggagagaaactttttgagagaccaaagtggtattcatgaacaaatgttgacccttgtggaattagctcaactgatgttgcctgaattgagcgaacaccttaacaagtgcgattcaggaaacttgtttttctgctttagaatgctgttagtatggtttaagagagaattcgacatgcaagacatcatgcatatttgggagaatttttggacctttttctatagttcacaattccaattattttttatgttggcgatcttgcagaaaaattcacaagctatcttacaacatttaaaccagttcgaccaaatattgaaattcttcaacgaacttgacgggaagttagattggaacgatctgatggttagagctgagctattgtttaagaaatttgaaaaaatgatgcaagttatggaaagagatctgcaaagttcaacatcctcttcgtcgtccacttccggtgtattgccctgtcaaagtgaaagattgaacctgcttctgtccaaaaaacccatcatcaaacgtgaagggaaaagaagcaaggactccattaaataa

SEQ ID NO: 3607 - DNA, 1419 bp, Saccharomyces pastorianus
atgaggtacaaaagaaagttaaacactgcccacgctatgtaccaaggcccaccgcaactgccttctcagggtgtatccatgccattcattgttaacaacaacaatccctatccaaacggcaatatgaactttcctcgcactgcgcagcagagtataccgcccacggtgtaccctccgcaagtaccatttccaggccagtcacaggggagtcagtttccgcaagcttcgccagaccaacaagtgttcaatcagccaccacaagtggcccagcctttccacaactctgcgccaaatactaatctcgctggggctgcgaataatgggaccattccagtgtatacaccgctgacatccttccctcatcccatggcagctgccgcagcagcagctgctgctactgcaccatctccacagcctatatctccggcatctctaccgatgttacgagtgccataccacataagaaaatatttgtccaacctggcgattttgaaattgtatgaagtaataaatgaaatcaacatggcaatgaacaagataagcttgctttcgttttggacggacctggtatcgagagttttcactcctgatgcagtgatcaggtatagtaagaagtccatgactgattatcgggaatttgagtttgttatccctgtgttcgtcataatttgctctacactaggcagatttggcattgtgaaaatggaaatcaaagttctgcaacttaagacacaagttctaagtaattctactattttcttcaattgtccccgcgctacacttatttattattatcctgatggttcctatatcacgcatttcgcacagttaaagggtgcgtttgaccttgacttgaaaatcaattggctggacgtatctatgcatagtttcttccctgatattgaatggaactcggtggagaggcttttgagtgatgaatacaagtcatcagagattgagaaaatattctccaaattgaaacaagaggatgtcaaggaacaagaaaactcattcgcagaaagtaatggaacaaacgtgccccaaaacttcgaagcgataacacagctaagatcttactttgatgtgttcagaaacgtctccgtattcggcactcaagaggggctaatgagaattatgcagataagtacagtcatgtctactttgaaaaatcttcgaaagttccaaatcgaaaagaacatcgatagtcctgtgactgccctgagtgcgtatattgattccgacaagaagggcaccgtgggcgagcccattcactcaaagaggcgacgcaacagtggaatctcccctcacaccactactctgggaccgagtgctaattccaatacgaacaatgacgagcctcttaccagtgatgttaacgataccaacaacgacatgacgaaaaagaagatgaagttctga

SEQ ID NO: 3608 - DNA, 1248 bp, Saccharomyces pastorianus
atgatctttttgtgtttgccagcctggttacctgaatcctaccactggtatcaggaacatcactgctggtgggctcctattacattttatgtattagctcatagaaggtattctggtaactggacgttagtggtacgaagattaatttgtggtataataggtatcttttgggggtgggctgcaaatcaatcgagacatttcggtagcccatatgtgatctgtacatttgccggactaattgtggtcccattcagtatcaactttctagtttataaaaataccaagtcaagtttcaccgcgttaatgtgctttactgtaatcgctttagaaccatacagcaaacccgatagacaccataacttatcgacggctggtatatggaaatgcacttgggttacagggttggctcttatcattgggattttgatgtcggtccccatcaattggatagtatggcctttcagggccagaacagaactaagagatagtatatcatctttattggcacacttaagccaatcgtaccaaacggtggcggaccgttatttgtacagagatgcagatgatgcacccactgatttaacttttgcgttctcccatattcgtgaagtcaggctgactcaaagtcttgaagcgatcagagaacttttgaaaaaggcgcgtcatgaaccaattcttatttcaaatttcagtcctgagaaatatataagtctaattgattcatgccaatttttgttgtccaagattattgaatctagaatctcaggtgcatttttcgaaatatgggaccaggatttcgatatcgaaaccacaagagcgttgttatcgttacggagggacagtgtctcatctgtgatttttgttttttacatcttatccaattgtttcaggtcaaagaacaagattccgcgctatttaccaaacccaattatgtcacgtaagacgctatatcacttcatcaagaagttcagtgaaatgcaggaccaatcacactcgaatataaattcgggatccaattctatggaaaaaaatttattcaaaaagatataccagcaaaagattccaaacccagggcagcaacaactacctctgccttcggttgctaacagcaccgaaatagatagtgaaaagatgcattggaccgaagttcacggcattgcattctcgagagcgtttacggatatatctgaggaattgtaccaggcagcgagctgcgcaaaagatatattgggcgaagaagacttttag

SEQ ID NO: 3609 - DNA, 123 bp, Saccharomyces pastorianus
atgaatgcaatcttaacgagaagacatggccttggtgacaactctcttcaaaccaacttcagcctttctcaattcatcagtagaagcgtcttcgatttgcaaagcggccatagcgtcagataa

SEQ ID NO: 3610 - DNA, 297 bp, Saccharomyces pastorianus
atgaagccacttctcaaggaagaaagttctgtgggctcggtaggctctggtaaatcaaagcagcatcatcatcacagtatgaagaactcttccaaatcacctgattacgattattcttcaaccaactcctcagaacaagctccaagacaccatactcatggcactgatgaaggtgaagaacaagaatatgaaggcgaagaacaagaaggtgaggaacgcactggcaagcaaaatttcatgggcagagtgagaaagagtatttctggtggtacttttggattcagaagtgaaatttaa

SEQ ID NO: 3611 - DNA, 2931 bp, Saccharomyces pastorianus
atgaacatgaacgagcctttgtccaaagatggccaaggcgaagaagaacaaaacaaccacactttcgatggtaagccaggctcctacgactctaactctaacgctgctcaacgcaaaaaatcgttcagcaccactataccaacagaatacaacttgcccaagaaacaaccggaatcaactgccaacaacctagaaactaaggcaaaaaatattcttttgccctggagaaagaagcataacaaggactcggaaagctcgagcgccaacaccggtactaatgatcattccgacgctaatatgggccacaactcaaacgttggctctggtctagatccaaccattgcccccagtactcagcctcaaaccatgtctatttcaagccctaacatcaaaacaactcctcctactacttacggaagcactaatgcaagctccagccctaacgtaaagaccacacctacccacgaacacgcacactcacattcaaagacttcaacctctccaactgtcactcgggcgcacgccaacgtcaacactggacctacagctactgctgccacccacgagcactccctcaccaagaccacaccacccattcatgggcacgccaacatcaaaaccggacctacagccactaccgccactcacaccacacatgagcactcccacgcaaagacttccccacccactcatgtacatgctcacgacagtactacccctaaccctgctaccactaccacacacgggtacgctcatgtcaagactacgtatcctgccaccactggccctaatgcttctgctgctactactacgcacgggcacgcctacgtcaagactacatatcctgtcgcccaaggtcataccaatcctacagtcagtccctccaccaaccaaaaccactctaatgtcaaagctagtccttccgccaatatgaaacattctaatgtcaatcctatcattaagccagattcaaacgttaccagtaatgttgactcgggcttgaaccgtgacactattcctggcggttttccaaccacatcttcgaacacaaatgccaaagctagctctggtgtaaagtccgttaaccctaatgacccaagcatctatacaggtacaacctcatccacggatgctaatgactctaagaagtctgatagtactactactggaactccacacgataccataaaagaaattgcagaaaaggtcaaaatgaacgagagcgaacaaactggtttgaagaatgaccaaatttcgggttctgacccaattccaaggcacaccatggaccccaggaataacaagaagggaattactggtatggcaatgggaagtggtccatccagccaacagccttcatacaatgataatatgatgaacgttcaattccctgaaaagaccaaagtcgaaaagcaaaatatctctgaaaacgctgccgaaaagttcaagaatgaaagagacgatattttgaataaaggtgatgatcacgaaccgcatattatcaagtccaaatcggactctaactggggtccgattgactacaaaactgataatggtaagaacaagaatctacaggacgttgttgtaccctctggcatgaaagacaactctcgtggtgatacgtctgaaaaaccaaataccaagtgggggggacctatggagcctactaggagcgacaacccgcatgatgttgttggttctcaaaacgtcggcggaaacatccctaaaagcaccactcagaacgtcgtgttgccaccagccatgaaggatgaagatttgaacaagtgtaaatttaactcaagaaaacccgatgaatacggattggattatttggacgatgttgaagatgacgacgatcatggtattaacgattacacaaatgcaaaggacgaagaccactataacatgtctgcgcaacgcgaagaaaagccgaattatagtcgttacgaagctgcaaggaaaatcccgggtgccttcaaagttgatgcattatctagctcaattcaaagacaagaagatgatgatgcgttatccccaaagcagaaaacttactactctagcaatgtaacaaaggtagactcaagtcaaggaaaatacgaattctccaacatgtctggcaatagcaagcctactgacttaagtaaaaacacttcaggtccaacaccaacccgtgtcaacctcgttgatcaaattaaaccaagaggagctgaaaacatgtcatctaacggcaagggttctgacactactgcatcaggcaagaccgaaaataccggtatcggttctggtgttgccgcatttgataacagtagaaccgcagacactacatatgctaaatcaggagacgcggttactgctgcttacgacaacattagaaacactggtagcagacgtgtagaatcagaaaacgctgatactacagcatttgttaataccgggaaagcagacatttcacatgccaaatcaagagatgctgatactgcttatgctcaggaaaaaccattgcaacagcagactgcttatgggtccggtagtgacgccacaagtcacgaatcttctagtgatgatgatattgacgtgaacaagaatcggaaggtcttgaagaatgatgcatctgactacaagcgtgaagtagatttgaaaaatcagcgcagaaccaacattggcggcaccgaggccgcaaatgcgtatgctgctgaagttggtaatttcccaagtttgatcgatcctcaagtcccaacttatggattcaaagatgataatactccggatccacaaaaaaaggcatcattatcctccccgaccgaatcttccggcccagaagctgccaattactcgattcacaatgaagccacttctcaacataaggaggcatcattatcctccccgacgaatcttccggcccagaagctgccaattactcgatcacaatga

SEQ ID NO: 3612 - DNA, 369 bp, Saccharomyces pastorianus
atgctcttagtaggtatttccactgaagattctatagccgaggtggaaaaattatccaagaaggttctcaatttgagaatctttgaggatgactccaagaatttgtggaagaaaaacattaaagaggttaacggtgaaattctatctgtgtcccaattcacattgatggcaaggaccaagaagggaaccaaacctgacttccacctagctcaaaagggtcacattgctaaagagctttacgaagagtttttgaaattactaagaaacgatttaggggaagagaaagttaaagatggtgagttcggggccatgatgagctgttcgttaaccaatgagggcccggttacgataatacttgatactgattag

SEQ ID NO: 3613 - DNA, 1320 bp, Saccharomyces pastorianus
atgtccctttcaactataactgtaaaagctttgcgacaactgcttaaagagaaatatacagtagaggatgacctcaatggatccttagctataccaaatatgcgattccagccatcacgtgaaggagaatatcaaccactaagtcaatcatcgcttctcaacactaaactgaagcaaaaaagtaacgagaacacccaaaattacaaccgcatactcatatcgaaactatcatgtgagaaaatttccaatttttcagttcgtgggggaaatattgaaattatgggtattctaatgggtttcactttgggagatcacattgtcataatggactgttttaatctacctgtagtaggaacagaaacacgtgtaaacgcacaattagagtcgtatgaatatatggttcaatatattgatgagatgtataataataatgtcgatagtgacgcacaagactgtaaagaagttcaactcaacgttgttggttggttccattcacaccctggttatgattgttggctcagtaatattgacattcaaactcaggatttaaaccaaagattccaagatccatatgtggcaattgtggtagacccattaaagagcttaaaagacggaaccttaaaaatgggcgcatttagaacagtggaaaatcaaaacggcgacgttaatgcactatcctattatgaactagaaacgattgtcttcgattcagaattgaatcgaacgctattcgaaacaaaattaaaattacattgtgtggtagaggatgatgaatcagaacaaatgtctttaaacagattaattgaaatgatgaaacaatgtaattatttagtggattcaaaaaacgtcagaacaagaatgaaattaactactaatgacaacgttcacgacgaaaacaaaaaaactgttgatgaccaaaatcatttaacaaagtcacagttctactgtaatactcaaaagggggacagtaccggtacgaactcttttgtcagtatgctttcaggagacaataatagtgacgtagatatggaagatcgaaactttaccgaatttgatagcacagatacaagtctgtacacgagtatggaaccaagccttcatgcaaaccgtacagaaacaaataacaggtctaacgaaaacttccacaatttgagaaaccatttcaatatttctcaagacagacataaggaggaatgtaacgatcttttacaaagaaacgtgctagagacagattatacaagagcgaagaaccgcatacttgcttcaaagataaaacaatacgaacgattgcgattttataaggatacgttcacactttaa

SEQ ID NO: 3614 - DNA, 1635 bp, Saccharomyces pastorianus
atgtcaaaattcgaataccccgaaactccttttggtattttctttgttgttgggaatactttcaaaggtttccacattagatttagagatatcgcaagaggtggtattcgtatagtctgttcaagaaaccaagatatctacgatttgaattccaaaaacgtaattgatgagaactatcaattggcttctacccaacaacgtaaaaacaaagatattccagaaggcggttctaagggtgttatattgttgaacccaggtctagtagagcatgatcaaacctttgttgccttttctcaatacgtggatgcaatgattgatatactgatcaatgatcctttgaaggaaaactatgtgaatcttttaccaaaggaggaatttttatttttcggtcccgatgaaggaaccgcaggttttgtggattgggctactaatcatgctcgtgtcagaaactgtccatggtggaagtcgttcttaactggtaaatccccatccttgggtggtattccccatgacgaatacggtatgacttcattgggtgtacgcgcatacgtaaacaagatatacgaaactctgaacctaaccaattcaaccgtctacaaatttcagacaggtggtccagatggtgacttgggttccaatgagattctcttatcttcatcgaatgagtgctatttggggattttggatggttcaggtgttctttgtgatcctaaaggcttggataaagatgaactactacgtttggctcatgaaaggaaaatgatttctgagtttgacatttccaggttgtccaataatgggtttttcgttcctgtagatgccatggatattatgcttccaaatggtacaattgtagctaatggtacaactttcagaaacacttttcatacccaaattttcaagtttgtggatcatatagatgtttttgttccatgcggtggtagaccaaactcaattactctaaacaatttgcattatttcgttgatgaaaagacaggaaaatgtaagattccgtatattgtagaaggtgccaatttgtttattacccaacctgctaaaaacgccttggaggagcatggctgtgtcttgttcaaggatgcttctgctaataaaggtggtgtcacttcttcatctatggaagtattggcttcgttagctcttaacgataacgattttgtccataaatttattggcgatactactggtgaaagatctgcgctgtacaaggcctatgtcgtggaagtgcaatcgagaattcaaagaaacgccgagttggaattcggccaactatggaacctaaaccaattgaacggaactcatatttcggaaatttcaaatcaactgtcattcaccatcaacaaattgaacgatgatctagttgcttctgaagagttatggttaaatgacttaaagttaaggaactatttgttgttgaataaaatcattccaaagattttaatcgatgttgctggatctgattctgtattggaaaatattcccgaaagctatttaaaggttttgttgtcaagttacttatcaagcaccttcgtttaccaaaacggccttgatgttaatattggaaagtttttagaattcattggaggcttaaaaagagaagctgaagcgaatgcttga

SEQ ID NO: 3615 - DNA, 1557 bp, Saccharomyces pastorianus
atgctgtttgatcataaaaatcgcagtgctttaacatcattgaacacccctgatattgcctctttgtcgatatcttcgatgtcagactatcacgtgttcgatttccccgggaaggacttacagagggaggaagtcatagatttgctagaccagcaaggttttattccggatgatttaatcgagcaggaagtggactggttttataactcattgggtattgacgatctgtttttctccagagagtctccccaattaatctccaatattatccactcactttatgcgtccaagctagatttttttgcgaaatcaaagttcaacggcattcagccaagactgttcagtatcaaaaacaaaatcatcactaatgataaccatgctatctttatggaatctaatactggcgtcagtataagtgagtctcaacagaaaaactttaaatttgctaacaattccgtcggaaacgacacattggagcatgctaaggatactattgaaaacaataagactcaaatgagtgattcttgcccaccttatgaattggattctgaaattgatgatcttttcttagataataaatcccaaaaaaactgcagacgggtatccttttgggctccagaaagcgaattaaagctaacttttgtttatgaaagtgttttccccagtgatgatgctgctgccgtagatatttcttctcaagatttgttaaaaggccacattgagtctattagtgataagaccatgtttaaagtctcttctagtgaaaacaaaatactgtacggtcttttaatcaagctagttaaggaaagagagggccctgttatcaagactactcgctctgtggaaaataaagaagaaattagattattggttgcctacaaaagattcactaccaagcgctattactcggctttgaactctctgtttcactattacaaattgaaaccttctaaattttatttggaatcattcaatgttgaaaaagacgacattatcatcttttccgtatacttgaacgaaaatcaacagttcgaagatgttttagttcatgatgtggaagcagcattgagacaaattgaaagagaagcttctttgttgtacgctattccaaataactcatttcacaaagtttatcagaaacgtcaattttcacccaaagaggcaatttatgctcatattggtgctatctttattaaccactttgttaaccgcttaggttcagactatcaaaacctactgtctcaaattaccatcaagcgtaatgatactacccttctagaaattgtggaaaatctgaaaagaaagttaaggaatgaaacgttgacccaacaaactattattaacatcatgtcgaagcattacactataatctccaagctatacaaaaactttgctcagactcattattatcacgataataacaaagatatggaaaaaacgctatctttccaacgtttagaaagggttgaaccttttaagaatgaccaagaatttgaagcgtacttaaacaagttcattccaaatgattctccggatttgttaattttaaaaacctga

SEQ ID NO: 3616 - DNA, 612 bp, Saccharomyces pastorianus
atgtcattaattgccttctgtcaatttttaatgggagcatccatcacaacagcagtttccagacaagtttgggcattttcccgtgataatggtttgccgctatcaaagtacatcaaaaaagtggaccctaaatactccgttccattttatgctattttggctgcatgtgtatgttcattggttttggggctgctttgtttgattgatcaggctgctacaaatgcactgtttagtttagccgtggcaggtaataatttggcatggagcacccccaccgtcttgcgtttgacatcaggtaaagatttgttcagacctggtccattctatctaggtaagctttggtctcccatagttggttggataggtgtggctttccaagtgtttattattgttatggttatgttccccgctcaacaaaagggcattacaaagtccacgatgaattacacatgtgttattggtccaggtatttggattcttgcaggtatctattacaaggtttacaagaagaaatactatcatggcccagcaacgaatttatctgatgaagattacgttgatgccgttggtgttgatgttatcgacacaatcatttccaaacaagagccataa

SEQ ID NO: 3617 - DNA, 1083 bp, Saccharomyces pastorianus
atgacaccaataaggtcggtagaccagttgataggaagcggaatggattcttggaaggataaattcgcaaaggtgcaagttagagagtcagaactgccctcttctataccggcgcagaccggtttgacttttaatatatggtacagtaaatggtcccaagggttgggtgggaatacacgattcgtcagtccctttgctttgcagccgcaacctcattccgggaagactaggggtgacaatgacggcgagttgtttttctgtctctttttcgcaaagggtatgtgctgtcttggctccaaatgtcgctatctgcatcatatcccggacgaagatgatgtgagcaagctatctctaagaacagaagtgctggattgctttggtagagaaaaatttgccgattatagagatgatatgggtggggttggttcgttcaggaagaaaaataagacactctacgttggtggtattgatggcgcattgaatagtaagcaattaaagcctactcagattgaaagcagggtacggtttgtattttcccggttgggtgacatcgataggatacgatacgttgaggacaaaagttgcgcatttgtgaaatttaaacatcaagccagtgccgaatttgccaaagaggcaatgagtaaccagacgttgctactacacagtgataaggaatgggacgacagaaaggaaggaacagggctgctggtgaaatgggctaatgaggatcctgaccctgccgcgaaaaagaggcttttggaagaacagaaactagagtccctgaatatgatggtacgtctacttaacaaaagcaataacaatagtaccgataccacgcccagcaaagaagcgaagaaaagtccagttaagaagatatcgattggtttacctccaggagtaagcgttagtaactctaagaaaagatcactacccatagacaatggaatggggggtgatgactttatagaaagtttgaagaaattaaaaaagggtgctaccaatgtagatgattttccaacaaagtcatctgctagcttgtcaaatggccccttgatagactacctttcctccgatgaagattag

SEQ ID NO: 3618 - DNA, 471 bp, Saccharomyces pastorianus
atgggtaaggacagtaaggaacacaaggaaagcaaagaaagcaagacagtggacaactatgaggctagaatgcccgccatattgtcgtttgccaagccattggcttccaagaaactaaacaagaaagtgttgaagaccgtcaagaaggcctctaaagctaagaacgtcaagagaggtgtcaaggaagtcgtcaaggccctaagaaagggtgagaagggtttggttgtcattgccggtgacatttccccagccgacgttatctcccacatcccagtcttgtgtgaggaccattctgttccatatatcttcataccatccaagcaagatttgggtgctgctggtgccacaaagagacctacctctgttgtcttcattgtcccaggtagcaataagaagaaagatggaaagaacaaggaagaagaatacaaggaatctttcaacgaagtcgtcaaggaagttcaagctttgtga

SEQ ID NO: 3619 - DNA, 567 bp, Saccharomyces pastorianus
atgagtgaacaactttgctatacctatatagagaccgaggtcactggtgcacttttggtgttcaaagaacgaacgcaaagtctagtttttgcttcattaggcaaagatgaatcttttcttataacaaatttgaaagatttcttgaagaaaaatgagaagcaggatgtaaagcacgagttatatgagttgaaagacataggaaaatatggagagttgattgaaaactataaaatatgcctaggaaataagatgccgttaccgccagatgctattccctttgagttcctatttggaacgaaattccaacgtaaggtttggaacgaactattgaaagtggaacatggccatgttgctacatatggtgatattgccaaaaaaatagggaaaccatcggctgcgagatctattggaagagcatgtggcgcaaacaatttggcacttgtggtgccatgccatagaatcattggtagtaataagaagctaactggatataaatggagccttaatttgaaagaacaattgctaaataatgaaaggacatgtaaggtgaaacttaacgaggtatga

SEQ ID NO: 3620 - DNA, 1005 bp, Saccharomyces pastorianus
atgtacaagaaacagtatccatactcatatatcttcaaagattgttctccaaataataaaattctactaggtttccaattgtttacacgattaaatggtgttgacgccttcttatactactcaccgctaatactacaacaagttggtaggggagaaagaaaatctatctatttaaccggattaaatgccttggtatacactgtggcgactttagcatatttccccatggtacttcgaagacggaaggaaaagatgaacgtactattaggttctgtcattatgagtgttttattgttcaccttgtctttcacagattggtttcccaagactacaacgagatatatatcaatattattcgcagtatttcttcttacacactttatcagttgggattctactgggtggattatgaccattgagcttttaccccacttatcacaggccccagtaatactgctaatctctaacttttattggttctttaaatggtttgccagcctaataacacctatacttattgaccgtctttcttggaagttttaccttattccatctttatcttctttcatatccataatcttcgtgttacagaattttcctatcgagactcatgatgagaggctggaatctgctgatgattctgctggcaatgatagtgccaaccatgacgatgtttttggcgatagtggttctgaactttcatcctcgccttctttttctgcgtaccagataaatactttaggaagtagcattaaacaaaacaaccaagcatactcatcgactgaggccaacccagctatatccaaggataacggcataccgagtcagccggacggatctgcacaaaacgtttatttcattacatccgattctggaccatcaaggacgggtgaatttttcagtttccataataaaactgatccaacgattggaaatgttagcaatgctaatgaagagctctcaaacggggaacggaatccacctagcaacacggtggcagcttag

SEQ ID NO: 3621 - DNA, 1182 bp, Saccharomyces pastorianus
atgaaacatcccttaagcatgtcacgctcaaataaaccggttggtcaagaagctgctagttcggcacatatcgatagagcacaccagttggcacaagattttaacagcaaacaagatgatacggcactaacttcattgccacacaagaaccctgacatatttaggtttgagaataacatcacggcccatagctcacgtcgtggttcactttatagggatagtgatgccactgtcattttgccactctctgagcgctcccctagattgtcgatggacgatccataccgccaattattacaacaggctgaaatctcacagctacgaagcaagaaaacaagacattcgagtcggactcttcgagtctcctttatattatttgtggtgttggtttcgtcgttgtcagggctggaccagggtctcatttccggcaacgttatgacactatcgtttcaaaaattcttccattacccattaacctcttcattaggtatcattgtaagcgtcgttaacttcggagcctttatggcgtctttgtttgtttattctggtgtcttggaggtttatagcaggaagaaaatgctccaaataagcacaatgatatactctttgggcgcttttatccaagtttttgctctgaatcaatggtacctactatttggtagatttatacttggtgtgggtatggggtttgcattttccatgataatagtttatcaattcgagttccccctcccatatataagaaaaagaacgcttatttccattcagtgtgtttccaatgttgttgcgtattcattagggatttggattaactgtgcttttagatactggggttttgcatggaaataccccttatcgacacatgtgttcctgggggtagcgctaaacttgatgtcgttatacctagttttagaatcacccacttggctattaaagcaaaaaaaagatgtggaagcattagttttgatatcaaatatattcgatgattgcgactttgaagaaaatcaaagtcagttaaagttcagaactttgaaaagagacatgcttctaaaatcacatctacaaaaaaacagttatccatactcatatatcttcaaagatttttctccaataataaaaattctactaggtttccaattgtttaccgataaatggtgtgacgcctcttatcaatcacgctaa

SEQ ID NO: 3622 - DNA, 1119 bp, Saccharomyces pastorianus
atgaaaaaaacaagaacgatcacagtttttttgatcatgctcgagagagaaaaaaactgtgagtcactgtgcatttctgtcacatttcttaataatgtgacgatacaaatatatacacgtatatatataaatcatatctctaatcttggcgattggcatttggtctaccgaaactcatcacaccaaactaacctcaagtatccaaaaaaaggaaaaatggctcaaacagacaagaaacaatcaggattggctcgtcttttggggtctgcctctgcgggcatcatggaaattgctgttttccaccctgtggacaccatctccaagaggctgatgtccaaccacacgaagatctcttctaatcaagaactgaaccgtgttattttccgtgatcacttcagcgaacccttggggaagcgtctgtttactctgtttccgggtcttggctatgctgcatcttacaaagtgttgcaaagagtgtacaagtatggtggtcaaccttttgctaacgagtttttgaacaaacactacaagcaagatttcgatagcatgtttggcgaaaaaaccggtaaggcaatgagatccgcagctgctggttctttgattggtattggtgaaattgttcttttgccgctggatgtgctaaagatcaagagacaaacaaatcccgagtccttcaaaggtagaggttttatcaagatcttgaaagatgaaggtctgttcaacttgtatagaggttggggctggaccgctgctagaaatgcccccggttcgtttgcccttttcggtggtaatgcatttgccaaggaatacatcttgggcttggaagactactctcaagccacctggtcccaaaacttcgtttcctccatcgtcggtgcctgcgcttctttaatcgtttctgccccactggatgtcatcaagacaagaattcaaaatagaaatttcgacaaccctgaaagtgggctgaagattgtcaagaacaccttgaagaacgaaggtattactgcgtttttcaaaggtttgacgcctaaactactgacaacaggtccaaaattggtcttctcattcgcattggctcaatctttgatccccaaattcgataacttattgagcaaatag

SEQ ID NO: 3623 - DNA, 1665 bp, Saccharomyces pastorianus
atggatggatggaaagaaagacgaggatcaggacaagagcacatgtcagcaaaacgtggcgtggtagaccgtacaattgcatacggtgcgacggccaggagcgatccggagtcggactcatccctgagcgcagagggcgaagatgcagtggtaacgaaggatcatggcagtggcaaggtgcggaagaacacttcgttgaggaagatgaaaggcaagatcaaagacctccggtctttgatcagccgctaccaggagaacgagacattgctggtgtctagtaccaatataatgtcgggtgagatcatggactatgaaattcggctagcgggcttatatgggaaaatgaagagtatcatggacgagaactacgtgctgaaggagacccgagagaaccatgccgcagaggaaaggcaacctgccacaccgtcctcaaccgataaagaacacggcctcgaggagcgtgctttgctggttgagctgaagagagaggtctccgcaaagctaaaggactgcaaaagcatccaaaacacagtgaatgccaaactggatgagattcatgagttctatgagaaatactacggggagttcgaactaaagtttgctgatggggggttccagaaaggactggcggaagaactgggcaatgtaaagctagaattgaagaacgtgaggaaaaattcgcagatcaaagtgaacaacctgcaaatacagctgatcgaggcaaacaagtccctgaacctcttgaaaaaagacatcaaagtgaaggatgactgcctgaactgcatccccgaccttgtgaacaaaaccaacaacgcgattttatcatacaagaagagtatcgccaatcaaaaggaaaccattgaagccttacagaacgagttgtcgcgacagctggaaacgcaaggacaaatggcagcggagttgcacgcgcaaacacccaccaatgtgagtctaatagatccctttgatgaagtcgagcccaccatggatactaaaaccaaagagctgttagccactcaggaaaaggaacttcaagaactaaggttgctaaaaaacgtaaacgaccagaaacaccgcaccgatcagttgcatatagaaaaacagaataacgccattaagctgctgaagaaccatttacagtcattgatccagggacggcagccaccacagccgcatttctatccgttcccggtggaacataacattcagcaagtacgtaactggaaagctcccaagctgattcgcggtacgccaaatgaatcaacaaagccccctttgctcctgccacagcactcaaaacaccaggacagcaacgcagtcgccgtcgaaaccatcactggcacaaagggtagcggtgcccaactgctcctaacggcgccgcccaacaaacagtcgcggcctaaagacaagcttcgaatcggcttcaatttcaaccagttcccaaggccacaagaattttggcggcaacaaccacagatcctaaaccaaaattctccgagattatcgttgccaacaactccaaacgacgaactccaagaaaacacaaagaaagagagtctggcaaaagtaacgacggttgaatctaccacaccgaacacagcggcttctgatactaccaaggtattcaacttgacagatccaaccccgccttccgaaactacgtaa

SEQ ID NO: 3624 - DNA, 132 bp, Saccharomyces pastorianus
atgaaagaaaagaaatataaagaagctatggccgtccacgcggatatcgctacaaaccatgcccaagaaggtggtaactggctaacaggtgtaaagagattaatcggcatagccgaagctactctaaattaa

SEQ ID NO: 3625 - DNA, 3255 bp, Saccharomyces pastorianus
atggtcaaacttgctgagttttctcgaacagccacgttcacgtggtcacatgacaaaatcccattgttggtctctggcactgtgtcaggcaccgtggacgccaatttctccacggattcgtctctagagttgtggtctctgctgaccaccgactcggagaagcccgtggcctctttacaagtcgactctaaattcaatgacttggactggtctcataacaacaaaaccattgccggtgctctagataatggtactttggaattgtactctgtcggtgacgcccacgatactattgtctccacggccaagtttagcaaccattcttcctccgtgaagaccgtaaaattcaactctaagcaggacaacgttctagcctctggtggtaataatggcgaaattttcatctgggacatgaacaaatgcaccgaatctccctccagctacactcccttgaccccgggccaatcgatgtcgtctgttgacgaggtcaattccctggcgtggaaccaatctctggcccatgtcttcgcatctgccgggtcgtctaattttgcatctatttgggacttgaaggctaaaaaggaagtcatccatctaagttacacctcgcccaactcaggcatcaagcaacaactatctgttgtcgaatggcatccaaggaactccacaagagtggcaaccgctacgggcagtgataatgatccatctatccttgtctgggatttaagaaacgcaaacactcccttgcagactttgagccaaggtcatcaaaagggtattttatctctagactggtgccaccaagacgaaaacctgctgctgtccagtggcagagacaacaccgtgctactatggaaccctgaatcagctgaacaactgtctcagttcccaacccgtggtaattggtgtttcaagaccaagttcgcaccagaggctcccgatctatttgcctgtgcctcctttgacaataggattgaggttcaaactcttcaaaatctaacaaatactttggacgaacaagaatctgaaactaagcaacaagaatctgacactgatttctggaataatgtgtctcgagaggaatcgaaggagaaacctaccgttttccatttacaggctccatcttggtatggagaaccatccccagcggcccactgggcttttggtggtaaactggtccaaattacccccgacggtaagggtgtttccatcacaaaccctaaagtgtcaggtttagagccaaacaccgccctgagtgaagcattgaaatctaaggactttaaaccattgataaatcaaagattggttaaagttattgatgacgtcaacgaagaggactggaacttattggaaaagctatccatggatggcaccgacgagttcttaaaagaagcttttgcattcgacaacgatgactctgatgcgcaggattatgctgccagcgataaccaagatgacggcgaagagttcttccaacaaatggagaccaactttcaacccaagaacaacttcactttgactgataacatcgaacacaccatttctaagaatttgttttctggtaatatcaaaagcgcagtgaaaaactctttgaaaaatgacttgttaatggaggccatgattattgcattggactcgaatgatgaaagactgaaggaaagcgttaaaagtgcttacttcaccaagtatggctccaaatcatcattatcgagaatactatactccatctctcaaaagaaagtggacgacctggttgagaatctggatgtttcccaatggaaattaatttttaaggccatccaaaacttgcatccaaatgacgtaactcggaaaaatgaaatgttaatcaaattgggtgacaggttgaaggaaaacggtcatagacaagactcattgaccttgtacctggctgctggttcattagataaagtagcctcaatttggttggcagagttctcagatttagaagacaaattgaaagaggacagtaagacagcttatgaagcccattctgaatgcctaactgaattcattgagagattcaccgtcttctctagtttcatcaatggcaacatcaccatcaataatgaacaactgatttctaaatttttggaatttatcaatttgactacttccacaggtaattttgaactagccaccgaattcttgaacactctaccaagtgataacgaagaagttaaaacagagaaggcccgtgttttgactgcctctggtaaatccttggcagtgcaaaacgcaacagcaacagcaacaagaaagggcaaatacgcaaaccccaaggttaataagaacgttccggtacccccaacttctggaatgccatccactacgtctatttctggtatgcaaactccatattatggaatgacgccagccactggcgcgggtgctccaaaaccttatgtcccaactgtcactgcagctgttcctgttcatacagacggcaaatatgccccaccacaccaaccttcaatggcctcgccttttgctaacagaaccaatagctctacgagattaaactcgttcgctcctccacctaatccatatgctaccgcagcagcagcttcaacgacaaccacatcagctccaacatttccacaaaactcttttgctcccattcaacctggaatgcctatcatgaatgatttcaacgctcagtctagttccatccctccacattcaccaattaacgctgtatcgggtcaaacgccacacctcaaccgtaaggccaatgacggttggaatgatttaccattgaaggtcaaggaaagaccgtcccgtgctaaagctgtatccgttgcacctccaaatattctatcagctgcaacttcatcgaacggtgttcctacatatgctactaataccatgcctccacctccactttcaagagctctatcttctgtgtcaatggtatctccacctccacacaagtcgtctagagttccatcgttggttgcaacatctgagtcaccaagggtatctgtttcaaatccatatgctccctctcaatcaacacaacaaccccctgtaggaattccatctctaaaaagcccaactccaactcctattcaaccaccatcatctaacccatatgctcctccactacaaccaagagtagccacaccattgacttcaggtgtgcctccaacttctttaccaaaggcttccagtccatatgcgccagctgccgcagctcagccaaatggatcgtcctatccttcaaccaatgcataa

SEQ ID NO: 3626 - DNA, 486 bp, Saccharomyces pastorianus
atgaatgatatcaatgactacatggcgcgcttaatccacagcgattctgctgcaagcaataccacagacaaattgtccggtaaccaaagtacaattcgttaccacacagcttcatctcgttccgatagcaccgatgaagagactgattcgatggacctaggaaatggccttgctctgaatgcgtataacagaggaccgccttcaattttaatgaattccagcgatgatgaagatgagacatctgataccatgaatgcatgtggtgatttgagtgctacgcaagagcgcatggcacagtttgcccagagctatactaacaagaggagtggtccggtacctgaaactccatcttttgttttgcacagttctttccctgtgctggctcgtagtgattcgaaaccgtctgatgccgattacgaaactcctccttcaaacgaagaaagaatactgaagcattctgtaaaaggggacaatgattctgaatag

SEQ ID NO: 3627 - DNA, 1365 bp, Saccharomyces pastorianus
atgacggtactagactctggaaactggggattgacgcctgccatggaaacaggtctgttccagagaccacaagaccgtgtctttattatagagttggagaattccatagtgtcttttattaactcgaacactgaatcatttcaattgagaccattgaactcgtattacaggcttctgtcgcatcaaatagctgaatatcacaatttgaatcatgtcttggcaagaacgcaggacagttgtgtaattcttttcaaaggtgagaatttccaaaaaatagaaggcaaaccactactacaagaattacaacagagtaaatcagaagaacccgcttcttcaaatgagaatattgatagatcaaacaataacaaaacatttcgaattttgaaaaggaaagaggtacgtaacgataatgattccaaaacggataataatatagctacatccgataagttagcaacgaatcctgttagtagtcaaaaaatcgaaaacgatgataaatcaagtactgatttggaacaagagagaatcgagaaggaaagaatttatgagcagcgtaaacaggaaatttttgacaagcttaataataatgaagacgatggaaaatcaatcaatagtagcagtggtaatgatagtgacaatgaatggagtgattggttggacagtgatgatgctaatacccaaaccactaatggcacgccaagctccccatcgccatccaacccatacacaactatgcaacaaaacaagcctcgtcaacaattttatgatagtagaagagcaagaggaggaagaagaagagggacaggaaactataaagatacacatcgagggctaaaccgccggaacaaagaaaacggcggttaccaagggggatatgctacaccttatatggtatatccacccacccagataggaaacaacgctctaccaacctatccaatcgtgtataacccagcttctcctgcgccttcttccaatccttcgcctgtggttatgggcggaaacgcggtgttcatgaacccttatatctacaacatgaatccgcaaggatcatgttcttttggtgcccctgtgcccgtgtatcaatcataccagtaccaatatcaatatccatacaatcaatatcaaaatgggctatatagcaatacaccaggctataattctaatgcttataaaagctcttcagtaaacaagcataaccagtctcaaagaaaagacacaacgtcaaatgagggccctgaccacaacaaatatatcagcaatgagaagattcgtagcgggaatagcaaggacacaccgtcatcgaaagaagctaatttaatagaggtcaaatttgatcaattgagcattttttccaaaaaatga

SEQ ID NO: 3628 - DNA, 864 bp, Saccharomyces pastorianus
atgttacaggcagtcgagagagagctagaagatatgcagtgcaacacaagtatagaagagtgttcggatgagggcgagatcaccttcccatccttcagtcctgaggtggacactcagaacaggtttctgccaagaagtgagttcccctcagtgaggcaactggtcatctccaagcaaagaagcagacgtaagagggaaaataacgtatttgtagggaaaatggaggacgtgctcgtgaagtggagaccgcccgcgtcctcacatcgaggtgccatcgaggccataaacggcacgcatccgtaccagatggacacgcctcagtttcagtcgagaagatcggaccccttcggttcgacgaaaagagacgaatccgtgcgttcgattgtggaatccttcaccgactggtggaagcgcaattccaaggtgttcttccatagcgaagagcatgaagaggaggaagagggtgtgcactctgaggacggtgcgagtcggcacggccacgaattacagctgttcgaggaagatattttctccttccacttgagccccaacgacatgtccaccagaaacagcgaacaccaaatacagacgccagtgctcttcccctacgaaacgcccacgaggacaacagcgaaccccacgaaacgacaagccatcgacctcggggacggtgaagagctgaccatctatcgggagatctactcaaatccgattcctgttagctatctagataccttgaacttgaaccaatcgatgtctttgcgacaaatgcagcagcagcagcagcaagcagagccctcttctgcatggcagtactgcgcggactctaactggattaagatctttctttgccacaacgactag

SEQ ID NO: 3629 - DNA, 1854 bp, Saccharomyces pastorianus
atggctggtgcaattgaaaacgctcgtaaggaaataaaaagaatctcactggaagaccacgctgaatctgaatatggttccatctactctgtctctggtccggtcgtcattgctgaaaacatgattggctgtgccatgtacgaattggtcaaggtcggtcacgacaacctggtgggtgaagttattagaatcgacggtgataaagccaccattcaagtctatgaagaaactgctggtcttacggtcggtgaccctgttttgagaacaggtaagcctttgtcggtggaattgggtcctggtttgatggaaactatctatgacggtattcaaagacctttgaaagccattaaggaagaatcgcaatcgatttacattccaagaggtattgataccccatctttggacagaaccatcaaatggcaattcactccaggtaagttccaagtcggtgaccatatctctggtggtgacatttacggttccgttttcgaaaattccctgatttcgagccataagattcttttgccaccaagatctagaggtaccatcacctggattgctccagctggtgaatacactttggatgaaaaaattttggaagtcgaatttgacggcaagaaatctgatttcactctttaccacacttggccggtccgtgttccaagaccagtcaccgaaaaattatctgccgattatcctttgttgacaggccaaagagttttagacgctttgttcccttgtgttcaaggtggtacgacatgtattccaggtgcctttggttgtggtaagacagttatctctcagtccttatcaaagtactctaattctgacgctattatctacgtcggttgtggtgaacgtggtaatgaaatggcagaagtcttgatggaattccctgaattatacactgaaatgagtggtactaaagaaccaatcatgaagcgtactactttggttgctaacacatctaacatgcctgttgctgccagagaagcttccatatacactggtatcacacttgcagaatacttcagagatcaaggtaagaacgtctctatgattgctgactcttcttcaagatgggctgaagctttaagagaaatttctggtcgtttgggtgaaatgcctgctgatcaaggtttcccagcttatttgggtgctaaactagcttccttttatgaaagagctggtaaagctgttgctttgggttctccagatcgtattggttctgtttccattgttgctgctgtttctccagccggtggtgatttctcagatcctgttactacagctactttgggtatcactcaagtcttttggggtttggataagaaattggctcaaagaaagcatttcccatctatcaacacatctgtctcttactctaagtacaccactgttttgaacaagttttacgattccgattatcctgaattccctgtcttgagagatcgtatgaaggaaattttgtctaacgctgaagaattggaacaagtcgtccaattggttggtaagtctgctttatccgatagtgacaagattaccttggatgttgctgctttggttaaggaagatttcttacaacaaaatggttactctacctacgacgctttctgtccaatttggaagacctatgatatgatgagagcattcattgcatatcatgacgaagctcaaaaagctgttgctaatggtgccaactggtcaaaattagcagactctactagtgatgttaaacattccgtttcttcatctaaattttttgaaccaagtaggggtgaaaaagaagtgcatggcgatttcgaaaagttgttgagcactatgcaagaaagatttgctgaatctaccgattaa

SEQ ID NO: 3630 - DNA, 300 bp, Saccharomyces pastorianus
atgaagaggtatatccacttcgccaacagattgacgggctggaacgccatcaaggccagagtagaccagctgaacctgaatctgacagactcccaggtcaaggagatcaccgcaaagatcaagaagctgggcgacgtgagggccttgaacatcgacgacgtcgactccatcatcaagaacttccacgctgaggtcaccaccccgcaactacagtctgcaagaaagaacaagcaagaagacagcgacgttccagcactcaactctgtcccggccgccaagcgggccaagccgaccgtttaa

SEQ ID NO: 3631 - DNA, 1281 bp, Saccharomyces pastorianus
atgactgctgctaaaccaaatccatatgctgccaagccaggtgactatctctccaacgtaaataatttccaactgattgattcgaccctaagagagggtgagcaatttgccaatgcgttctttgacactgaaaagaagattgaaattgccaaggccttggacgacttcggtgtggactacatcgagttgacctctcccgtggcctccgaacaatccaagaaggactgtgaagccatctgtaaactaggattgaaggccaagatcctaacgcatatccgttgtcacatggacgatgccagagttgccgtggagaccggtgtcgacggtgtcgatgtggttatcggcacttccaagttcttgagacagtattcccacggtaaagacatgaactacattgccaagagtgccgtcgaagtcattgagttcgtcaaatccaagggtattgaaatcagattctcttcggaagattcgttcagaagtgacttggtcgacctgttgaacatttacaagaccgttgacaagatcggtgtaaatagagtcggtattgccgatactgttgggtgtgccaacccaagacaagtgtacgaacttatcagaactttgaagagtgtggtttcctgtgacatcgaatgtcatttccataatgataccggttgcgccattgccaacgcctacactgccttggagggtggtgctaggttgatcgatgtcagtgtgctgggtattggtgaaagaaacggtatcactccactcggtgggctaatggcaagaatgatcgtagccgcccctgaatacgtcaagtccaaatacaagttgcataagatcagagacatcgaaaacctggtagcagatgctgtggaggtcaacattccattcaacaaccctatcactgggttctgtgcattcacacacaaggctggtatccacgccaaggccattctagcgaatccttccacttacgaaatcttggacccacatgatttcggtatgaagaggtatatccacttcgccaacaggttgactggttggaatgctattaaatcaagagttgaccaattgaatttgaatctaacagacactcaagttaaggaggtcactgttaagatcaagaagttgggtgacgtaagaccgctaaatatcgatgatgtagactctattatcaaggatttccacgctgagttaggcactccaattttgaaaccaataaataagggcattgatgaaggagatttaggaaattccaatgggcatgcatctaaaaaagttaaaacttccaaataa

SEQ ID NO: 3632 - DNA, 900 bp, Saccharomyces pastorianus
atgcccaatggtcaaatcgttaatagtatgcattccatgagaaaggacaacaccggttatgacttaaaacagctattcatcggctctgaaggtactattggtatcattactggtgtttcggtcttgacggtacctaagccaaaggcttttaatgtctcctacttggctgttgagagcttcgaagatgttcaaaaagtatttgttagagccagacaggagttatctgaaattttatcagcttttgagttcatggattccaaatctcaaatattagccaagagtcaattgaaagatgccgctttccccttagaagacgagcatccattttatattcttattgagacatcaggatcaaacaaagatcacgatgacgctaaacttgaatcattcttagaaagcgtcatggaagaaggcgtagtaacagatggtgtggtggcacaagatgaaactgagctgcaaaacttatggaaatggagagaaatgattccagaggcaagccaagctaatggtggtgtttacaaatacgatgtttctctacctttaaaggatctatactctttggttgacgccaccaatgccaggctatctgaagctggattggttggagattcacccaaacctgtcgtaggtgccattgggtatggccatgtgggggatggtaatctacatttaaacgttgctgttagagaatacaacaaggaaattgagaatgctttagaaccatttgtttatgaattcgtttcctcaaagcatggttccgtgagtgctgagcatggtttaggtttccagaagaaaaattacattggttattccaagagtcctgaagaaattagaatgataaaggatttaaaagcacactatgaccctaatgctattctaaacccttacaaatacgtttga

SEQ ID NO: 3633 - DNA, 582 bp, Saccharomyces pastorianus
atgctgagaaacattttggtgagaagcgctggcaaccatctgaaatacggttgcagatatgtgaaatcatcagctctcttagggcgtaagacaaaagtcaaatactattccactaagatacaaacaagactaaccagcgagaactacccagacgtgaaaagagacccgagattcaagaaactgacttctgatgatctgaactatttcaagtccattttgtcagagcaggaagtattacaaggcaatgagttggaggacctgtcattctataatgaagattggatgagaaaatataaaggtcaatccaagttagttttgaggcctaaaaccgtggaaaaagtctcactgattttgaattattgtaatgatgaaaaaattgctgttgtaccacaaggtggtaacaccggactggtaggtgggtcagtacccatttttgacgagctgattctgtcattagccaacttgaacaaaataagacatttcgaccctgtgtcaggcatcttaaagtgtgatgccggtgttatcttggagaatgctaataatcacgtaatggagcaaaattatatgttcccctggatttag

SEQ ID NO: 3634 - DNA, 90 bp, Saccharomyces pastorianus
atgtttcctgctccgcctctaccaacaacaatgggcgctgccttgctgctaccgttgttcggagtcgacatggcagaatgcatggactga

SEQ ID NO: 3635 - DNA, 372 bp, Saccharomyces pastorianus
atgttatctcaagtaaacatggatttcaaagagttgaagaatccggatttcttcttcttcttctttttctcgtctttgctcttgttattcttcgtatcaccatcatcctcgtcgtcgtcgtcggagttgtggtgtatggtattcctgctcgacttgggtgagattatattccctgcgccgcccctgccgatggcgaatttttccggcgtgcttttgatcttatgcttgcttttgagtttcttggacgaggacttgatagcagacacagcattgccattcgaagtcaccacgaacaggttattatcgttcgcgttgatcgtgtcctcgtcttcgcccacgccatcaccgctaccgtctcttatcgcatcctga

SEQ ID NO: 3636 - DNA, 4605 bp, Saccharomyces pastorianus
  modified_base (12)..(13): a, c, g, t, unknown, or other
  modified_base (29)..(30): a, c, g, t, unknown, or other
  modified_base (44)..(45): a, c, g, t, unknown, or other
  modified_base (55)..(56): a, c, g, t, unknown, or other
  modified_base (65)..(66): a, c, g, t, unknown, or other
  modified_base (78)..(79): a, c, g, t, unknown, or other
  modified_base (92)..(93): a, c, g, t, unknown, or other
  modified_base (104)..(105): a, c, g, t, unknown, or other
  modified_base (121)..(121): a, c, g, t, unknown, or other
  modified_base (125)..(126): a, c, g, t, unknown, or other
atgaattccaanngctttgaaaaacattnngaagccgcttatcnncatcttggtnnccatagctnngaaatcgatatnntacttttgataannaagcgagggcnnctgttaggatacacanaatnnacaattgacagaattactaagctagccagtgaagcaattgatgatggtaaaaaaattctaataatttcagatagaagaatgggtcctaaccgtgtttccatttcatctttgattgcagtttcttccattcatcatcatttgatcagaaataaacaacgttcccaagttgctcttattttagaaaccggtgaagctagagaaattcatcatttctgtgtcctattaggttacggttgtgacggtattcatccatacctggcaatggaaactttggtaagaatgaacaaagaaggcttgctccgtaatgtcaacaatgacaatgacaccattgaagaggaagaaatactggaaaactacaagcacgctgttgatgcgggtatcctgaaagtgatgtccaagatgggtatttccactttggcatcttacaagggtgctcaaatttttgaagcccttggtctagataactctatcgttgatttgtgtttcacaggtacttcttccagaattagaggtgtcacttttgagtacttggctcaagatgtattttccttacatgaacgtggttatccatccagaaaaacgatcggcagatctgttaacctaccagaaagtggtgaatatcattatagagatggtggttataagcatgttaatgaaccaactgccatcgcttcgttacaagatactgttagaaacaaaaatgacgtttcctggcaattatatgtcaagaaggaaatggaagcaattagagattgtactttaagagggttattggaattggattttgaaagttccagtagtatcccattagaacaggttgaaccatggactgaaattgctagaagatttgcatcaggtgctatgtcttatggttccatttctatggaagctcattccacattggccattgctatgaaccgtttaggtgccaaatccaattgtggtgaaggtggtgaagatgcagaacgttctgccgttcaagataacggtgacactatgagatctgccatcaaacaagttgcttccgccagatttggtgtgacatcttactacttgtctgatgctgatgaaattcaaatcaagattgcccagggtgctaaaccaggtgaaggtggtgagctaccagctcataaagtatccaaggatattgccaagaccagacattccactccaaatgttggtttaatctcccctccccctcatcatgatatttattccattgaagatttgaaacaacttatttatgacttaaaatgtgctaacccaagagccggaatctctgtaaaattggtttccgaagttggtgttggtattgttgcttctggtgtagccaaagctaaagctgaccatatcttggtttcaggccatgatggtggtacgggtgctgctagatggacaagtgtcaaatacgcaggtttgccatgggaattaggtttagccgaaactcatcaaactttggttttaaatgatttgagacgtaacgtcgttgttcaaactgatggccaattgagaaccgggtttgatattgccgttgctgttttattgggtgctgaatcctttactttggccactgttccattaatagccatggggtgtatcatgttaagaagatgtcacttgaactcttgcgctgttggtattgccacgcaagatccatatttgagaagtaagtttaagggccaacctgaacacgttattaactttttctattatttgattcaagacttgagacagataatggccaaattgggtttccgtactatcgatgaaatggttggtcactctgagaaattaaagaaaagagatgacgtaaattctaaagccataaatatcgacttatctcctattttgaccccagcacatgttattcgtccaggtgttccaactaaattcaccaagaaacaagaccacaaacttcatacccgtttagataacaagctaatcgatgaggcagaagttactttggatcgtggtttaccagtgaatattgacgcttctataattaacactgatcgtgcattaggttctactttgtcttacagaatctctaaaaaattcggtgaggaaggtctgcccaaggatactgttgtcgtcaacatagaaggttctgcaggtcaatcattcggtgctttcttagcttctggtatcactttcattttgaatggtgatgcaaatgattatgttggtaaaggtttatctggtggtatcattgtcatcaagcctccaaaggactccaaattcaagagtgacgaaaacgtgattgttggtaacacctgtttctatggtgctacttctggtactgcgttcatttcaggtagtgctggtgaacgtttcggtgttagaaactctggtgctaccattgttgtggaaagaattaagggtaacaacgcctttgaatatatgactggtggtagagctatcgtcttatcacaaatggaatcattgaacgcattttctggtgccaccggtggtattgcatactgtctaacttccgatcatgatgattttgttggtaagatcaacagagatactgtcgaattagaatccttgtgtgatccagtggaaattgcttttgtgaagaacttgatcaaagaacattggaactatacgcaatctgacttagcatctaggattcttggtaatttcaaccattatttgaaggactttgttaaagtcattccaaccgactacaagaaggttttattaaaggaaaaatccgaaattgctgaggccaaagccaaggcaacttctgaatacttgaagaaatttagatcagcacaagagattgacgatgaagttaacactttactgattgcaaaccagagagccaaagaacaagagaagaaaaagagtatcagtatttctaacaaggccactttgaaagaacctaaagttgttgatttggaagatgcagttccagacaccaagcagctggagaaaaacagcgaaagagttgaaaaaactcgtgggtttatggttcataagcgtcgtcacgaaacttacagagatccaaaaaagagagtcgatgactggaaagaattcaccaatccaattaccaaaaaagatgctaagtaccaaaccgctagatgtatggattgtggtacaccattttgtttatctgatacaggttgtcctctatctaacatcatccccaagttcaacgaattactgttcaagaaccaatggaaactagctcttgacaaactgttggagactaacaatttccctgaattcactgggagagtgtgtccagcaccttgtgagggagcttgtacactaggtatcattgaagacccagtgggtatcaagtcgattgaaagaatcatcattgacaatgcattcaaagaaggatggattaaaccatgtccaccaaacacacgcactggattcacagtgggtgtcattggttccggtccagcaggtttagcatgtgctgatatgctgaatcgtgccggacacaaggccacagtttatgaaagatcagaccgttgtggtgggttattgatgtatggtattccaaacatgaagctagataagactatcgtgcaacgccgtattgatttattggcggatgaaggtgtcgaatttgtcaccaacacagaaatcggtaagaacatgagcatggacgagttgaagagcaagcacaatgcagtggtctacgctatcgggtctaccatcccacgtgacctaaccatcaagggacgtgaattgaagaacatcgattttgccatgcagttgttggaatctaacacaaaggccttgttggaaagggacctggaaatgatccgtgaaaagatccagggcaaaaaagtgattgttgttggtggtggtgacacaggtaatgactgtctgggtacatcagtgagacacggtgcggcctccgttctaaatttcgaactgttgcccgaaccaccagtggaacgttccaaggacaatccatggcctcagtggccacgtgtgatgagagtggactacggtcatgcggaagtgaaggagcattacggcagagatcctcgtgaatactgcatcctgtccaaggaattcatcggcaacgacaacggcgaagtgaccgccatcagaacagtacgcgtggaatggaagaagtcccaaagtggcgtatggcaaatggtggaaatccccaacagcgaagagatctttgaggccgacatcatcctgttatcaatggggttcgtggggcctgaactaaccaacggcaacgaaagcgaggtgaagaagaccagacgtggcaccattgccacgctcgacgactcgtcgtacaacatcgccgggggcaagacatttgcgtgcggtgactgtagaagaggacagtcactaattgtttgggccatccaggaaggtagaaagtgtgctgcctccgtcgacaagttcctgatggacggtaccacgtacctgccaagcaacggtggtatcgtgcaacgtgattacaaactgttgaaagaactagccagtcaagtttag

SEQ ID NO: 3637 - DNA, 2406 bp, Saccharomyces pastorianus
atgccagtgttgaaatccgacaatttcgatccattgcaggaagcttatgaaggcggctccattcaaaactataacgatgaccaccatcttcataaatcttgggcaaatgtgatcccggacaaacgcgggctttacgaccctgactacgaacacgatgcctgtggtgttggtttcgtggccaataagcatggtgaacagtctcacaagattgtcacagacgctagatatcttttagtcaacatgacacatcgtggtgccgtttcctcagatggaaatggtgacggtgcaggtatcctgctaggtattcctcatgaatttatgaaaagagaatttaagttggatcttggtctagacatcccagagttgggcaaatacgctgtgggtaatgtttttttcaagaagagcgaaaaaaataataagaaaagtctggtaaaatgccagaagatctttgaagatttagctgcatcttttaacttatcggtattaggttggagaaaagtgcctgtagactccaccattttgggtgacgttgctttgtctcgtgaaccaaccactctacaaccgatcgtggtcccattatacgacgaagaacaaccagagttcaatgaaacccaattcagaactcaattatatctgctaagaaaggaggcctcccttgaaataggtctagagaactggttttatgtctgttctttaaataatactaccattgtttacaagggtcagttgaccccagctcaagtgtataactactacccagatttgacgaatgcgcatttcaaatctcatatggcgttggtccattcaagattctccacaaacactttcccctcttgggacagagctcaacctttacgttggctcgctcataatggtgaaatcaacaccttaagaggtaacaagaactggatgcgctccagggaaggtgtgatgaattccccaacattcaaagataaactggataaactttacccaattatcgaagaaggtgggtccgactctgctgcattggataacgtcttagaattgttgaccataaacggcactttatctcttcctgaagccgttatgatgatggtccctgaagcttaccacaaggatatggactctgacttaaaggcttggtacgattgggctgcatgtttgatggaaccttgggatggtccagctttgctgactttcactgacggtcgttactgtggtgctatattggatagaaatgggttaaggccttgtcgttactacattaccagtgatgacagaatcatctgtgcttccgaagtgggtgtcatcccaatcgaaaactcactggttgttcaaaagggtaaattgaaaccaggtgatttatttttggtggacactcaattaggtgagttggttgacactaaaaaattgaaatctcaattgtccaagagacaagatttcaagtcctggttatcaaaggttatcaaattggatgacctactctcgaagacggccaatttagtggccaaagagtttataccgcatgattctctctctttgaaagttcaaagcgacccacgtttgttagccaatggttacacctttgaacaagtttccttcttgttaactccaatggctttgacaggtaaggaagccttaggttccatgggtaacgatgctccactagcctgtttaaacgaaaaccctgtcttactttatgattactttagacagttgtttgcccaagtgactaacccaccaatcgatccaattcgtgaagcaaatgttatgtcattagaatgttacgtaggtcctcaaggtaatcttttagaaatgcatgcatctcaatgtgaccgtttattgttaaagtcccctatcttacattggaatgaattccaagctttgaaaaacattgaagccgcttatccatcttggtccatagctgaaatcgatattacttttgataaaagcgagggcctgttaggatacacaaatacaattgacagaattactaagctagccagtgaagcaattgatgatggtaaaaaaattctaataatttcagatagaagaatgggtcctaaccgtgtttccatttcatctttgattgcagtttcttccattcatcatcatttgatcagaaataaacaacgttcccaagttgctcttattttagaaaccggtgaagctagagaaattcatcatttctgtgtcctattaggttacggttgtgacggtattcatccatacctggcaatggaaactttggtaagaatgaacaaagaaggcttgctccgtaatgtcaacaatgacaatgacaccattgaagaggaagaaatactggaaaactacaagcacgctgttgatgcgggtatcctgaaagtgatgtccaagatgggtatttccactttggcatcttacaagggttgctcaaatttctga

SEQ ID NO: 3638 - DNA, 120 bp, Saccharomyces pastorianus
  modified_base (112)..(113): a, c, g, t, unknown, or other
atgtcattagaatgttacgtaggtcctcaaggtaatcttttagaaatgcatgcatctcaatgtgaccgtttattgttaaagtcccctatcttacattggaatgaattccaanngctttga

SEQ ID NO: 3639 - DNA, 342 bp, Saccharomyces pastorianus
  modified_base (28)..(77): a, c, g, t, unknown, or other
atgcatcaacgattggaacaggggccannnnnnnnnnnnnnnnnnnnnnnnnnnnnnnnnnnnnnnnnnnnnnnnnntagcagtaatagcactgttattaataataatggtggtaataatggtaataatggcgtcgacgggaaagataacaaagttcatgatattagtttgatggagtttgtatcaacaccgttatctatggcagcaaagtcaatgaaggagggagatgggagtgtgaactcgttcaacgagtataaaagtaataaggcaaatgttaatttttctaatgttaataatagtactgctttcgggaatggttttaatggttcagcacgttggtga

SEQ ID NO: 3640 - DNA, 1869 bp, Saccharomyces pastorianus
  modified_base (1817)..(1866): a, c, g, t, unknown, or other
atgcactatgtggtactagagctgcaagtcgcccacctgccagacagccccaaggatcagtgtcgcattgtaaatatggcataccaaattgtggacgctgaaacgttggcaagtcattttcagaacgattcgtcacccagcatcgagatagatgcggaggagaaaagtctggagagcgcaatggtgcaattggataaagatatccaggacataattggtaacgatgaatttgtccttgtctctctgtgttcgacttggcacattcgtgtcactttaccacgtcaagctcgagatgatggcttcatccttacttcttacttacaacatccaaggctgttcgatttatggaaggagtttgagagatggtgcgttaatcatcctgaaattatgggattaaggaaaaacattctgaataataattctaatactaagagtagcagcatcggtactctaatcaaaaatacaaaggatttgaacgaaatgatgagaatgttggatgttccaaatgttgcggaagaagacgatttcgccctagacaagcaatcttttttgcagagaacaatagatatacttttacaactacacagaaagtgctcttccgcagaagatatgaaatgcgtactgacgcaaccatatgattcacataccgatatcagaagtttcttgcaagaaagatctaaggtcttgtacatgaacaatttaccacctgacacaacccagagcgaattggaatcatggttcacccagtatggagcaagacctgttggattttggactgtgaaaaacattgtggaagacacgtccaatgttaataataactggagtttgaacaacagtccctatgtggaagatcaggatagcatttctgggttcgttgtattccagactcacgaagaagctactgaagtacttgcattgaatggtagatcgatattatctaatttagcaaatactaagcaaccgagagtagtggaacatgtccttgaactccagccgtcttccactagggtgctcgataaagcgcaagagattctatctcctttcccacaaagtaaaaataaaccaagaccaggtgactggaattgtccatcttgtggattttcaaatttccaaaggcgtactgcttgtttcagatgttctttcccagctccatcgaacagtcaaatgcataatgtgatcacaaacaataatgctaatagcaacaaaaacagcttaaacaaccgcaccaattccggtggtttgaataacaataataacataaccgggaaccattcttatggtactcccgagttaaatatgatgggtagtacaacaccaacagcactaacctacaatagaactcaattctcctcaatgacaccgttgtctcgacaaaactcattaaacttaactccatcaagtagtgggtcacccataaatacgccgaatagctttgtagcaagtaacaatgctgtgccaaattatcgttataccaacaacatgactaacaataacaacaataacagcagcaatatgaataacatgaacgttaatagaaataatggcaatatgaatattaatgtcaatggtaacggtaatggcaatggcaatgggaacaacgttaatagtaataatggcggtaattctaatatcggtatgggaggatcaggatctaatataccatttagagcaggagattggaaatgttccacgtgtacctatcacaattttgcaaaaaacgtggtatgcttacgctgtggtggtcctaaatctgtaaacgctgatgcaaatgaaacaaaccattatatagatgcatcaacgattggaacaggggccannnnnnnnnnnnnnnnnnnnnnnnnnnnnnnnnnnnnnnnnnnnnnnnnntag

SEQ ID NO: 3641 - DNA, 216 bp, Saccharomyces pastorianus
atgccgctttcaagcttgtgtttggtggccttctcaggagacgaagagcctcctggcggcttattcttcatggacgtgaagaacctagccaaagtagcctgttttggtttcttaccggcagaggaaggtaatgaggatgacatgaatagcagcgatcttggactcgagagacgtaaaggtgtgaaagtgaggccagccagtgatctgcgcatgtaa

SEQ ID NO: 3642 - DNA, 324 bp, Saccharomyces pastorianus
atgtatatccaaaatgatgttcgaactcagatcaatgcaggaagaaaaagggaaaccattagtgtatgtatggatgagatgatgttatccaaagaggcaataatagaaatcttaagccagaacaatggtagcaagaatataaaaatcgctgatgaagtgatactgatgatacaaaaatatttggatattttcattgaagaggcggcgttgcgatcactgcaatcccacaaagattctcctgaagcccacgatgacggtgggcctttcgaattatcgcatttggatctagagcgtatagttggtctactgctaatggacatgtag

SEQ ID NO: 3643 - DNA, 207 bp, Saccharomyces pastorianus
  modified_base (14)..(14): a, c, g, t, unknown, or other
gtcgattatgaatngttacaccacgaccttatactaaaatatgcaacagcatccaaagacgataaattcagacactggtgtaaaaagattaaatccaagataaaggaggataagaatttaaaaagagaagccttagaacgtgctaaactggaaaagagacaatgtgaaaaatcaacaaatttgaacactccaaatacaagcacatag

SEQ ID NO: 3644 - DNA, 1104 bp, Saccharomyces pastorianus
atgttactgccgcccttggaggaaagcctgtcgccaaccactgcggatttgaaggatacgttatcgggaaactcaagtgataactatattcaactacaggatttggttcaattggggaaaatcggcgctgggaactcaggaactgtagtgaaagcattacacgttcctgattctaaaatcgtggccaagaagaccattcctgtggaacagaacaatagtaccattatcaaccaattagtcagggagttatccattgtcaaaaatgtcaagcctcacgaaaacattattaccttctatggtgcatattacaatcagcatataaacaacgaaatcatcatattgatggaatattcagactgtggttctttagataagatattatctgtttataaaaggtttgtccaaagaggaacagtttcgaataaaaaaacttggtttaacgaacttaccatatcaaagatatcacatggcgtgcttaacgggttggaccatctgtatcgacagtataagattattcaccgtgatattaagccttccaatgttctgattaatagtaaagggcagatcaaattatgtgattttggcgtttccaaaaaactagtaaactctatagctgatacatttgttgggacatccacttacatgtcgcccgagaggatacaagggaatgtttactccatcaagggagacgtctggtcgttggggttgatgatcatcgagttggtaaccggggagtttcccttaggtgggcataacgacacacccgatggtatactagatctactacagaggattgttaatgagccttcaccgaggttacccaaggatcgcgttttctccaaagaactgacagatttcgttaatagatgttgtatcaagaacgaaagggagagatcgtcgattaatgaattgttacaccacgaccttatactaaaatatgcaacagcatccaaagacgataaattcagacactggtgtaaaaagattaaatccaagataaaggaggataagaatttaaaaagagaagccttagaacgtgctaaactggaaaagagacaatgtgaaaaatcaacaaatttgaacactccaaatacaagcacatag

SEQ ID NO: 3645 - DNA, 231 bp, Saccharomyces pastorianus
atgtttcaacggaaaactttacaaagacgaaatttgaaggggcttaatctgaacctacaggcagatttggtcagcaatggcgaaatgcaggaaaagacagaggctcaccaacgaccctctcgaatagaaggccagttgatgtccaatatcaacgcggtacaaaacaacagtaatttgtacttgcgaagaggcataaaaaaaaaaactgacgctggatgcatctgtaaatga

SEQ ID NO: 3646 - DNA, 195 bp, Saccharomyces pastorianus
atgttacaccacgaccttatactaaaatatgcaacagcatccaaagacgataaattcagacactggtgtaaaaagattaaatccaagataaaggaggataagaatttaaaaagagaagccttagaacgtgctaaactggaaaagagacaatgtgaaaaatcaacaaatttgaacactccaaatacaagcacatag

SEQ ID NO: 3647 - DNA, 147 bp, Saccharomyces pastorianus
atggataactccctgactaattggttgataatggtactattgttctgttccacaggaatggtcttcttggccacgattttagaatcaggaacgtgtaatgctttcactacagttcctgagttcccagcgccgattttccccaattga

SEQ ID NO: 3648 - DNA, 564 bp, Saccharomyces pastorianus
  modified_base (17)..(50): a, c, g, t, unknown, or other
atgaatacatttagagnnnnnnnnnnnnnnnnnnnnnnnnnnnnnnnnnntttacataatatgaagagtctatatataaatgtaggtatgaaaggagctagaagaaacgaaagggaaaacctgatatgtttctatgtgcttgtatttggagtgttcaaatttgttgatttttcacattgtctcttttccagtttagcacgttctaaggcttctctttttaaattcttatcctcctttatcttggatttaatctttttacaccagtgtctgaatttatcgtctttggatgctgttgcatattttagtataaggtcgtggtgtaacaattcattaatcgacgatctctccctttcgttcttgatacaacatctattaacgaaatctgtcagttctttggagaaaacgcgatccttgggtaacctcggtgaaggctcattaacaatcctctgtagtagatctagtataccatcgggtgtgtcgttatgcccacctaagggaaactccccggttaccaactcgatgatcatcaaccccaacgaccagacgtctcccttgatggagtaa

SEQ ID NO: 3649 - DNA, 333 bp, Saccharomyces pastorianus
  modified_base (17)..(50): a, c, g, t, unknown, or other
  modified_base (325)..(325): a, c, g, t, unknown, or other
atgaatacatttagagnnnnnnnnnnnnnnnnnnnnnnnnnnnnnnnnnntttacataatatgaagagtctatatataaatgtaggtatgaaaggagctagaagaaacgaaagggaaaacctgatatgtttctatgtgcttgtatttggagtgttcaaatttgttgatttttcacattgtctcttttccagtttagcacgttctaaggcttctctttttaaattcttatcctcctttatcttggatttaatctttttacaccagtgtctgaatttatcgtctttggatgctgttgcatattttagtataaggtcgtggtgtaacnattcataa

SEQ ID NO: 3650 - DNA, 144 bp, Saccharomyces pastorianus
caatggtggaagctaactttacgtagctttggtgggttattgatagcctttgggctcgtccgaggtaccgaaggttggttgtggcataaaaataaagaatataagaattacaagaaactagctaacggtgaaagcacggactag

SEQ ID NO: 3651 - DNA, 129 bp, Saccharomyces pastorianus
ccactgcccacaccactgtcctgcgtggtcagttggcacccactgcagaactggatcgccggtgggaactccagtggcaagatcttcctcttctccgatgactcgcaggccataaagcaggaacaataa

SEQ ID NO: 3652 - DNA, 1515 bp, Saccharomyces pastorianus
atgcctgagctaacagagttccaaagaaagcgtcaagagaacattaaaaggaataatgatttactaaagaaacttcatcttttaggggtggcatctcaaatcaaacatgaggccggtgtggtagacagagccaaggctcccgtcaaaaagaaacaaaagacgactagtaccagggcgaaaaagtctgctagtccttctttacctaccagaagatcaagaagactgaggggagaggctgcagataataccaaaggaatacctgacttgaacgataaccaattgctcaagatgggctctcccgatggccatgacaagactttcatcgacgaaatgaaagaaaaaccggtaattggagatgtaaaattgagtgacttgataaaggatgaaaaagaggatgcccttttggagaagttcaagagattcaacaatggcagtttttcatctggcgatttttttgacgaaataaaaaagaggcaaggggatgtcgtgggcatggacgaatttgatttggatttgtacgatgtttttcaacctaatgagatcaaggtcacttacgaaaggatctcagccacatacttccatcctgccgtagaaaagaagctgatcattgcaggtgacaccggtggcaccgtcggcttttggaacgtgagagatgaacccctgggtgatagtgaagaagatcgaatggaagagcctgatatcaccagggtgaaactgttcacgaagaacgtcggccgtattgattgcttcccaacaaatacatcaaaaattctgctgacctcgtatgacgggagcatcaggtctgttcacctgaacaatttaaaaagcgaagaggtgctcactttgaaaaatgaatatgatgatcctctaggaatcagcgattgccagtttagttacgagaacccgcatgttttgttccttactacactgggtggtgaatttaccacttttgacacgagagcaaaaacttcagagtacaaactgcgaagactggccgacaagaagatagggtctatggccataaacccgctaaggccctacgagattgccaccgggtctctcgacagaacactcaagatctgggacacgagaaaccttgtggagaagccggagtggtctcaatacgaagaccaccccagccacgaaatcgtttccacctacgactcgaggttaagcgtctctgcggtgtcgtactccccgacagacgggaccctggtatgcaacggctacgatgacactgtccgtctgttcgacgtcaagagcagtgatagcctcgtcacagacctgcagcccaaattgaccatccagcacaactgccaaacggggagatggaccagcatccttaaggccagattcaagccgaacaagaatgtgttcgccatcgccaacatgaagcgcgctatcgacatttacaacagcgacggccaacaattggcccacttgcccacagccactgtccctgccgtggtcagttggcacccactgcagaactggatcgacgggcgattgccagct

SEQ ID NO: 3653 - DNA, 1497 bp, Saccharomyces pastorianus
atgtgtcatggggtttatgttcaacgagtccggctttatcaagcagagtgttttgaaaccctctcaaagagaatcacacgagaagaattacaaaagaggtttatgctagcaggctttcttaatatcatactggcaccattcctggttacatattttgttctgctttattttttcaggtattttaatgaatacaagacatcacctggctccattggggctcgtcaatacacgcctatagcagagtggagatttcgtgaatacaatgagctctatcacatatttaagaagagaatgagtctaagtacgactctggccaataaatatgttgatcagtttccaaaagaaaagaccaatctattcttaaaatttgtttcttttatcagtggatcattcgtggccattctagcatttcttacagtatttgatcctgaaaattttctaaacttcgaaatatccccagacagatcagtcattttctatattactattttaggtgctatatggtcacttagcaggaatacaatagcccaagaataccatgtttttgacccagaagagacgcttaaggaactgtatacatatacacactatttaccgaaagaatgggaagggagataccacaaggaagagatcaaattagaattctgtaaattatacaacttaagggttgtaattcttttgcgggaactcactagtctaatgataacaccatttatactttggttttcattaccttcttcagcaggcaaaattgttgattttttcagagaaaactctgaatatgttgatggactaggttacgtttgcaagtatgccatgtttaatgtgaaagacctcgccagcaaagatgcaggcgacattaaagaagatgatgcgacgaagaaagcatatgtcaatggaggtcgtacgtcaaatgacaagcggaagaggaaatttgccacggaagatcacggcgataaagatacagcaaataataaaatgctacagtcatatgtatatttcatggatgattattctaacagtcaaaacctgacaggcaaatatcaattgcctgcaaagaaaatttaccaacacaatgagggtgattctgcccttaacaataagtactcctggaggaagcagtttcaaccaggccagaagccagagctgttcagaataggtaagcatgcactaggccccaaccagaatatatctctcaagagatactctacaaagaatcctgcgaagaattggggtaacaataataatggtagtagtaacaacgatgatgatggtactaacattactagtaacactgataacaacaatactaacaacgaacacgaatttgaacttacagaatcttttctagattcggacacattccctcgttatgatggaattaaccagaacagtatgctgaattcgcataataataataatagtgacaaactcaacaaaggaggagtcctaggactcgtcaaagaatattataaaaagtcagatgttggaagataa

SEQ ID NO: 3654 - DNA, 699 bp, Saccharomyces pastorianus
atgtttctacaagatgtttacaactactatctaggaaatggttactattgcatcatactggagaaaattctgaacataggcactttactctttgtcgttttcatttccacatacatgggacattgcattgattattctgaattgcctacaagtcatcaaatatcagatattattatcgataagtgctattccaccaacataacagggttcacaaagttttttctttggatattctatttcttcgtgattctcaaaattgtccaactatattttgatgttaaaaaattatcggaattgcaaaacttctacaagtaccttttaaatatatccgacgatgaacttcaaactctgccctggcaaaatgtaatacaacaactcatttacttaaaggatcagaatgctatgaccgcaaacgttgttgaagttaaggccaagaatagaattgacgcgcatgatgtggctaataggatcatgcgtagagaaaattatttgatcgctctttacaacagtgatattttggacctttctttgccgataccactatttaggaccaacgtattgacaaaaacattagaatggaatattaacttatgtgtcatggggtttatgttcaacgagtccggctttatcaagcagagtgttttgaaaccctctcaaagagaatcacacgagaagaattacaaaagaggtttatgctag

SEQ ID NO: 3655 - DNA, 87 bp, Saccharomyces pastorianus
atgcctaaaaagagcaatactgtggaggaagatcaacggcctttgtttttcagacacatcttacagaataagtatcctcagcgctag

SEQ ID NO: 3656 - DNA, 267 bp, Saccharomyces pastorianus
atggagagagataaataccagcagcccaactctcatgggaaaaacacttttctatcgcgaatatttggtttacaatcagacgaagtcaatccttctctcggcagtcaagagatgagcaatttccctatacctgacttagagagaggttcttctcttttgcattcatctggtagtagtcaagaggaccgagatgaaaacgatttgcgtgttcctgaatcagatcaaggctccagcacagaagaagaagacatagaagaagaagaagaa

SEQ ID NO: 3657 - DNA, 993 bp, Saccharomyces pastorianus
atgcaagcacgttttaaaaatgactatttcgatggtctttcaaatggtgatttggttttcttctctgttattggtacattattctctacctctgatcaataccatttggtaataactccttcgctaatcctaatgaatcaatttctggaacagatcaaatttaattctttgaaaagaattgcatttggtgcgattttgataaggatcgttttacagtatcaacgtatctccaaaaggtatataccagaggcggtttatttcttccaaaaggttttattcacttttatagttgaaaagaaaaaccaagacaaaccattagactttgaaactattagattggattcttatgagttgggacttccaaaagatgctgatttttcggaaaatagatctagtgtagttccattgcatagtttatcaacaatggatgaaaagctgcaatcagtaaacctgaaaacctgcttattattaaacattatggaatcattagatgtaacaatctctactatgtggaaagaattgcccgcttttcaagaaattatttcacccattcaaaaactattaaacgtatatgctttgagatatcctggttttgtaaaggcaaaaaatcttttgagcaagatcgggaaactattgaaatttacagaacatatcccactagctttacaaaaccacaggcccatatccatacctacacacgcacctaaatatgaagaaaacttcaatcctgataagaaatcttatgaccctgatagaacgagaagcgaaataaataagatgaaggctcaactgaagaaggaacgcaaattcactatgaaagaaattcgtaaagatgccaaatttgaagctagacaaagaatcgatgaaaagaacaaggaaagtagtaactaccatgcaaagatggctcatatcgtcaatacgatcaacacagaagaaggtgccgaaaagaacaagtacgaaagggaaagaaaattacgtggtgggaagaagtaa

SEQ ID NO: 3658 - DNA, 1365 bp, Saccharomyces pastorianus
atggccggttcgcaactgaaaaatctaaaagctgccttgaaggctcgtgggctcactggtcaaacaaatattaaaggtaagagtaagaagaatccaaagagacaagcaaaggagtatgatcgagaagagaaaaatagagctattgccgaaatcagagaggaattcaatcctttcgaagtgaaggctgccaggaacaagagaagagatggtccgccttttaaaactgctgatcgtgttgcagtgggtaaacctggtatctctaagcaaattggtgaagaacaaagaacacgtgcatttgaagcaagaaagatgatgaagaataaacgtggtggtgtggttgataaaagatttggtgaaagggacaagttgttgactgaggaagaaaaaatgttggaacgtttcactagagaaagacaaagccaatccaagagaaatacaaatttgttcaatcttgaagatgatgaagacgatggcggaatgtttggagacggtcttacacatttgggccaaacactgtctttggaagatgaattagacaacggcgaggatgatttcttaacttccaaacgatttaacgatgatgatgctgaacagcagcaacctcagaggaaaaagactaaggcagaagtcatgcaggaagtcattgcaaaatcaaagttctataagcaggaaagacaaaaggctcaagggataatggaggaccaaatagacgacttggatgaagatttcgaagatgttatgtccgaattgatgactacacagcccaagaagaagccaatggaacccaagactgatctagacaaggagtacgatattagagtaaaagaactgcaactggataggagagccgccccaaccgatagaacaaagactgaagaagagaaaaatgctgaagctgaagagaaaaaacgtgaattggaacagcaacgtcttgatcgtatgaatggtatgatcgaactagaggaaggtgaagaaaagggtgtagaagatttggatgacggtttttgggataatgacaatgattacgaagaaggcaatgatgaaattgccaactccgacgatgatatcaacctcgaaaatcaggaccaagatgatgactttacccaagtcttgaagaaaaaaaacatctccatttcttgccctgaaacacatgatgcactgctggaacaagtaaacaagttgaatttggctgaccaccctaagatcatcaaaaatatcatcaaagcctatcaaccaaaattggccgaaggtaataaccagaaactgggacaattcactgccgttttactgagacatattatttttttaagtaatcaagactattccaaaaacgtccaagtgttcaaaaagaccaaaatgcattga

SEQ ID NO: 3659 - DNA, 2250 bp, Saccharomyces pastorianus
atggaggaatcggtaagaactattgtagctgctggtcctggatctgttttggtcatacatccaagagaagccgtcctctatgatgtccaacagggcaaaaaggtagctcaattagctgttaaaaatgtcaagtacgtatcatggtccttagatggccaatatgttgcattgatgagcaaacataccataactttggctaccaagaaattagaattgattaactctatgcatgaaaccatcagaatcaaaagtgctgcttgggatgaaagcggtgtcttgatttactcaactttgaatcacattagatactcgctgctgaacggcgatagaggtattattaagactttggaaaagactttgtatatcacaaaagtccaaggaaaattagtttattgtttaaaccgtgatggtgaaattgaaatcctaaccattgaccccacagaataccgttttaagaaggcgttggtcaacaagaacttcccagaagtcttacgtctcataaagaactctaatctagtcggtcaaaacattatctcctatttgcagaagtcaggtttcccagagattgctttgcagtttgtccaagatccacatattcgttttgatttggctctggaatatggtaatctagatgttgccctagatgaagccaaaaaactaaatgacgatggtgtttgggaaagattgaaccaagaggctttggcacaaggtaacactaccttagctgaaatgatttaccaaactcaacattctttcgataaattatcttttctatatcttgtcactggtgatgtcaacaaactgtcgaaaatgcaaaatattgctcaaaaccgtgaagattttggaagtatgctattaaacactatctacaataactccaccaaagaaagatctaatatttttgctgatgctgggtctttgccattagcttatgccgtagcaaaggctaatggagatgacgcagcagcttcggcatatttggaacaagccgaaatcgacgtacaagatgttactttaccagaccaagttaatccctccaacttcgttcaaagcccggcaatctccgagccacttgcaaaatggccattaaaggaagctgaactatcttacttcgaaaaagctgtcttaggtcaaatcgatgatttgaacatagatgatgacgttccggcagaaaatatcgccgaagaagaagaagaaccacttgctgaagaaagtttcaatgacatggatatcggcgaagacgagggagcctgggacttaggtgacgaagatttggacgtaggagaagatctaactgaaaaagtagaagaaggtgaaatcgcctctccagcaaaagaggccgaaacggccgtttggattaaaaactccaagttaccttccgtcctagttgctgctggtgcttttgacgcagctgctcaagctttaaacaaacaagtaggtgttgtgaaactcgaaccgttaaaaaaatacttcaccaacatatatgaaggttgtagaacatacatgcccagcacaccatacgaactacctgctcaattgggttatatcagagcatacgatgatacagtgtctgaagaccaaatccttccatatgttccaggtcttgatattgttaacgagaaaatgaatgaaggctataagaacttcaaactgaataaattggaagttgcgattgaatgttttagagaagcaatttaccgtatcacgctattaatggtcgatgactcagaagatgaaaaactggctcgcaaggtgctagaaactgctagggaatatatattaggtttatccatcgagttggagcgtcgttcattaaaagaagaaagtactgtgcgcatgcttgaactggctgcatatttcacaaaggctaagttgtccccaatccatcgtaccaacgcactgcaagtggcgatgtcacaacatttcaagcacaaaaatttcttacaagcctcgtattttgcgggtgaatttctaaagattatttcatctggtcctcgtgctgaacaagcacgtaaaatcaaaaccaaagccgactctatggctagtgatgccattccaattgactttgatccttacgccaagttcgatatctgtgcagctacttacaaaccaatttatgaagacacaccttccgtttcagatccgttaaccggtagtaaatatattgtcactgagaaagataaaatagatagaattgctatgatttctaagatcggtgcaccagcatcgggactaagaatacgtgtataa

SEQ ID NO: 3660 - DNA, 1089 bp, Saccharomyces pastorianus
atgaagatgctaactaaattcgaatcaaagtccaccagggccaagggtattgccttccacccttccagaccttgggtattggtggctttgttctcctccaccatccagttatgggattacagaatgggcacgctgcttcataggttcgaggatcacgaaggtcccgttcgtgggctagattttcacccaacccaaccaattttcgtttctgcaggtgacgactataccatcaaagtctggtctttggacacaaacaagtgcctttacactttgtcgggtcatttggactatgttcgtaccgtgtttttccaccgtgaattgccttggatcatatctgcctctgatgaccagaccataaggatctggaactggcaaaaccgtaaggaaatcgcttgtttgactggtcacaatcattttgtcatgtgtgctcaatttcatcccactgatgatctgatcgtttccgcttctttggatgaaaccatcagaatttgggatatctcaggcttaagaaagagacattctgctcctagcaacaattctttcgaagaacaactgaatgcccaacaaaaccttttggacggttctcttggcgactgtgtggtgaaattcatcttggaaggtcacacaagaggtgttaactgggcctctttccatccaactttaccattgattgtctccgccagtgacgatcgtcaagtaaaattatggagaatgagtgccacaaaggcttgggaagtcgacacttgcagaggtcacactaacaatgtcgacagtgtcatttttcacccacaccaaaatctgatcatttcagtcggtgaagacaaaaccctaagagtctgggatcttgataagagaactccagtaaagcaatttaagagagaaaacgataggttttggttaatcgcagcccaccctcatatcaacctatttggtgcagcccacgattctggtattatggttttcaaactagatcgtgaaaggcatgtagcgttatccatcaaaatcaattgttttttgtcaatgcggaaaagcaaattcaaagtttcaatttccaaaaaagagtcgcttcattaccttatgcctcgttaa

SEQ ID NO: 3661 - DNA, 294 bp, Saccharomyces pastorianus
atgaagaggtatatccacttcgccaacaggttgactggttggaatgctattaaatcaagagttgaccaattgaatttgaatctaacagacactcaagttaaggaggtcactgttaagatcaagaagttgggtgacgtaagaccgctaaatatcgatgatgtagactctattatcaaggatttccacgctgagttaggcactccaattttgaaaccaataaataagggcattgatgaaggagatttaggaaattccaatgggcatgcatctaaaaaagttaaaacttccaaataa

SEQ ID NO: 3662 - DNA, 150 bp, Saccharomyces pastorianus
atgtctgactctattatttcctttgctgctttcatcctagctgatgctggtttggaaatcacctctgacaacctattggctatcaccaaggccgccggtgccaatgtcgacaacgtatgtacaaagacgagaagaaaagactgtgtttga

SEQ ID NO: 3663 - DNA, 90 bp, Saccharomyces pastorianus
atgtctctggctatgtatattttgattgcgatggccttcttttattatccagatgaaaaaacccttgactctatcggaaaagttttgtaa

SEQ ID NO: 3664 - DNA, 177 bp, Saccharomyces pastorianus
atgaaggacaagatggatttggcactgggtgttgccattggttcctctctacaaattgctctattcgttacaccatttatggttcttgtcggctggatgattgacgttccaatgacgctgaatttttccacttttgaaactacaacgctattcattgctgtcttcttatcgaactaa

SEQ ID NO: 3665 - DNA, 930 bp, Saccharomyces pastorianus
atgtcagactaccaagctttgctgcagttcaataagaaggccgtatccaaggatatggtccaatacctagcttccaccacagcttcgattataaaaatcaagaaaacgaatagtatgatagacatcgcattgccagccccaccattggttaaattcattaatgggttgataaagcactccaacgtacaaactccgactctaatggccacttcagtgtacttggtcaaattgagatctataataccgagcaacgtttatggcataaagactactagacacagaatttttttgggatgtctgatattagccgcaaagacattaaatgattcatcccctcttaataagcattgggctgaatataccgacggtctccttctacttcgagaggttaataccatagaaagagagttgctaggatattttgactgggacgtcaccatttcgacagatgatttggttacatgtctttcaccgttcttacaacctattaaagaggagagtgtgtacaagctgcaacaagaacaacgcttatccaattccttttcttctcaagaaaaggtcaaagcaaagagatcttctcttactcattcgcgctcatcatctaatttctccatcccatcgttggcctctacttcgacgctatcgacattggaatccaaaaggtcggattcatccaactacagtaataagatagaaactttgccggagtttaacgagcccaatgataattataataacaaattctctccgcgacctttcgatgcagacttcaagtacaataacaaggaaaacaatagaccaataccgaccagtaagtcatccaatttcaacaaggcacgccccttaattctaaagactggattagacaaaccaatgatcaacggagatttgaagttgaagaaatcaaattggtcaagctttttcaaataa

SEQ ID NO: 3666 - DNA, 231 bp, Saccharomyces pastorianus
atgccaattgccaagagactggccaaggccatgaagttggacacctataacatcttgcaaaacaacggtaagatcgcgcatcaggaagtggaccatgtgcatttccacttgattcctaagagagacgagaagaccgggttgatcgtcggctggccagctcaagaaagcgactttgagaagttgggtaaactacacaaggaattgcttgctgagctagaaggctccgattga

SEQ ID NO: 3667 - DNA, 255 bp, Saccharomyces pastorianus
atgatattcaaacatgataaatataacgcactacctattgatgttcgtaatgctgaaggtagagtacccctccatagttgtaaagggttatctatgtcttttaaagtcttccatagcgttgactttttgtcttgttggattctagtctttaaaagatctaatggctgtaatgtaacagcagatgtaagcccaccaaaaaagcctccaattaagtgggaagagttctttgacgtatttgccggttcggacatgtaa

SEQ ID NO: 3668 - DNA, 927 bp, Saccharomyces pastorianus
atggcatacaagaaaagggcttttaaaccaagtggaacaacaaaatgcttaaaggatttcccgacattcatcttgaacctacctagctacaacccttccatcctttctacccatgcgaccgcactaatcacaggtggttccagtgggcttggattagaaattgccaaggtgcttgccaaaagagccgataaagtcattatagctgatattctaccatttcctgcaatttatcaaaaagagttcaagaatattttcttttacaaatgtgatatatcaagtttagatgatatccaaaacttaaaaagagcaattgatagaaatcatggcaacgtggatattctcataaataatgcaggtatagcacatatcaaaatgctagaaaagatgtcaaataatgatgtgaaacaattaattgacatcaacttaataggcgcttatagagtcattcatacatttgctccagatatgataaacaacggagaaggctttataattgatattgcttctgttctaggggaactaacacctgcaaggctgacatcgtatggtgcatcgaaaggcgcgatgattggtttgcataagagcatgtgcaagcatttcgaaaatttacctacaaaacgcaataaacttggaataaaaacgttactagtatgtcctggaaaaattggaacagccatgtttatagatgttcctacaccatccaaattgttggcccccgacattgtaccttcagagctggcgttcgcaattatttctgcaatggaacacaaccagttgcaaatactaaacgctccttattatgttaacctggttcccttttttaaatctttaagctggccttacaaacgcctcttaaaacatttaagcggaatggaccacgtaacgtccatccaacggatgactaaggctctgaaaacaggcgcatag

SEQ ID NO: 3669 - DNA, 549 bp, Saccharomyces pastorianus
atggtagaaagtctatttcccttgccagagagagggataaggctttccaataatacaaagcataacaacaaacacacacacacactcataaacacaatgtgctcagcaggcggtatcagaagacctatccagatcgaagaattcaaaacggcgataagcggtatgtccgacatggaattggcacagatcaaaaaggaaatcgagaatagtatcaatcacttgcagaggtccagtgctcgcttgggtaagtacattgccaagctggagggcgatgaggagcgtctcgatgcggacgacagcgacgacttagagaacatcgactcgggggacctggcgctatacaaggactccgtcagagaaaacgacatcgtgcttaacaactacaacgaaagagtggacgcgttggagcaagaaaccgtgtacaggaagacgggccgcggcaagagcaagcacgaggcggatgcaaaggacaagactagtaaaggcaccgacgtcgacatggacaacactaacgtcgacgtggtgaccccaaacagcatattcatttga

SEQ ID NO: 3670 - DNA, 1980 bp, Saccharomyces pastorianus
atgaagtcaaaaagaatagggaaagcggctaatagtatgaatactggtacatccctcgacggcatactatatcatgagcaatcgtcagtgaaattaggtgagctagaaagatacgttattacatacgacttatacgaaggcgatgagattcccgctgatatcaggctagattctctatgggtaaaaattgaaaataccacaaagctatcctacaaggcagcttacctattgggaccgtttatcctgtattgcgacttacgaaccaagggctatcaccactcacaaaagattatctcttcggcagacaagcctgttttccaatcaaatattcaggcacagcagaaatttgttgcagaattatctttacatcaaatcaagcagcgttatgtctggatagtggatgtcgtaagtcagattatttttaataaagaaaccaagataaattacgagatatcaattggcaacaccaaggcatcgtttaaaaagaaaatacgaagtactagcacattgaacactcaggataatacttcatacatagggctgcaagtacaaaaactgactactgccgatatatgggcagtgccaaaatttcttggcacctctcaaaagtcgcacctaatcattctcactcacggcttccaatcgaacgtcacagcagacatggaatatatgatggaagaaatatacaaggcacaagtaaactatccagatgagcgcctagttgtcaaagggtatatgaagaatatctgtgaaactgaaaagggaattaagtttttgggcatcggactggccaattacattgtcaacgagttatacgataactctgttaataaaatatcatttattggtcattctctgggtggactaacgcaagcttttgctatttgttacatcaagattaagtatccagagtttttccagaaagtggaaccagtcaatttcatcacattagcgtcgccattgctaggtattgccaccagcacacccaattacgtcaaaaaatcgttgtcaatgggtatcattggtacgacaggacaagagctggggctagaggactcgaaattcggtgataaaccgctgctgtacttgctatcagagggccctctaataaaggtgctcacccgattcaaaagaagaacgctctacatcaatgccataaatgacggaatagtccccttatattcatcgtctttgcttttcttagactattctcaattgctggataagttgggaggccaaacgacggcttcgtgtgatcctctcttccagcccaaagacaaccctgttactcccggtgatgacaatggcaatgctggcgataagacgactaacacgtcatcctggaatacgttttggaaagccaagggaaatcaagacgacaggaaatctaaacgtttgatgaacacttccgtcattaaatccatgaagtctgcagtactgccaccgtgtcctgacaccgagtatcttttgaaccctgatacaagagctgcaactatcatacatgacaagatctacacggaaaaggatctaccagcccctgcagcagcagagtttcccgaaggaacctcagctcagggcaatgaaaagaagaagaagagcaagaaggagttggaagagatcatagcaagacgctggcacaagggaatgcactggaggaaagtggtcgtgtcactaaaaccggatgcccataacaacattatcgtcagacgaaggttcgccaacgcctacggatggtcggtggtagaccatctggtcggcgcccacttccaaggagacggtgcagacatcttgtcagcgccagacgcagcagagccccccgacgaagacgtagatatagccagcggtggtgtagagccgaataagcttttctcgtggctgaccggggtcgaggaccctggcacctaccgcgagggagtggtctccaccgccagccacctggccagctcttggatacggaggcattcctccgtcacagactaa

SEQ ID NO: 3671 - DNA, 330 bp, Saccharomyces pastorianus
atgggcgacgaactaacaagatcccatttcaatgcattatacgacactttactggaatccaatttatgtaagattatcgagccattcgaatgtgtggaaatatctcacatctccaagataattggcctggatactcaacaggttgaggggaaactgtcccagatgatactggataagatattctacggtgtgctggatcaaggcaatggatggctttacgtttacgagactccaaatcaagacgctacttatgactccgcattagaattagtaggacaattaaataaagtcgtcgatcaattgttcgaaaaggcaagtgttttgtactaa

SEQ ID NO: 3672 - DNA, 951 bp, Saccharomyces pastorianus
atgtcagtattgggttcgaaattggaagaagccagaaatttggtcagcgaaaaacagtatgataaggctgaacaagtgtatttaagcttgttggataaagacagttcactggtcagcgctcccaccgctagcgtggatgacaaacgtaggaatgagcaggaaacaagcatattggagctgggacaattgtacgtcactatgggcgctaaggacaagctgcgcgagttcatccctcattccacggagtacatgatgcagttcgccaagtcgaagacagtaaaggtcttgaagacgctgattgagagattcgagcaggtaccggactccctggacgatcaaatctttgtttgcgagaaaagtatcgaatttgctaagagagagaagagagtgtttctaaagcactctctatccgtcaaattggctaagttgcactaccaaaagaaacagtataaggactcattagcattgatcgaaaatctcttaagggagttcaagaaactggacgacaaaccctccttggtggatgtgcatctgttggaaagtaaggtttaccacaagttaagaaacttggccaagtccaaggcttctttgactgcagcaagaaccgcagctaactctatctactgtcccactcaaactgtagcggagttggatttgatgagtggtatcctacactgtgaagacaaagattacaaaactgcattttcatacttttttgagagttttgagagctatcataatttgactacccacaattcttatgaaaaggcttgccaagtattgaagtatatgctattatccaaaatcatgctgaatctcatcgatgatgtcaaaaatattctaaatgcaaaatacacaaaggagacttaccagtcccgaggtattgacgccatgaaagctgttgccgaggcctataacaacagatctctcttggagttcacactgcgctaa

SEQ ID NO: 3673 - DNA, 183 bp, Saccharomyces pastorianus
atgtattgcgaggcaaaaccgccaaaatgcacttcatcaaacaccacactgtctggccaagccagaccatgcagcctgacaatcgctgtaaagatggccagacacgccacgatcaatttctccttcacggtaaccatggaccgcaacgaggccaatttggcgctcgggtcagtaacgatatag

SEQ ID NO: 3674 - DNA, 462 bp, Saccharomyces pastorianus
atgactagaccaatgtacacttgctcatgtgcgcgctgccatagtatgagcagaggcatttcacgttttatgttttacgttttacccggccgtcgccctattattttaaccagaacgcttctttcgtcttgccatggcaacgtttccttccacgttctatataggtggttccagcagcagcagcacagcactgcagcacagcagcaagactacaccacaccacaccacacgtcccagggcggcacatcgttcataatggctagaggcaatcagagagacttggcaagacagaaaaatatgaaaaagcagaaggacctggctaagagccagaaaaaaaacggcgatccaaagaagagaatggagtcggacgctgatattttgaggcagaagcaggctgctgcggacgccagaagagaggcagagctgttggagaagctgaaggctgagaaggcaagaaaatag

SEQ ID NO: 3675 - DNA, 249 bp, Saccharomyces pastorianus
atgattaatgacgctaattttgctgttaatgacaaaattcgaatgatagagattatgctgccaccaagagatgttccacaagctctgcttgatagatgggtagtagagaaggagcaaagcaaacaaatgcaagaggaaaacgaaaactccagtgcagtggataccccaacgccagaattccaaccacttctgaaaaaaatcaaacttgatacagacatgatttctcccaattactatcaaggcccataa

SEQ ID NO: 3676 - DNA, 1482 bp, Saccharomyces pastorianus
  modified_base (1452)..(1452): a, c, g, t, unknown, or other
atgaattctagctatacacacaaatacgggctgccgaaatatatagctatatccgactatcttttccatcggctcaaccagctaaatatacatacgatatttgggctttctggagaatacagcatgccattgttggacaaactatacgatattccaaacttacgatgggctggtaattctaatgagctgaatgctgcttatgcagcagacggatactcacgactcaaaggtctgggatgtcttataacaacttttggagtaggtgaattatcggcaatcaatggcgtagctggatcttatgctgagcatgtcggaatacttcatattgtgggtatgccgcccacaagtgcacaaacgaagcaattacttctgcatcacactctaggaaatggagatttcaccgttttccatagaatagccagtgacgtggcatgttatacaactctgattgttgactctgacttgtgcgccgacgaagtcgataaatgtataaaaatggcttggattgaacagagacccgtatacatgggtatgcctgttaaccaggtgaacctcccgattgaatcggacagactgaacactccgttggatttacagttgcataaaaacgatccagatgtagagaaagaggtcataactcgaatattgagttttatatacaaaagtaagaaccctgcaatcatagtagacgcatgtacaagtagacagaatttaatcgaggaggctaaagaactttgcagtagactcaaattccccatttttgttactcctatgggtaaaggcactgtagatgaaacagacccgcaatttgggggcgtattcacaggatccatatctgctccggaagtgagggaagtagttgattttgctgatttcattatcgtgataggttgtatgctttccgaattcagcacgtcaactttccatttccaatacaaaactaaaaattgtgcactactatattcgacgtctgttaaactgaagaatgctacatatcccgacctaagcgtcaaaatactgctacaaaaactattggcaaccttggacgagtccaaactctcgtacaggccagatgaacaacccagcatgatggttccaagaccttatccagctggcaatgttcttttgagacaggaatgggtttggaatgaaatatcccgttggtttcaaccaggcgacataattataacagaaactggtgcctccgcgtttggtgtcaaccaaaccaggtttccagtaaatacactgggcatatcacaggcactttggggatctgtcggttatacgatgggggcttgtttgggagcagagtttgcagtccaggaaatcaatagagataagttccccgcaaccaaacatagggttgttctatttatgggggatggtgcttttcaattaacggttcaagagttatctacaattgttaaatggggactgacaccttatattttngtgatgaacaatcaaggttactctgtcgat

SEQ ID NO: 3677 - DNA, 90 bp, Saccharomyces pastorianus
tcacagtcggatgcgagttattatgatattcagccttggagctacttaggattactccgggtatttggttgtaccaattacgaaacctaa

SEQ ID NO: 3678 - DNA, 1128 bp, Saccharomyces pastorianus
atggatatggaaacgtatactaacaaatctttagttcataaaacggtctataaacacgagcacaatgccgacgccgacaaaaagaacagcgaagaaaccgtagatattagttatcctgccgtagaggtggtcggccatggttcgttcggcgttgtggttaccactgtgttacaggaggctaatcaaaaagtggctataaaaaaagtgttgcaagataaaagatataaaaatagagaacttgaaactatgaaattattgaatcacccaaacacaataggcctaaaatactacttttacgaaaaggatgaagaagacgaagtctacctcaatttgattttagactacatgcctcaatcgctgtaccaaaggcttcgtcattttgtccatttgaaaacacagatgccacgtctagagattaaattctatgcgtatcaactgttcaaagctttgaattacttgcacaatgtttcccaaatatgccatagagacataaaaccacaaaatgtactagtggaccccaaaacattctcattgaaaatctgcgattttggtagtgccaaaagtctgaaaccagatcaacccaatgtgtcttacatctgttcgaggtactatagagctcctgaattaatgttcggtgccaccgattactcaaaccaaatcgacgtatggtcaagcgcttgtgtcatcgccgaattgctcctaggtaagcccttattccccggcgaaagtggcatagatcagttggtagaggttatcaagataatgggcatacccacaaaggacgaaatctcaggaatgaatccaaactataaagaccatattttccccaacgttaagcccgtaactttggctcgactgttaaagggcgaagactccgatgctcttgaattgctatcaaaggccctcaggtatgaccctcgcgcaagattacctcctctacagtgtctactactaaagtattttgacgaaatcaaaagccgcggcaccgaagcttacgtaaaagcacaatgcttgcgtatatttgacttcgatgtgcaaacagaattaggccatgtgccacctgctgaattgtctaccatcgaagtagcgttaaaacagcccgtttcccaagcttcaacgtccttatga

SEQ ID NO: 3679 - DNA, 483 bp, Saccharomyces pastorianus
atggctgctgttttgaagagtttggtgcggaaaatttcctttggcaattcagatagcttgcagctgaaacataagacttctatacagagcgacacgagcaacaccgggctagaaaagaagaagaggaaggctggaaaagagcccaacaagatcacagtgcaccataggatatctaactgcaataacagcgccgagtatatcagcgacatagagaatcatataatatcgaagttactagacaccggtagaaaaggcgtcactgttgaccatattgaatacgtcgatgttccggatatcaaagcatatggaaaaaacattaaacaagaaaacatcagtaccaagcttgacaagaagaggatagatagaatgataaatttcgattatagatatgttaaatccaagcaaagaacacgtatgtatcactccgtttataggcttatgcttatgctttcgttagaggaagaagtgtcacggccaagataa

SEQ ID NO: 3680 - DNA, 213 bp, Saccharomyces pastorianus
atgggtactgaagatgtccgtctagccccagaattgaaccaagctatctggaagagaggtgtcaagggtgttgaatacagattaagattgagaatctctagaaagagaaacgaagaagaagacgccaagaacccattgttctcttacgtcgaacctgtcttagttgcctctgctaagggtctacaaaccgttgttgtcgaagaagatgcttaa

SEQ ID NO: 3681 - DNA, 477 bp, Saccharomyces pastorianus
atggttgaaaaaatagatattgcgaacatgaaatgggggaccatccacggaggcagtaagtacatgaagcctctccccgttccgaaggacatgatagttgttaattccggtaaaaatgaaattgagacgaatgacctcattttagctgatggcaaggatctggatattgaattaccggtacctgactttagtatatttggtgagcgtaaggaacatgagcacgaaacaccagtgaaaagtgctccaaatttggaagagtcggaaggttgcagcgaggaggatattgtggtttggaaacagaatcaagagatgaggttgaggacgagaatacaaaaaatttgtgttgtcattgagacgttcaatgctacagtaagagaatatttcgatttttctaacagattggagcatgaaagtatatttatagatttcgaagttagaaagcctagtagcaatagttctattaacattaaagtctga

SEQ ID NO: 3682 - DNA, 684 bp, Saccharomyces pastorianus
atgttacgtacacaggcgtttgtaactgttcgatcctatgtgatgcataggaatggctctaccaagatcataaacacagtaacaaagaaaaatgttgcgagggtggagaaattatgccatgtttttcaagtcgatcataatgatgatggaggaaagatacgcttgccgactaaagagttaaccaaactgctgtacactacaaaccgggatttgcaggtccaagtaactataagtggggacaccagtacgaataatgattttcgaaccagcaatgagattctacaaaaattaggcgagcaattaatcaacctggaaatcaacaagttgctgacaataacgtttacaaactttaatcagtttaatgtaatgaacaagaatttcaactacattcacaatttggaacgacgtcgaatagtgaattcaagctccataagttggctaattaacgattccttgaaaatcaatcaactggcccatttgcgaatacccgttaagctacccaaggaaatgggactgaattccagttcaaaagatttccagaacctaaatgattggaaggtgatattatcgtttgtcggttatctgaaactattagacaataagaacaatagcaaaatgtttgttgattcaattataaaaattatatgtttacctctgatcaatttccatttgggtaatttatag

SEQ ID NO: 3683 - DNA, 1029 bp, Saccharomyces pastorianus
atgagtggtaacgagcacgatgattttgatgacttggatgaccttttggatgaagacccaagcaaactagatgaattcgatccggaaaatcaacaaacagaacaatatgtgggcaacgacagtggaaacaaagaaagaagcgccagagataaaggtggtgatagttcaggggcaggtaatacgtctgaagaagatccggaattgaaagaaatgatgacagatttacaacatgaatttgcaaatttaatgaaacaaaatggtaatgagaattatgccaagacagaagactttaacaagctagtgagtgctctagaggaggctaccaagattcctcgtgaaggctctgatttggcttctaatgatttgaaaaccgataataatgttaaggggtctgtcagtggaaacagtccagggttcaaaagcatcatctcaaatacactggataggctaaaagacaacggtaataaagtagacacatcactagcagaagaaagtaaagaatccaaacgcagtggtcaaaacagtaatgtagatgacatattgtcacaattgctagaccaaatggttgcatccggaggaaatgacaatggagatgatcaatttgacgtaaaggacggcgaaatggatgatgcgataacgaagatacttgatcaaatgacgtcgaaggaagtgctgtatgaacccatgaaggagatgcgtagtgaatttgggacatggtttcaagaaaacggcgaaaatgaagaacataaggagaagatagatgtttacaagagacaatttgatatagtaaagcaaattgtaggtatttacgagttaaaggattatgaagaattaaagcataaagatcgtgttaccgaattgctagacgaactagaacaattgggtgataaccctattagaagtggaaacagtcttttaaagagtgggaacgaagaggaggatctcatgaaaatgttagaagtcgatggcaatgatcctaatttggggaacctcgataaggaattggctgatggttgtaaacagcaataa

SEQ ID NO: 3684 - DNA, 369 bp, Saccharomyces pastorianus
atggacttacaaaaatgggaggctggtattccgggtagagaagctacaaattgggcaggtggtgtatacccgattacagtagaatatccaaacgaatatccgtcaaaacctccaaaggttaagtttccggctggattttatcatccaaatgtgtacccaagtggcacgatttgtttaagtatcctaaatgaagatcaggactggaggcctgctattacactgaaacaaattgttcttggggttcaggatcttttggactctccaaatccaaactcccctgctcaagaacctgcatggagatcgttttcgagaaacaaaacggaatatgacaagaaagttttgcttcaagccaaacagtactctaaatag

SEQ ID NO: 3685 - DNA, 1851 bp, Saccharomyces pastorianus
atgggtagatcaaagaaaagatcaagagcttcctcgtctcgtctgaatccgctacgcaaagctggttcaaacggcgacaataaagacgccaatgtcgttaacaaaaagcttcagcctttactgcaaaacttatcgagtgtggtgccaaatgacagaagtgtggctttaagctccattagtgttctctgtgaagacagtcacatgagacaattgctactgaaggaaaaattggtgcatatcatcttgagtaaactattgaacgattctaattcagatatagttgtggagtcttttggtttactaagaaacttatccttggaagaaggctatgatgtgtcgatctacctgtggagatctgacatatggacaagtatatcaagtaactttgttaaaataattgattctctatcagctttgcaagcagcggaacagcaaacccaatcaaaacctgcagggaaggccaaaatagaatctaaaaggctattattcgatttcactgataatttgctatctctggtggtggctttatctaatgggtccgataatatcctcgacgaattattgaacgaaaataaaataagcggaatcttccaagtcattttagaattattgaaatacggtgtcgagaaattacctgtcaatttatacaataccattcttgatctgatttacgatttaagttccgaatcattcgagtttatcgatcaggtctctcacaataagcacatatcgcagtttttaaatgagttgtcttcagactctcatcctcaaaccaacgaattaaccaaggtgttgattgagggtatcaatttccagttccttgatacgaaaataacatatgatcaatgtaataaaatgatccactctgtgtgtcattccattaataacattgatccagtacagttgatgaatgatatcaataaccctgaggaaattgcgccagccacaaataaagatgaaaccagtaaagttatagagaagatcaagaactataatgcaaagcgtaacgaatccatgatgaaattgcagagtgttgaaattgccattgatcttattactgcaatcattgaattgattgcatccaaatatgaaacggcgcaaccgaatgaggccgtgattccagacgagctggtcaatactctaacaaattttttgcctcatgtctttatgattttaaaggatactttcacgtcacgaatattaatcggttggaataacctgatctggctgtatgttacactatcattaacagaactctcagaggacctgctcgcctcactatggagttatgtgacacaattagatagccaagatgacttgagtattaaaattggtagaatgggctgtatctgggctgttttgaagctcatctcctctaacggagctgctgaaggcggaaatcaagtattgaatatttttcaaatgcttaataatatagaattcgtgaagggaatcataagtgaactccaaaacaatgaagacttggaactaaagcaaaagtgtattaacgtattaagtacatatgctatggtacaggggcaaattgaaataaacaaggaaatcggtcaattcttcatacagaagttaacccaatcaaacgtccaacctgaaattttggtggaaatgacaaactcgcttttccaaatttacggcgatgcatcttacgattataatgaaccaatattcgtgggcggcgaatttttatcgatcttaaaagaccaagtagtaccaaacttgagacagcagtttaagatggttgataaaaacaaagaccccgagttaaaggaaaggtgtcatgattgtttcatcacgctagatagttttattcattacaagactgatgaaaattga

SEQ ID NO: 3686 - DNA, 243 bp, Saccharomyces pastorianus
atgtataataggtcgaagaaggaagccgttggcgatgcgctaaagaaggccttgttgagctttgaaaaaattatactcgattacgagaccaagattacaaacaactactatgtcgatggtttatatggttcgaaaaaaattaaaaaagaaactaacaacagttttaacttgagaccgataagcaatagcaagccggctctgatcaagttggaggataccaaaccatcaataggaaataagtaa

SEQ ID NO: 3687 - DNA, 483 bp, Saccharomyces pastorianus
atgacggtgcacgcgaagtctagttcaaccatatcatatgattcgactgtgtacggcacagctgcgggcttggatatcaaggatttccagaccgtcgaggattggaatggcaggcccgctagtgcttggtcggtgcagagaataggactgttgcagtctaagattgaaaggtacacttacaacatttatcacagtaatagatacgggaagcacaatttgtctaagctaatagcgggtcacgttctcatacagttcgccaacgagaccttcgggtatgatggctggcaaatggacgttatagacgtcgaggcccgtgaatgccagccctttactgcagtaaataatgatgataacaccgatacagatgacgtgaagtacacggtggtggcggaagctcaggtaaagattactcttaaggatggcacaaatacgcagtgtggtgggctcggtagaatcacttggcttcgaaaggtgaatgtataa

SEQ ID NO: 3688 - DNA, 1443 bp, Saccharomyces pastorianus
atgacccacagcagtgtcagcagcgtcagcagcgtcatgtccaatgaggttttgaaaccggaaactccccagggcccaataataatcggtaagaacacatcgaccggcgttttctatggaccgtcctttactaaacgagagtcactgaatgctagaatgtttctaaaatactacggtgcacatgaattcttggacacttatttgcccgaagagttgaactctttatacgtttactatttgatcaagttgctgggtttcgaagtcaaagatcaagccctaataaggaacatcaacactattgttcatacaagcacaccggaaaatatacaggattcagaaaatacaatatccgctaccaatgttgaagatcccttagcaaaaaagcaaacagttcgtctaatcaaagatttacaaagagccattaataaagtcttatgtacaagattgagattgtccaattttttcactattgatcattttattcaaaaattacataccgctaaaagaattttagtcctgacaggtgcaggtgtttctacttcattggggatccctgactttagatcttctgaagggttctattcgaaaatcaagcatctggggctcgatgatcctcaagatgttttcaactacaatatatttatgcatgatccttccattttttataacattgcaaatatggttctacctccagaaaacatttattctcccttacatagctttattaagatgctacaaacaaaggggaaattactgaggaattatactcaaaacattgacaacttggaatcttacgcgggtataaatgctgatagattggtccaatgtcatggttcttttgccactgccacatgtgttacttgtcattggaatctacctggcgagagaattttcaataaaattagaaacctcgagcttccattatgcccgtattgctataagaaaaggagagaatacttcccagaaggatataacagtacctccgattccaataaaattagtgggacaggaacgcaagattctgccctagcaaggccctcgtatatactaaactcatatggtgtcctgaagcccgatatcacgttttttggagaagctttgccaaacaaatttcacaagagcatccgtgaagatattttgcaatgcgatttattgatttgcattgggacaagtttgaaagtggcgccagtatccgaaattgttaatatgatcccagcgcacgtgccccaggtcttgatcaaccgcgatcctgtcaagcacgcagaattcgatctatcgctcttggggtattgtgatgatattgcagctatggtagcacagagatgtggttgggcaattccccataagaaatggaacgatttgaaaactaagaaatttgactgtcgggagaaggataaagggttatacgtcattacatcagatgaacatccaggcaatttgtaa

SEQ ID NO: 3689 - DNA, 1440 bp, Saccharomyces pastorianus
atgtatcgtacagccacttcaagtgacttcaccacttcagttgatgtaaccagctctgtcgcttccaccacttcagttgatgtaaccagctctgtcgcttccaccacttcagttgatgtaaccagctctgtcgcttccaccacttcagctgacgcgactggtccaatcacttctgcccaaactagatcaactgacgcaaccagttcagctgctcaaacgacttcagctgttaaaaccagttcgatttcttcaattactttgactgattcagctagctcagtttccccaattagatcagttgagtcaaccacaactcttcatgcaagtatttcaactgtctcaaccacctctgttacattaaccagttcagtcatcccattggccacatctaacgtaactggttcaactgctttaacgagttcagctaatccagatgcttcatctagtccaacaactacggttggttcaaccattttgactgactcaagcgcttcagctggctcatccactttggtcgcctcatccactactagtgatttgattgcatcagctcatacaacgtcttctactggacaaactacgttagtcaacctattaacttcaatcgcttcaaccgcttcagttcacccaactgcatcaaatgatctaagctcttctgttggatccacttcttccaccggaaaggttaacccaacaaaatctactacagcagcaagcacaagaagtacagttaagcctaatatatcaagcgttaagagcaactctgagacacaatacagatccagcaactcagcttctgaaatcagtgcaactcgctctactgaatctgcctcctatacaactaccatttcggtagatcagactagtctacttactgaaactgttttggttggttgctcttcctcaactcatccaatcgcttctgctgaccgtacctcgattaaaccaagcatttctactatctctagcggatcagctgctcattctacaacattattaacctcaaacattaacacgaactctgttttgacaaactcgaacagtttaagtcattctggcactactgttgtagggggatcaacactttcaacttctcttacatcgacagctactactaccaaagctcaaacaactaaatcttctcctgtcataaatgtcaattttgaagggagtgtctccgcggcagtttctctagagagtgcttctggcgattcaaccaaaacagaatccagccagaacaaatccattcattcaaccaaatccattacgaccactacttctaacgcatttgtgacatctaagaatcccctcaccgtcatttcaaccagcgcagccagaccatctatcactgtctcatcaatgatggaaggcaacgcaaacgtccaggtagtaggaaaactgatgtggcttgccgccgctcttcctttagccttggtctaa

SEQ ID NO: 3690 - DNA, 1212 bp, Saccharomyces pastorianus
atgccaaacttccaaatccaattcgaatatatgcaaggtaatgccgctcaatactggcaaacttggcaatggggtaccaccacttttgatttatcgacaggttgtaacaactatgataaccaaggtcactcacaaacagatttcccagggttttattggacctatcaatgtaagggaaatacagatggtacatgcacgaaagcctcgtcttccactaaaagcacatctaccaccaccagctccattactactagctccacttcaagcagccattcttctagcgaatatacattgcaaagtacagaagcaaccacttcgagtgatgcgaccacttcagtcgcgttgactagttctgttgactcaaccacttcagttggtccaaatgcttcgtctagtttagccgctatgtatcgtacaactacttcgagtgatgcaaccacttcaagtgatgtaaccacttccattgctcaaactagttcaactgaagcaaccacttcaagcgatgtaaccacttccattgctcaaactagttcaactgaagcaaccacttcaagcgatgtaaccacttccactgctcaaactagttcaagtgaagcaatcactccctttactcaaacattctcaattgacacaaccagttcagtttctcaaaccagctcagtcggtccaaatgtttcgtccagtttagccgctatgtatcgtactactacctcgagtgacgcaaccagctcagttgctcaaactagttcaactgacgcaaccagctcagtcgttccaaccagttcaactgatgcaaccagttcaactgaagcaaccagttcaactgctccaaccagttcaactgacgcaaccagctcaaccagctcaactacttcaactgctccaaccagttcaactgacgcaaccacttccattgctcaaactatttcaactgatggaaccagctcagtcgctcaaactagttcaaccatcttcaccagttcatttgtttcatctaacctaagcacttcagctggtttgactactttagttgctccaacaacttcaatgtactcaagtttgatttcttcaaccacctcaaacgatgtaaccacttcagttactccaaccacttcaagtgatgcaatcacttcacctaatccaactacttcaagtgatgtgaccacttccgttgctcaagccagttcagctgctctaaaccagttcaactga

SEQ ID NO: 3691 - DNA, 222 bp, Saccharomyces pastorianus
atgaaggcacctaaaatgcccgataaacatagagacaattactacacccaaaagaagaaagttgaaaaggctcttcaaagtggtgttaacgtaaggggctataacaatgctccaggtttaagaagtgaattgaaatccactgatcaaattagaaaagatagagctgccgcagagaaaaaacgtgcaaagaatgctcgtcctactaaaaagcgtaaattttag

SEQ ID NO: 3692 - DNA, 2691 bp, Saccharomyces pastorianus
atggcaggcgtacagaaaaggagaagagatcttggagaccaagacggtagcggaagtgaagaagaagacgacgccgccttcgacattgccaacgatatcgctttgaatgccagtgaaagtgattctgatgattccggcagtgaggaagaagctgattatggcctcggtggtgtccaagatgtcatcgagtatagctcagacgaagaggagaaggaaaagaataagaagaagaccgatgccaagaataccaagaaaagcaaggaaggtaataagaccaagactacgaccaagactaagaatggtaaaaaagaaacagcagcatttccaacattggaactttcagacgatgaaaacagtgcacctggtaaaaatcaagccgatgatgatgaggatgatgtcaatgaatatttctctaccacgaatttggaaaagtcaaagcacaaaaagggcagtttccccagttttggtttgtctaaaatagtgttgaacaacattaagagaaaggggttccgtcaacctacacccattcaaagaaaaactatcccattgattttacaaagtagagatatcgtcggtatggcacgtaccggttccggtaaaacagcagcattcatcttgcccatgatagaaaaactgaagagccattctggtaaaatcggtgctcgtgctgtgattctgtcgccttccagagagttggccatgcaaacgttcaatgtcttcaaagacttcgctaagggtacagcgttaagaagtgttctcttgaccggtggtgactccttggaagagcaatttagcatgatgatgtccaatccggatgtgatcatcgctactcctggtagattcctgcatttgaaggtcgaaatgaacctcgatttgaagagtgtagaatatgtcgtttttgatgaggctgatagactttttgaaatggggtttcaagaacaattaaatgaattactggcatccttgcctacaacaagacaaactttgttgttttctgcaaccttgcccaactctttggttgattttgttaaggccggtttagttaacccagttttagttcgtttagatactgaaacaaaagtttctgaaaatttggaaatgctattcgtctccacgaaaaatgacgatagagaagctaatctactatacattttgcaagaggttataaagattccattggcaacgagtgagcaattgcaaaaacttcaaaagagtaacaatgaagcagccgacagtgaatcagatgatgaaaatgaccgtcaaaaaaagaggaagaatttcaagagggaaaagttccgtaaacaaagaatgcctggtggtaacgaattgccttctgaaaaggcaactattttgtttgttccaacccgacaccatgtggaatatatctctcaattgttaagggattgtggatttttgatctcgtatatttacggtactttggatcaacatgctcgtaaacgtcaattatataactttagagcaggtctgacttccatcttggttgttacagatgttgctgccagaggtgttgatatcccaatgttggctaacgtcattaactacacactacctggttcatcgaaaatctttgttcatcgtgtcggtagaaccgcaagagctggtaacaaaggttgggcgtattctattgtggcagaaaacgaactaccttatttactagatttggaattatttttgggtaaaaagattcttctggcacctatgtacgattccctcgcagccttgatgaagaaaagatgggtggatgaaggtaaaccggaatatacattccaaccgccaagtctttcttacacaaagagacttgtcttgggtgcatgtcctagattggacgtggaaggattaggagatctttataaaaatttgatgacttctaatttcgacttgcagttggccaggaaaactgcgctgaaggcagaacaattatactacaggactcgtactgccgcatcacctgaatccttgaagagaagtaaggagattattgcatctggctgggatgctcaaaatgcatattttggtaagaacgaagaaaaagaaaagttggatttcttggctaagttgcaaaacagaagaaacaaagaaactgtgtttgaattcacaagaaacccagatgacgagatgtctgtgttgatgaaaagaagaagaagacaactggccccaattcaacgaaagtcccgtgaaagaagggaactattagaaaaggaaagaatggctggtctttcacattctattgaagatgaaattcttaagggtaatgatggtgagactggttacacgatatccgaagatgctttaaaagaattcgaagacgcagaccaattattggaggcacaagaaaacgacagtaagaagaaaaataagccaaagacgttcaaagatccatctttcttcttgagtcattatgcgccagctggtgaaatacaggacaaacaattgcagataactggtgggtttgcaaatgatgctgcacatgctgcttacgatctgaacagcgacgataaggtgcaagttcacaaacaaacagctactgtgaaatgggataaaaaaagaaagaagtatgttacactcaaggtattgataacaagaaatacatcattggtgaaagtggtcaaaagatcgcggcaagtttcagatctggtagattcgatgattggtcaaaggcaagaaacttaa

SEQ ID NO: 3693 - DNA, 1197 bp, Saccharomyces pastorianus
atgaatctaaagagaggcagatatgcactattctcttcttctgctgaaccatcgaagcgcaccaacattctttctgaaagagccagggacatagatttgaataggttgtttaccagagacgagcaatatggtgaatatatggagctagaacaattccattctttatggttgaatgtgattaaacgaggcgattgttctttgctccaatttctcgacaccgtggaattatttgtagatgatgaaaaatatttgctagtaccaccgatggatcgtaaaaatgatagatatatgtccttcttgataaagttaagcgaatacgtggaagacttttttcataaaagttacgttttgttcgagaaagaagtagtagaaggtttaatcaagtccgactttgagaattcatactgtagaggatttttgaaatctgaatcaaaggggatttattgtcctctttgttataagtggttcaagacacaggctgttttcgaaaaccatataccagggaaaacccataagaagaatgaagccaaaagaaaaagggccgtatactctgaatacaaattgcatcgatacttgagacttcttaaggatgaactgttccatacgaaaagtttcgtggaaagaaagctggcattcacagcgaatgaaagaatggtggaaatgaatggtctaacgcagaaatatgaagcacccgcatacgatgtaactgaaagggagggtgatgggcaaggtggtgacgagcaaaaagacgataagctacaaggaaagcatatgttcggtaaatcctttgatatgccactaggccccgacggattgcctatgccatactggctatataaactacatgggcttgacagagagtacctttgtgaaatctgcgggaataaaacctataatgggcggcggacttttgaaaggcatttcaatgaagagacacatctttaccacttgcgatgcctgggtatcgaaccctcctcaatcttcaaaggcataacaaagattgcagaagcacaaaagctttggaacaatacaccaaggcagccacaattcgtaacctcgacagcagccgtaccagcagataaaaagctttcgcagacaaaacttcccgttgaaatggaactggaagaagaggacgaacaggggaatgtgatgagcaagaaggtgtatgatgagctcaaaaagcaaggcctggtgtga

SEQ ID NO: 3694 - DNA, 369 bp, Saccharomyces pastorianus
atggatattttagagacgaaaagatctttgttggaagacttggaaattattgagaatgccataacagaaagaattcaacggaatccggagttgtattaccattatatattggaagcaggcaagctgtttcccgatgttaaacaacccaggtcttcgttggtttctgagaacaaaatttataaactgaaaaaggacaagagaaatagaaagcaggtaattttacaacagcatgagatagatctttttcttcgagactataaagagaaacaaaagttagccaatgaaataaagatccgcaagacgttcaggaggatgacaaagatttgcgtggttttgaacaaaagttacaagaacttgaagaagaactga

SEQ ID NO: 3695 - DNA, 1014 bp, Saccharomyces pastorianus
atgattggtgatgaggcaagcgacgttcgttcctatctacaaatttcttatcccatggaaaatggtatcattaagaactggacagatatggagcttctttgggattatgcctttttcgaacagatgaaattaccatccacttctaacggtaagattttattaacggaaccaccaatgaatccattgaaaaatagggaaaagatgtgcgaagtgatgtttgaaaagtacgatttcggtggagtttacgttgctatccaggccgttctggcattatacgcacaagggttgtcgtcaggggttgttgttgattctggtgacggtgtcacccatatagttccagtttatgaatccgttgtgttgaatcatctgacaaggagattagatgttgcaggtagagacgtcactagacacctaattgatctactctctcgtcgtggttacgccttcaacagaaccgctgattttgagactgttcgtcaaataaaggaaaaactgtgttatgtctcatatgacttagacttggatacaaaattagccagggagacaaccactcttgtggaatcgtatgagctaccagatggtaggacaatcaaagtgggtcaagaaagatttgaagctccagaatgtttattccaacctggtttggtcgacgtcgaacaaccaggtgtaggagaactactattcaataccgtgcaatcagccgacgttgacattagaagctctttgtataaggctattgtcctttcgggtggttcaagcatgtatccaggtcttccctcaaggttggaaaaagaattgaaacaactatggtttagtagagtcttgcacaatgatccttcaaggcttgataagtttaaagttagaatcgaagatccaccaaggagaaagcatatggttttcataggtggtgcggtcttggctagtatcatggctgataaggatcatatgtggttgtccaagcaagagtggcaagaaagtgggccagccgcaatgagtaaatttggtccgagatag

SEQ ID NO: 3696 - DNA, 333 bp, Saccharomyces pastorianus
atgtttttcccagaatctagagaagaaacctactatcaagaatccgctggtgttgctgacttgatcaccacctgtgccggtggtagaaacgtcaaggttgctagattaatggctacttctggtaaggatgcctgggagtgtgaaaaagagttgttgaacggccaatccgctcaaggtttgatcacctgtaaggaagtccacgaatggttagaaacctgtgggtccgttgaagatttcccattgttcgaagccgtctaccaaatcgtttacaacaactacccaatgaagaacctgccggatatgattgaagaattagatctacacggagaatag

SEQ ID NO: 3697 - DNA, 585 bp, Saccharomyces pastorianus
atgtctgctgctgctgatagattaaacttaacctctggccatttgaacgccggtagaaagagaagttcttcttctgtttctttgaaggccgctgaaaagcctttcaaggtcaccgtcattggttccggtaactggggtaccaccattgcaaaggtcgttgctgaaaactgtaagggttacccagaggttttcgctccagaagttcaaatgtgggtgtttgaagaagacattaacggtgaaaaacttaccgaaatcataaataccagacaccaaaacgtcaagtacctgccaaatatcactcttccagacaacctggtcgccaacccagatttgattgactccgttaaggacgtcgacattctagtgttcaacatcccacatcaatttttgccacgtatctgtggccaattgaagggtcacgtcagctctcacgtcagagctatctcctgtttgaagggtttcgaagtcggtgccaagggtgtccaattgttgtcctcttacatcaccgaaaacctaggcatccaatgtggtgctttatccggtgctaacattgccaccagaggtcgaccaagaacattggtctga

SEQ ID NO: 3698 - DNA, 222 bp, Saccharomyces pastorianus
atgtgtagacaagtgttccagctgcaaaaaggtttagcaatcaacgatgcgcatatcagaaaattcgttgaggtagtttcaagaagaagagaagagatgatagaagagggcgtggcggaagattttgtggacttcgatgaaccgatacggcaaaatacagatagcgcaatagacagagaacaagttgatactgttctggatgaagactttttgttacggtaa

SEQ ID NO: 3699 - DNA, 129 bp, Saccharomyces pastorianus
atgctgaaggaacaactgggccactcccatgaggagtaccttgaattcattgttatattactggtcggtgtggaagtgctgatatcggtgataaatattgtggttgacatgttcgccagccaacgttga

SEQ ID NO: 3700 - DNA, 1044 bp, Saccharomyces pastorianus
atggtagacagcaataattaccaaccggagcgtcaggcattacttgataatgaccaacacctctcgaataatagcaaattatcttcgaatcccaaaaagtacgtacccactccgcaagatacaagaaagtctagggcttcatatacaggaagtgccatgattaatcccataagtaaacagagccgtacaggtgcaggtgcccaaagaacatcacgtacagcgcaaaaactaaaacttctgccagaagagccattccaaagagacgacgaaggacttacagacctaaagaatcaggaagtgtattcccaggtaaatagaataaaagataagcccgcgagaagagatgctgaaaagctaggaaaggctcacaggcatttgctcccaaggtctactgcatattgtacttctagcagttacaacatgaaagaactgataagatggttaaaggattctcgaaagatacatcacacccatccaaaattattcgatgaatgtttgtacaccccgtttatatacaacgactggagaggtgacaaaagatttgaacatgaagacgttattcggttagacgatgaaggtggtgaaattattgttagtgataagcacccagatttgttcatttttgaatatggggttgtcgttatgtggggattcacggaaagagaagagaaggcgtttttaaatgatatagaaaagtttgaaaaggaaaaattagctgaagaagatattcaagtagaagagtttaattattatgtgacaaaaagttatcaaccaaggatctacaatgacttcattactctgagagacggctcgaactatatggtcaagctctcaatatctcatgcaattgctcaaagtgtgaagatttctttatttgaggagttggtagataatactatcgaagatactcaggatataccgcaagaaattgcgtatagtgggaaagtttctatgagcaaagaggacataatgaaaagcataggtgagctatttatcctaagaattaacataaacttggcatggatcggttttagactcacctga

SEQ ID NO: 3701 - DNA, 651 bp, Saccharomyces pastorianus
atgataacacttttttacgagattttacaagagcagatcgaccttctcatacacaaaagagcgaatgataataatggcgatggcggagtcattattgaagatgatccattcagttcttcctcgtggaaatggggaagatggattttttttatttttttcgtaattgctatccttatactgttattttcagctgcaaaagtgaataggagaagacgaatcatgggtcaggctcccattagaggaactgcttggttaaccccgcccacatataggcaatccgaaagagactacaatggcacacagcgctgtgttgaagactacgtcccggagtatacagaaacaacgaatgaaaatgatttggggttttatgacgaacgcggggagtttcaccctaatggcaaaaccgaatatttaccgccgccgcctttatcgggagaccgagctgattcgacagacaaagatttacagcgcccaaaagctgctgtagtacgagtgtccagtgaaagtgaatttgatttgaatttaatgcgacctactatgaataatttcgatagtaatggaaatagtcgcgtcgggcagaattctccaataatcacatcgtcttcctttgacgttgattccacacctggaaggcctaaaacgactaagtga

SEQ ID NO: 3702 - DNA, 1347 bp, Saccharomyces pastorianus
atggatctttacgatgaattgccagaaagtaagctcctttatgacgaagaatacgtgtatcttttggatgcagttcaacagaacaatgtctgcgttgtagattttctaacgcttacaccaaaggaattagcaaggctagtacagaggtcaataaatgaagtcttcagatttcagcaattgcttgtccatgcgtataatgaaaaatacctagaaatttgtgaaaagagctcaatcagtgcagatgaaggtccaaagtgcttttcaaccgctgatgtagcgatagatgaattgttaggtggaggaattttcacgcatggtattacagaaatatttggggagagttctaccggcaaatctcaactactaatgcagttagcgctaagtgtccagctctctgaagctactggaggccaaggcggaaaatgtgtatacatcaccacagaaggtgatttacctacccagagactggaaagtatgctatccgctaggccggattttgaaaaactaggcatttcacaatctaaaatctttacggttagttgtaacgatttaataaaccaagaacatatcattaatgttcaattacccatcttattggaaagatctaaaggctcaataaaactggttataatagattcaatatctcaccacttgagggtggaacttcaaaacaagtctttcagagaatcccagcataacaaaaactacttagacaagatggcagaaaagctgcaaactttggcccatgattattcattagccgttgtagtggctaaccaagtaggagacaaaccactaggaaatagtctggtaccgcataaggcgtatgtaactgactatgactaccagctaggttggttagtagggtggaaaaactctactattctttaccggcagatgaattcactgctgggggcaaatgccaacaacgatgaaatactttcagacgatgaagattatatgttaatcgagagagtactaaaaaatgtagatgaccgagctcataaatcttcctcacaaaagaaaggtccaatcaaaactgaaaagaaatttttcgaacaactcccacagggctttattaaccagcaaaagaaaaaaagaaagttcgactatcgtgttcctaatttaggtctgacatggtctaatcatgtatcaacacgaatattacttcaaaaatcattcaaagcttcaacaataattcagagaggcgaagctcacctttatacgggaaatgacccagcaaatttttggcaagttagaaggacactgaaagtggtatattcgacgttcgttaaacctgggcaaatggcataccaaatcactaaaagagggatagaaacagtttga

SEQ ID NO: 3703 - DNA, 720 bp, Saccharomyces pastorianus
atgagctcctcttctctagattcgtctttcaaaaatcatgagaaaatgagaagaagaagtagtagtagtatcagcagttttaaaagtggtaaatcgtcaaatcataactccaacaatgccggttcaaccaccaataatgttaacaaaagaagaaagtcttcaataaacgaacgaccaagcaacctaaatttgggtccattcggtcctataaatgaaccatcgagcaggaaaatattcgcttacttgatcgccattctgaatgcctcctatcccgatcatgatttttcatcggtagaaccaactgatttcgtcaaaacatcattgaagacatttatttccaaatttgaaaacactttgtactctcttggcaggcaaccagaagaatggatttgggaagttattaattcacatatgaccctttcagattgcgttcttttccaatattcgccttcaaactccttcttagaagatgaaccgggatatctttggaacctgataggtttcctttataacaagaaaagaaagagagttgcttatctctacttaatttgctcccgtttgaattcgaatacaagcgaagtagaagatgcttccgtcaaagaacttcagggcaaacttataatagatgatggttcaaatgaatatgaaggagaatacgattttacttatgacgagaatgtaatagacgataaatcagatcatgaagggccccttcattag

SEQ ID NO: 3704 - DNA, 813 bp, Saccharomyces pastorianus
atgtgtcgtggtggtcgtatgttcgctccaactaaaacctggagaaagtggaacgttaaggttaaccacaacgaaaagcgttacgccactgcttctgctattgctgctactgctgttgcctctttggtcttggccagaggtcacagagtcgaaaagattcctgaaattccattggttgtttcctccgatttggaatccgtccaaaagactaaggatgccattgctgctttgaaggctgttggtgctcactccgacttgttgaaggtcttgaagtccaagaaattgagagctggtcaaggtaagtacagaaacagaagatggactcaaagaagaggtccattagtcgtatacgctgaagacaacggtattgtcaaggctttgagaaacgtcccaggtgtcgaaacctctaacgttgcctctttgaacttgttgcaattggctccaggtgctcacttgggtagattcgtcatctggactgaagctgccttctccaagttggaccaagtctggggttccgaaaccgttgcctcttccaaggtcggttacactttgccatcccacatcatctccacctccgatgttaccagaatcatcaactcttctgaaatccaatctgctgttagaccagctggtcaagctacccaaaagcgtacccacgttttgaagaagaacccattgaagaacaagcaaattttgttgagaatgaacccttacgccaaggtttttgctgcagaaaagctaggttccaagaaggtcgaaaagaccggtaccaaaccagctgctgtcttcactgaaactttgaagcacgattaa

SEQ ID NO: 3705 - DNA, 570 bp, Saccharomyces pastorianus
atgcattttttatctggttttacttacataccaataaataaccaattaaacaaacaaactataatgtctcgtccacaagttactgttcactctttgaccggtgaagctactgccaatgctttgccattgccagccgtcttctccgctcctattcgtccagacattgtccacactgttttcacctctgtgaacaaaaacaagagacaagcttacgctgtctctgaaaaggccggtcaccaaacctctgctgaatcctggggtactggtcgtgctgtcgcccgtattccaagagttggtggtggtgtaccggtagatccggtcaaggtgctttcggtaacatgtgtcgtggtggtcgtatgttcgctccaactaaaacctggagaaagtggaacgttaaggttaaccacaacgaaaagcgttacgccactgcttctgctattgctgctactgctgttgcctctttggtcttggccagaggtcacagagtcgaaaagattcctgaaattccattggttgtttcctccgatttggaatccgtccaaaagactaaggatgccattgctgctttga

SEQ ID NO: 3706 - DNA, 345 bp, Saccharomyces pastorianus
atgttaagacaaaggagtggtgaaggggagaagcgtgtggcaatatatcggttaattatggctagtacgtctagtgaggaaaacaaaacaatgtcgaccactgacgaatttttcatagaacaaaggaatatagtgttgcaagagatcaatgagacgatgagttcaatcctaaacggtttaaatggtctgaatatttccttggaaagttcaatcgctgtggggagagaatttcagtccgtttcggatttatggaagacattttatgacgggctggaaagtatatctgatgaagtgcccattgacgagcaatctactttacctcaaacgaagacaacgactaaatga

SEQ ID NO: 3707 - DNA, 1230 bp, Saccharomyces pastorianus
atgcttcacagctcaggagatatgaagcaaacacaaacacaacagtatcatgacatttatcacaagactaataatgccgttatcaaggtgttacagagagcgtttatcatatgtttctttcttttgggatctttgagtatcgtaatcttccaggtttgtttgcatttgcttctaccctggagtaagatcagattacagaatggcatgaaccagagcaagaaagcgttcatcgttttgctgtgcttgattttaaacatggtggctccctcctctttgaatgtcactttcgaaacatcacaatcatcgaagagttcctcacctagcgccaattcgcgtttcaaattcaaagataaggccattatcatggctaaccatcagatgtatgcagattggatatatctctggtggctttcatttgtctcagacctaggtggtaatgtctttatcattttaaagaaaactttaaaatacgtcccgatattggggtttggcatgcaaaacttcaaattcatattcttaaatagaaactggcaaagggatgaaacaaccctaactgatagtttagtttccatggacctgaatgcaaggtgcaaggggcccctatcgaattataaggcttgctactccgagacaaatgcatccattgcagcctataatttaataatgtttcctgagggtacgaacataagccccaatacgagagaaagaagcgaagcataccgtcaaagagcccgcttgcaccacgttcacttgagacatgttttgctaccacatgctaaagggttgaaatttgcactagaaaagctggctcctagtttagatgctatctacgatgtcaccattggttattttccggtcctgaagactgaatacgctggcaccaaatttactctaaaaaaaattcttttgatgggtatataccctgagagaatagctttccatataagagaatttgagatcaacgagatccccttgcaagatgacgaggttttcttcaattggttactggatgtgtggaaggataaggacgaattacttgaaaactactacaattcaggccagttcaagagcctcaacgaaaataagaactcgtccgctgtcgttgttaagcaaacagacggattccaacacgatgcgctagtaccccggatcctttcctactacggtatgctggctttccttgtgttcctatttgcgatgaaaaggctctccgagctaccagtaagctag

SEQ ID NO: 3708 - DNA, 234 bp, Saccharomyces pastorianus
atgcaccgtactattgtcatcagaagagcttacttgcactacattccaaagtacaacagatacgaaaagagacacaagaacgtcccagttcacgtttccccagctttccgtgtccaagtcggtgacattgttaccgtcggtcaatgtagaccaatctccaagactgttagattcaacgtcgtcaaggtctctgctgctactggtaaggctaacaaacaatttgctaagttttaa

SEQ ID NO: 3709 - DNA, 129 bp, Saccharomyces pastorianus
atgggggtgtgtcgacagagtgtttattttttttcgttgccctatttacctcgtgttcttctgtctttgtcttgcaaaaggttgttgcacaatctcagggttggttcctttcttcaatatccagtatga

SEQ ID NO: 3710 - DNA, 366 bp, Saccharomyces pastorianus
atgtctgacgttttagacgagattgtaatagaagacgttgtggcaaattgcccacaggagtttttgcagtatcacaagtgtataagggataatgaggataatcctgggaaatgccaagatggaagattgacgctatcgacgtgtatcagagagaaagtgcccagtgtgaaaagtatcatgagtgaatgtagtgagccaatgaagaaatacgaccagtgtattcgcgataatatgggaagtagaacaattaatgagaattgcttaggtttcttacaagatttaaggaaatgtgcagaattgcaagttgaaaacaaaaacatcaagcctacgattaacggaacgagcttggaattaattaagaaataa

SEQ ID NO: 3711 - DNA, 2919 bp, Saccharomyces pastorianus
atgaactctttgaaaacattgagctctcccaatgcacatattatcagaaacgggaaaagtgaaaccgtgaattcaaaaactgtagttcctggtgacatttgtcttgttaaagtaggtgacaccattcctgctgatttacggttgattgaaactaagaatttcgatactgacgaatccttgttaaccggtgagtcactaccggtatccaaagatgccgctttggtttttggtaaggaagatgagacttccgtaggtgaccgtttaaatttagcattttcttcttccactgtggtcaaaggaagagccaaaggtatcgtcatcaagacaggtttgaatagtgaaattggtaaaatcgcgaagtcattgcaaggcggtacgggtctcatctcccacgaccccagtaaatcctggctacaaaatggatgggtatccactaggagagtcattggcgcgtttttaggtactacagtcggcacccccttgcatcgaaagctatccaaattggcagtgctgctttttgggattgccgtgctttttgcaatcattgtcatggcctctcaaaagtttaatgttgatagaaacatagctgtctatgccatctgtgtggccctgtccatgattccttcttctttggtcgtagttttgacaatcactatgtccgttggggcaactgtaatggtcactagacatgtcattgtcagaaagttagactctttagaagctttaggtgctgttaatgatatctgctctgataagactggtactctgactcaggggaaaatgctggcaagacagatctggatcccctcctttggtactattactatttcaaacactagtgatccgtttgaccctagccaaggcgatgtgaatttgataccaaagctatcgccttatgaatactcccatgacgatgacggtgacgtcggaattcttcaacatttcaagcaacgtctgtacgataaagaattacctgaagaaatagacatggatctgtttcaacgttggctggagacagcaactttagctaatatcgctaccgttttcaaagacgaagagactgatacctggaaggcacatggtgatccaacagagattgcaattcaagtcttcactaccaagatggacttgcctcgtagcatccttactggtgaaacatccaccacccaagaaggtgacaagtgccaatcttcttcaaacgacattgaaaagcccggttatgtccaattcgagcatattgcggagtttccgtttgattcgaccatcaagagaatgtcgtccatctattttaacaatcacaacgatacgtacaacgtttatgccaagggtgcatttgaaagtgttatcagcagttgtagccattggtatggaaacgatggctcgaaaattacaccattgaccgaccatgacatcgaaactataaggaaaaacgtttatagtttatcaaatgaaggtttaagggttttaggttttgcttccaaatcgtttacaaaagatcaattaattcacgaccaactggcaaacataacttcggacagagctactgcagaaagtgatcttgtctttttaggtttaatcggtatctatgatccgccaagaaatgagactgccggtgcagttaaaaaattccatcaagctggtatcaatgttcacatgttaactggtgattttgttggtacggccaaagccatcgcccaagaagtgggtattttgccaactaacttataccactattctcaagaaatcgttgacagtatggtcatgactggatttcaatttgatgcattaagtgaagacgaagttgatgacctgcctgttcttcccctagttattgcccgttgctctccgcaaacaaaagtcagaatgattgaagctttacatcgtagaaagaaattctgtgccatgactggtgatggtgttaacgattctccatctttgaaaatggcgaatgtcggtattgctatgggtatcaatggctcagatgtctcaaaagaagcatccgatattgttttaagtgatgacaattttgcttccattttgaatgccgttgaagaaggtcgtagaatgacggataatatccagaaatttgttttacaattgttggcagaaaacgttgctcaggcattgtttttgatcattgggttagtgttccaagatgaaaacggtagatcggtcttccctctatcgccagtcgaagttttatgggtcattgtcgttacttcttgtttccctgctatgggattaggtttagaaaaggcagccccagacttgatggatagacctcccaatgattcagaaatgggtattttcacttgggaagttattattgatacattcgcatatggattcataatggcgggcgcttgtatggcatcattcactgcatccctttatggtattaacaatggtacattgggacacggttgtgatggttcctacagtagtatttgtcatgacgtttatagatcacgttcagcagcattcgcaaccatgacatggtgtgccttaattctcgcctgggaagtggtcgatatgagaaggtcattctttagaatgcatccagatactgacagtcccgtgaaagaattcttcaagggcatttgggataaccaatttttgttctggtcaattatatttggatttgtttcaaccttccctgtcgtctatattccagtcattaatgacaaagtatttttgcacaaaccaattggtgcagagtggggcctcgccattgcattcacgctagctttctgggtaggcgctgaactttacaaatatgggaagaggtgctatttcaaaactcaaaaggcccacaatccagaaaacgatttggagcgtagcaataaacgtgatccattcgaagcatacagcacgtccactacgatccaaagtgagcttaacatcagtatgaagcaataa

SEQ ID NO: 3712 - DNA, 300 bp, Saccharomyces pastorianus
atgagttcagacgcagttaaagatggtagtgctgagttcagtgcctaccacacactcactgcagaagaagtggcagaatttataggtacaaacttaaccaatggtctcaccgaggatgagtttgaagaaagaatgaaaacagtgggtgaaaatacgctgggcgatgatagcaagatcgattataaagcgatggttatccaccaactttgcaacgcaatgattatggttctgttaatatctatggtcatctcctttgccatgcacgactggatcgacaagcttgatccggccataaggcca

SEQ ID NO: 3713 - DNA, 1887 bp, Saccharomyces pastorianus
atggctaacgtactgaagaaaaatgacctttacatttttgatctatctaaaccgcttctaaattcgttagacttaatgagttttgattattcattacgagaaattgagatagatacagggtctcaccggaacgaggaaaagactactgaagatgtccagtcactacagcaaaagagcccatcaaactccatgcgttgtactgtttgccaagtagatttcgaatccagagatgttcaaaaggctcactaccagactgattatcacttgatgaatgtcaagcggagcctgaggggactgaatgtcttatccctgagtgaattcgatgaggtagtttctaaagaacttgacaacaaatcaaaagatgaaaatactgaaaatgaacagtcctctagtggtgaggcagacgaaagtgaagaagttagtgatcaggaatcggacgcatctgttaatgattacatggaaagcataattgaggacgatatgaaaaaactaagtcttcgagaagatgagtcgagtgttgttagtcacctcaatacacaatctccttacattttctttaaatcgagcactcttccaaaaaatgaagttctgggaatctacaaatctatattcagtaaagcatctctttcaaaaccttacgaggctttggattcttggaattcacaagaaagctcttcgatggcaatatcggccctgtttatggtgggaggtggtcattttgcaggagcgattgtttctcatcacagactcaatgtcaagggaaatgctcacaaaaagaatgaaacgttgattgagcaggctgttaatttattggagcacaagacattccataggtatactaccagaaggaagcagggtggttctcagtcggcaatggacaatgcgaaaggcaaagccaactcggcgggttctgcacttcggaggtataacgaaaccgcactaagaacagatatacaaggcgtgttgaaggactgggagccctatctgtcaaaatgtcagaacatttttattcgtgctcgtaatgttagtgacagaaaaattttcactgataataccatcttgaataaagacgacgataggattaaaagttttcctttcaccacaagtaggcccacagtattagagctgaagaaagcatggtgtgaactttgctacctgaagattttgcctaggcctgaacctttgacaataaagcaaacggtacaaaagccggaaacattgagtaaaaaagatggcgctgaagaaaagcaagagctttctacagaagaaaagcaaacagaagaagtggtttctttgataaagaaaggaagagcacctctattgattgtttttttaaagaaaaacaaacttgatgggagattccagctcaagcctgaaaccaagtactccttaactccgacgatgttgcattacgcatcgcaacagggcatgaaacaaatggtgattgttttactttccaatttaaagtgtgatcctacgatcaagaatagattgggaagaactccctgggatttgaccaaggatgatggcgtaagacacgctttccaaatcgcaagacacactttgggcgagtccttcaccaattgggacgaatctcatatcggcgaaccactaagtagagaacaggttaatgagctcaatgaattgaagcagtcgacggaaaatgaacgaactaaaaacatgatcaaagtggaattagaggctgccaaggaaagacaaagatctgccaaagatacagaaagagggccaggtaaaaagctgactagtataccatcagttcaccaacaaaatctgaattctttgacagatgaacaaagacgtagattgatgagagaacaaagggctagggctgcagaagaaaggatgaacagaagtcttgataaatag

SEQ ID NO: 3714 - DNA, 474 bp, Saccharomyces pastorianus
ttatggccggatcaagcttgtcgatcttacttccacgaagatgacaagttcgtcgctgaaaagaccaagttcgctttgggtgaaggtgtcggtgtcatcttgtgtatcggtgaaactttggaagaaaagaaggccggtaagactttggacgttgttgaaagacaattgaacgctgtcttggacgaagttaaggactggaccaatgtcgttgtcgcttacgaaccagtctgggctatcggttccggtttggctgctactccagaagatgctcaagacattcacgcttccatcagaaagttcttggcttccaagttgggtgacaaggctgctagcgaattgagaatcttatacggtggttccgctaacggtagcaatgccgttaccttcaaggacaaggctgatgtcgacggtttcttggtcggtggtgcttctttgaagccagaatttgttgatatcatcaactctagaaactaa

SEQ ID NO: 3715 - DNA, 576 bp, Saccharomyces pastorianus
atgagcaaaaacatgaagtcattgagtagactaatggttgataggaagttgggcgtaaagcaaacaaatagtaactataacacttacactaccgccgcgacaacaacaacaacaacaacaacagctacaacagcaacagccaaggaaactaaccataaatccaatgtaaatgtattgcaaaaagatgagatccgttcgcaaacgatgatcaaaggtaattccacacatacggaaaccaacaacaaagcacaggatcccccaaagaaacttgtaaagtctgcatccacgggtctaaagttcagtaatgacgtcaagataataactacggaatctacaacagcatcgaagaagaccacaacttccacacacaccacgttaaatcccagcctaaacacaacaacacagccagcgaagaaagaaacaataaaaaattcaggatactgtgaaaactgtcgtgttaaatatgaatctttagaacagcacattgtatctgagaaacatttgtcttttgctgaaaatgatctaaactttgaggccattgactctttaattgaaaatctaagattccaaatctaa

SEQ ID NO: 3716 - DNA, 120 bp, Saccharomyces pastorianus
atgaaggaaattgaagacgggaagcattcgctggaagaggaagaagtaaatagacacttcattgagaaagaatctaagaagatcctccaacggaaaaaccaattgctacaccaaagctaa

SEQ ID NO: 3717 - DNA, 396 bp, Saccharomyces pastorianus
atgatttttttccagttggtttgccattccagtaattccttaggtgtgacccttggctcgacgttttttaagcctgtacccttactcacctggacagcgccttcaatggacctggccctttctagcttagcctttttcttttcgtgtaagtgttgttgttgttgttggagctcgaggcgctcaagggaccttttcttcgggaaggattcattagtgttgttgttgccattgttatcgttagggagcgcgttcaaatgggccgttgccgttgccgttgatacaggaatgccattgttatgtttcaggttcgtgtccgtttcctttaatggagacctaatcagcatctttgttggtgataccatattctctctggtcctgtttatgaatcaaagttga

SEQ ID NO: 3718 - DNA, 609 bp, Saccharomyces pastorianus
atgttgatgcggttgttgcgagttatctcattggccggggtggtcttcggcgctgatgttttgcaattaagttattcagatgacaagaagaacactattccgttaggaacctttgaaatcgacagcacaggcagtggaaacgtcacagtcacaactgttgatttgcgagacgtccaagcggccggatcgtactgcttaaatgcagaaattgaaggtaaactagatatgccatgtttcagctacatgaaactagagacgccattaagatacgatttgattgtggatgtggacgaaaatgatgcggtcaatcaggtctctctttcatacaatgacaagaatgacgcaattgttggtgttgtaaggtacccagaggaaggggcaagtgcaccagtggctaaattaaagaaaaagaccaagacttatgctgacaagaaagctagtaatagcaaggatggaagcactgcgcaatttgaagaagatgaagaagttaaggaggtttcttggttccagaagaactggaaaatgttagttattggtttattaatctataacttcgttgcgggttccttgaagaaacaagcgcaaaccggtgaagctaagaaagactga

SEQ ID NO: 3719 - DNA, 333 bp, Saccharomyces pastorianus
atgggcccctcggactcaccttacgcaggtggcgttttcttcttgtctatccattttcccactgattatccctttaagccaccaaaagtgaactttaccaccaagatttatcatccgaatattaattcgagtggtaacatttgtctggacatcctaaaggaccagtggtctccagcgctaaccctttcaaaggttcttttgtctatttgctcccttttaacagatgctaaccctgatgatcccttggttcctgagattgctcaaatatacaaaacagataaggctaagtacgaagccactgctaaggagtggacgaagaaatatgctgtttga

SEQ ID NO: 3720 - DNA, 243 bp, Saccharomyces pastorianus
atgagaatcttgaagtctaacggtttggctccagaaattccagaagatttgtactacttgattaagaaggctgtctctgtcagaaagcatttggaaagaaacagaaaggacaaggatgctaaattcagattgattttgatcgaatctagaatccacagattggctagatattacagaaccgtctctgttctaccaccaaactggaagtacgaatccgccactgcctctgctttggttaactag

SEQ ID NO: 3721 - DNA, 606 bp, Saccharomyces pastorianus
atgcaacccatgatgtctgtgataagtattccacttatacaaaaagaaatccttcaaccacaccaactacatgaacaattgtctttgttcgaagctcaaatggttgaatcagccatagtttctatgctcagtgagtcattctgcaaaaatgagcaaaccttgaaatatttggcacggttactttcaccaatgtcatatctggatattatcaatgctaggtccgggaataaaatatgtggatacccgttatgtcatgaaaggatatcagaaaacctctctgatggtctccttacctactcgatatattgcagcaaatttcatagtaaatgctcgttgtacttgataagacaattaccacaaatacctttgaatgaaagatcaggggtgcactcaactagctactacaatccaagcttcaatgatgtttataatgttgatcttttggaagagttgattagaaataggatatctacagctacggttacatcactgactgcagatttcgagtgtcttgaagttgatgatatccacaaagatgagactacattactagatgaatattctgtgcaagtgactactgaaaagaactcatgtatgaaatactag

SEQ ID NO: 3722 - DNA, 936 bp, Saccharomyces pastorianus
atgaaatgctttggtttcgctctagggctgcaaaacatagcaggtgtctttacccatcttctcatccccatggcttcgccatggtttacccatttatacggcattaacgacactgaacacgtcaattacacccaggaaggatttgctgctggactgataagagtggacacacatctaggtacgcatttgaacaccaaggggttccacatgtcacccatcgtcttcggcgccgtcccttccttgcattccgccattgcattccaatgctttctatttttgctctcacggtccactagcttgaaacatagattctccaacataagaaatttaacggttaataacatcgattcttctaccctcaagttaaatgaggaagacgacgaagatgacgctgataacaacgcagcgggcatgttccgtcccggtgacttggagatggaaccattgagtaccattgagtctacagatatcttgaatgaacgatctccctctccctcatcttcattttctgtatctagcagtgaacgaagccctagtaacagttccagcgccgttatcagtaatgatggccataagaaatcactccagttcgtccaattatatgaagaagatacagaatttacaaacaaatgggtgttcaaaatgataaacaagggattagtaccaaaactctgtgcaatttcatatattatactacaatggtgggccaccatgtatctcgaccaccattatcgattcgatctttttatcggagtcttatatgcaatggtaagttttattattataaattggtttgttttacagccaaaagtattaaaaagttggattcacttaaggttaggtaacaaagtggatacaagaaacgaagctcgtactttcggtatgagagtcttttgtggtaccaagatggaatggttcttcgatccattggcatag

SEQ ID NO: 3723 - DNA, 462 bp, Saccharomyces pastorianus
atgaatgtcatatacgttctggcgactttcgtcaagaacatgtacaatgcaggtttgaatcagcggagcctcatcactctgccgttcaacttcctactcaacttcgcacccgttttcatttggttatccatattcaagcatgccggcctaatacccactgagatcaggcccgaaattcacagcaagttcgcattctttgccgaccaatttctttttggcgactactggaatgagctggctgtccagttacccaagaacggttctaagctggttttctggtccttcgtatcgtcttctgcattttttctaacattagtctgcctccctatcgctatttggtactatatctactacgtcaagcacgtgaactataatttagttgagtggttctcaaacgtcttccattctcctcgtgatcacaagcagcaaaagcctatccataaaagtctaaggactatctga

SEQ ID NO: 3724 - DNA, 1182 bp, Saccharomyces pastorianus
atggctttattcaacgtggaaggttgggatataaagacgaaatctgtcgtttttgataacaagaccagcaagtctgcgaaggataaaaaaaaaaataagaatagaagaaatgacaaacttacaagagaacagaagttaaaagaggagacagaggccgaattaaaagaaacagtggaaggcgtttcccctgaagaaggggtagctgaaaagaaacaagaaaaagaaggtaaaaatgcaaagagtaacaccaataataagaaacgtaagcacgatgaaggtggtgcgtctgaacaaacaaaagaggttattgaacagcctgcaaaaaaacagttgactcctttacaacagaagatgatggctaaactaacgggttctagattcagatggatcaatgagcaattttatacgattacctcagatgaagctttaaaattagtgaaagaccaaccacaattatttgacgaataccatgatggtttcaggtcgcaagtgcaaacatggccagaaaatccagttgatgttttcgtcgatcaaattcgttatagatgtatgaaagctgttaatgcgccaggtggattgccaggcctaagagaaagcaaagagatagttatagctgatatggggtgtggtgaagctcaattagcgttagagatcaataattttttcaaaggttataacaagaaggccaagaagtatttaaagaggcgtcacaaagttcatagttttgatttgaaaaaagccaacgaaagaataactgtggctgacattaggaaagtgccattaccagatgaatcatgtactatcgtggtcttctgcctagcgttaatgggaaccaatttcctagatttcattaaggaagcatatagaatcttagctccaagaggtgagttatggatcgcagaaatcaaatcaagatttgctgacagtagaggaaatgaatttgtagacgctttgaaattgatgggattctttcataagaaaacctttgatgaaaataagatgttcacaagatttgaattctttaaaccacccgcagaaatcattgaagagagaagacaaaaattggaaagaagacagaaatttattgaagttgagactgagaaggaagaactagaaaagaaaagaaaaaaggttgccgaaggtaagtggctattaaagccttgcatctacaagagaagatga

SEQ ID NO: 3725 - DNA, 414 bp, Saccharomyces pastorianus
atgcccacagattcacgacagcccttgtttggtacgataagctcaccaatggatattggaaatgacataatagacagattgagaaatgattgggaatatatcaggttcgatgattgtggaaattcgccccctaaatcctcgtcaagcaacgtcgaagctgtatcaaaaccatccaaaaaaaaaggcgtccggtttgctgaagaagtgtgcctagcaagtacttggtcaccgaatgtatacgagagagccaatccagaatttatcatgaatcgccatagattattgtggatgatgaaggtgaatccgagcatgaataaagccatgaacgaggttaaactggaacttaactattttaaaagaaacgagatggttgtccataaaaacagtaagtgtttcacgcattatctgatctaa

SEQ ID NO: 3726 - DNA, 1137 bp, Saccharomyces pastorianus
atggaaagaccatatttgtccggccaagaagaccaatacatatcagagcgattgatacctaggtcaaactcaacttcgaatttgttttccttgtctagtacattctctaagcttaatgtcagaaacgatgcggaatacaattcttttggcccaaataaaaagagacaaattaaccgttgtgggaacggccaagagcatatgactagaaccaataattttccaatgaggtcttcttcaatgacagccgcccaacgtaacaacaaaggcgcattgtttacagtcaaaggaagaaactcataccacgaagggttaaataaggatcactattaccaagaccagtgccaaaatacaccgaatagcgtaaggatgtacaaaaagttaacaccttatcaaatgcaacgttctaaaatgaaaacaagctttcaatttcctaatggggaggtgttcaagccaaaacctgaggggagaaactctaccagctcaaaaaaaataagcttatcttccaagaacccattttcctttcgctttggccagaaggaaggtagtgcttcgttagaaaatcttcccgccaaagtttcctctgctccgaacatggaaacttttcaggatacggatagcctgaactcagacagttcagttccctcgacgacgaaaagttcgatagcgtcatcttctccaatatccaccgttaacactccaaccagttgtacagaaagccatacagatgatgatgacggttttgaaaataaaaccgtcaccatatcttacagcttccaaaatgccgtcactgaaactcacaactcccatatagaaaagctgaatatgttgaacgaaaaagaagccaagctacctacaaagccagggccacgggaaagaaaaaacaaagctaattcaggttatcgtagaaacgaatgcaaaaaatcatcctcaagattaaatttgggttccgttttgaaaaaactttggtcgagttctggaaaatcaaacacaaagcctaataagaagtatccgaaaaaaaagttggaccctgacgatgatatcgctgaccattttgttgagcttcccgacatggaaaatgatatcgaattgatgaatgcaactttgaacagcattgaaattgatgacgatgaaccttaa

SEQ ID NO: 3727 - DNA, 411 bp, Saccharomyces pastorianus
atgaaaatagttgaggaaaaatgccaagttactaaaggttgccttaagcgggagcttaaaggttacacagggatcccaatccatatcgttgatattctattggacgaatgggagagattactcaaggacgaagaagaagacgacgaggatgaagatgatgaaaagaaggaagaacaactgcgcaaactggctgaaagcgcaaaagaaacaccattgatcaaggtcaccgggatattccaagaccttgttgctgattacaacaccagcaaagtcttgagagaaaagatcaaagaagacctattcagcgacgccagacttactgcctggggcgttctccatgaggaagtggccgggaaagacgctgacagcgaatctgaagaggaggaagctgaagaatgggaggggttttag

SEQ ID NO: 3728 - DNA, 699 bp, Saccharomyces pastorianus
atggagacttcaaatttcgttaagcaattatcatcgaataatagaaagactagagaaaatgcacttgaggcgttaaagaaatatttaaccgctagacaattcaaagagaacaaacagctgcagttcaataagctgtggaaaggtctgtactactccatgtggtttagtgatcgtcctagaccacagcaacgtttggccagtgaattaggtgagttgcatggattgtattttgattccaaggacaatagtagtgcagatgagttaacgataaatgacaaagcgttcctcaagttcagtaagggtttctggaaggttatgtgtttcgagtggttcaacattgatagacatagagtggacaagtatctgttattgataagaagagtgttgttcaaccaactgaaatatttacagtcgagaaactgggatgaaaaactagttgatgaatacattgccaaggtactaaaagggttgcctttaagcgggagcttaaaggtttacacagggatcccaatccatatcgttgatattctattggacgaatgggagagattactcaaggacgaagaagaagacgacgaggatggcgatgatcacgagaaggaagaacaagactggcgccaaactgggctgcaaagcgcacaaagaaatcagccattgatccagggtcacccgggactattccaaggaccttgttgctga

SEQ ID NO: 3729 - DNA, 759 bp, Saccharomyces pastorianus
atgccagttattgaaatcgacgatcaagaccaatttacccacctaacaaccactgtagcaggtgacaagttaatagttctttatttccatactagctgggcagaaccatgcaaggcattgaaacaagtgtttgaagccatcagtaatgaaccttccaacactggcgtctcctttttatctattgatgccgatgaaaactcagaaatttcagagctcttcgaaatctcagctgttccatattttatcttaatccataagggaaccattttgaaagagttgtccggtgcagacccaaaggagtttgtgtctttattggaaaactgcaagttgtcaataaatccaaaattggcacaaactggtacgattactgaagacgcaaacgtgaacgaagaaaaccagaatgaagatgatgaagacgacgacgaagaggaggaggaggaaactgaggatcaaataaacgcaagattgactaagttggttaatgctgctccagtaatgctattcatgaagggaagcccctcagaaccaaaatgtgggttttcaagacagctcgtgggcattttaagagaacatgaagtaagattcggtttcttcgatatattaagagatgatgctgttagacaaaatttgaagaagttttctgaatggcctactttccctcagctgtacatgaacggggagtttcagggtggtctagatatcatcaaggagtccttagaagaagaccctgacttcttgcagcatactcttcaaacttaa

SEQ ID NO: 3730 - DNA, 2133 bp, Saccharomyces pastorianus
atggaattaaaaatatcctcttcaggagcactaccgtcagagaacaaattgttatctcaaaattccctggaagattcccaagcaaaattttatgttggtgtagatgtaggaacaggctctacgagggcgtgtattattaaccgctttggtaagattttgtccttggcagaaaagcccatcaaaagggaagaattaaggtcgaactttattacccaatcttcgaaagaaatttgggatgctgtttgccattgtgtaaaagtggttgtacaagaatcaaaagttgatccaaaaaacattcatggtatcggcttcgatgcgacatgttcattggtagttgtatcggctactgatttgaaagaagttgccgtagggcctgattttagtaaaaatgaccagaatgttatattatggatggaccatagagcgatgaaagaaactgaggagattaactcctccgcggataagtgtttgaaatatgtcggagggcaaatgtctgttgaaatggatatgcctaaaatcaaatggttgaagaacaatttagaaactgaaatatttaaagattgtaaattttttaacctcccagattacttgacgttcaaagctactggtagagaaaacaggtcattctcttctgccgtttgtaaacaagggtttttaccagcaggtgttgaaggatcaaagtcgggctggtctgaagaatttttaaactcaattggtctttcagaacttataacaaatgattttgaaagactgggcgggtcgttaagagataagagaaacttcttgagcgccggtgaatgcattggtttcctagatgtaaagtcagcctgccaactaggtttgacgcatgattgcatagtgggttcgggaatcattgatgcatacgcaggctgggttgggactgtagccgccaagccaggttctgcgatcccaggtctttccgaaaatgaagatcagaaaaatgatttcgatagtgctattggaaggctagctgcagttgccggtacgtccacctgtcatattttgttgtcaaaagacccaatattcgttcatggtgtttggggaccttacagagatgttcttgcaagaaatttttggactgccgaaggaggtcaaagttgtacaggtgctcttttagcccatgtgataaaaacccatccagcttttagggaactgtctcaattggcggatggagctagtgtatcaatatttgaatacttgaactcaatgttggaaactttggtacagaaacgcaatgagaggtctgttgtatccctagccaaacacttctttttttacggtgattatcacggtaatcgatcgcctatagcagatccaaatatgcgtgcttgcatcatagggcagtctatggataactcagttgaagatttggcagtaacctatttgggtgcctgtgaatttatatcacagcagacaagacaaataatagaagcaatgttgaaaaatggtcatagaatcgacactatttttatgtcaggtggccaatgtagaaatgggttattgatgagattactagcagattgcactggtctaccgataatgattccaggatatattgacgctgcagttgtatttgggtctgctatacttggagctgctgcaagcgaggcctttgatctggctaatgaaaagacgacttctcaaactaacaggtcttgtttgtcccaaaaagaaagtgttttcgatggctcatgtcagtcaattcaaaacttaccagaaggaggccaaaattcaaaaaatgatgtttcacctctttatccaacaccaacttatatttcaaatacacctgcagcactaaatagccatatctccccaatagttgaacgaccattacatgccgtgtcctctgttaaaaatgataaggatacttcagcttccacagaaacaggagggctacaaaaggaaaggcgcaatcgtacagatcttctatggaaagttatgcaagaattaactggcgaagcgaaagttgtcaatcccaacaataaaacacatcccgatagaatccttcttgatacaaagtaccaaattttccttgacatggctgaaaatcagagaaaatatagaagtatggtagatagagtggaagttaatttagtaaacaagtcaaagtag

SEQ ID NO: 3731 - DNA, 363 bp, Saccharomyces pastorianus
atgaatatgatgatcttgcgcatggattcttcagaaggcgaatatgaacctagcacgttgactccagtagtaaataccacacacaatttagaagaggtacgaatagaatcaaccagtgagacgactgatcttgatgggaatacaaagcaagaaagagatgagtctgaagaaagaaatctcaacagcgagaaagcaggtgcagcactgcagacagaatcacatggggatcgaagcgtagaaatcacaagcccagaaacatcttattatcaaactgaagaaccgccttcaacaaaaagacaaaaggtaggcaatcagggtcatggtgacataacaagggattttgggttgtcaatggaattgtaa

SEQ ID NO: 3732 - DNA, 378 bp, Saccharomyces pastorianus
atgtccaagttgcgttataaaggcaccttgtttgacgacgaaggtcactcattaccatccgaatcagccaaaaggaaatcatctccgcagaggagaaaaacaacatcaccaagggaatcgagagaatctttaaaagatcgtttgctgatactaccattaatgggggaatcgtatacagaatacgtggattcatatttgaacttggagttattggaaaggggagaaagggaaacacccatttttctcgaatctctgacaagacaattaacccaaaaaatatatgaattaattaagacaaaatcattaacagcagagactctgcaacaaataagtgataaatatgatggtgtagcggcagaaaacagctgctatttttag

SEQ ID NO: 3733 - DNA, 450 bp, Saccharomyces pastorianus
atggtaatggcgacacatctgatgaataagcaccttagagggaagacgctgcactcgtttttattttcgcatttcgctaatacaagtcatgcaatcattgattgggttcagcaattttgttcaaaatgtaataaaaaggggaaaattaagccattgaaggaatataaacgtcctgatatgtacgataaattactaccaatggaaaggattcatatcgaggtattcgaaccttatggtggaaaggcaattgagggtaaatatccctatgttttattgtgtagagactatcgttcaagttttatgtggttactgccattaaagagcactaaattcaaacatttaatccctgttgttgcttctcttttcttatcatttgctagaatcccgatttttgtcacctcaagcactcttgataaagatgatctctatgatatatgtgaagaaattgca

SEQ ID NO: 3734 - DNA, 150 bp, Saccharomyces pastorianus
agtagtaataataacgaatatgtcaatgacgctaacataggaaatgataactttgaagaagaagtacaaaaacagtttgatctaacggaacaaaattacatcgatgaatatgatgatcttgcgcatggattcttcagaaggcgaatatga

SEQ ID NO: 3735 - DNA, 378 bp, Saccharomyces pastorianus
atgacgattacgatattgcaaatagcacctcaaagacaggagcctttattatatgtgccggacggctatccgccattccagcaggaagatatcttaaaactgaaaacgttcaactctccatacgggcttgacctggaatgcgagagtaataacgctaacagcacagataaagttggcctgctttcattagtggaaattaacgaagaagttgagcaagacaacacggcacacacaattagcgatcaacaagagcctgctgcgctatcattagcgctcgagaacgccgaggacgatgagaacgctgcaattcccgttatagagtctctatataacggtgaaggactcgattccgaagaattggaggacttactcacttaa

SEQ ID NO: 3736 - DNA, 885 bp, Saccharomyces pastorianus
atgccagctaacgaagacaaggaaaataatgttgtatatacaggaaatgaaagttccagcaccagcttcccacagacaccagcccacctgttgaaaaggtcccattccaatgtgctaaagccacctgtgaggctagaccaactgaaaaaagatattaacagcaacaatggcaagaacttaaagtacatacagggaggtaaggaagtatcgcccacgaaaagattgcatacacatacacagcaacaagggagattgcctctggcagctaaggacaacaacagatcgaaaagctttgtgtttgctctcgacactgcaaaccagaataaagatgcggaacttgtaccgcaacaacagaatacattatctacacgcaagaacgatcagctcagaaagctctcgcagatctctcgcaatcgtaatagaggtaattacaacggcatgctgaacaacacaagaaagctacagaagtatggttctgtcctcggctacaatgcattgcccaagatgaaaagtttggttttaaaagatctggcggatccaggtaaaaaccaagagagttctgacgatgacgacggtagtgagggagctgacaacaaactcggcaagaagctccagagcgcctttttccaacagcattcttccgaggatgagcacgagtttagtgggggaatcggtttatttaataatcagggcggtctgcaacagctcataaagaacacagcaaagggaaaagaaggctccgcaaaagaggaccatgacgattacgatattgcaaatagcacctcaaagacaggagcctttattatatgtgccggacggctatccgccattccagcaggaagatatcttaaaactgaaaacgttcaactctccatacgggcttga

SEQ ID NO: 3737 - DNA, 1665 bp, Saccharomyces pastorianus
atgttcagggctgctatttccaagattaaggcgaaccttaccgcatatggcgcacgaaaaattaatatcgaagattttaatatagttaaagagggtaaagcagagatactttttcccaaaaaggaaacagtcttttacaaccctatccaacaattcaatagggacttaagtgttacatgcatcaaagcttgggacaatttgtacggtgacgagtgtggtcaaaagaggaggaacaaaaagggcaagaagaaaagaactgctcaaaatagcgatgattcttccaaacgtcagaaaatggaggatggatcgtcaagggaaactgctgaggcttccaaaacaaaaactccttatattaatattttggaagctttatcggccaccggtttgagggcgattagatacgctcacgaaattcctcatgttaagcaagttattgctaatgacttactcccagatgctgtagagtctataaaaagaaacgttgaatacaataacgttgaagatatcgtcaaaccaaatctagatgacgctaacgttctaatgtaccgcaataaagctgcgaataacaaatttcatgttatcgatttggatccttacggtaccgtgactccatttgtggatgccgctatccagaacatcgaagaggatgggctagtgttggtgacttgtactgatttatctgtcttggctggtaatggataccctgagaaatgttttgcgctatatggcggtgtaaatatggtttctcatgagtctacgcatgaaagcgccctaagattagtattaaatttactaaagcaaagtgctgcaaaatacaaaaaaactgtggagccacttttgtcactaagcatcgatttctacgtcagagtttttgtgaaagtcaaaacaagcccaattgaagtcaagaacgtgatgtcgaacaccatgactacttatcattgttctcgttgtggctcctaccacaatcaacctttaggtagaatttctcaacgtgaaggtaagaaaaataaaacgttcaccaagtactctgtcgctcaaggcccaccagtagatacaaagtgtaaattttgcgatggaacataccatttagccggaccaatgtatgcaggtcctctgcacaacaaggaattcattgatgaagtattaagaattaacaaagaagaacaccgtgaccaggacgatacatacggaacacgcaagagaattgaaggtatgctgtccctagcgaagaacgaattatcggattcaccattctactttagtcccaatcatattgcatctgtgataaaactgcaagtccctcccttgaaaaaagtagtcgctggattaggctccttgggctacgagtgttcgttgacacatgctcaaccttcatctttaaaaacgaatgctccttgggatgcaatttggtacgtgatgcaaaaatgtgatgacgagaagaaagatttgagtaagatgaatccaaacaccaccggctacaagattttatcggccatgccaaaatggttaagtgaggatgtcaaatctgaatatgactcaaaactatcgtttacaccaaatgaagagagcggtaatattgagaaactgagaaaattgaaaattgtaagatatcaagaaaaccctacaaagaactggggcccaaaggctcgtcctaatgcttcctag

SEQ ID NO: 3738 - DNA, 642 bp, Saccharomyces pastorianus
atgccaccaaaaggttggagaaaggacgcgcaagggaattatcccaccacatcatacatcaaagaacaagagaatatcacaatccaggacttactgttccccagaagcgccatcgtaaatttggcgcgtgaagtgccccagcaaagtggcaaaaagctgttgataaacaaagacgcctcattagcgttgcagcgcggtgccactgtgtttgttaaccacttgctcttgtttgcaagagaaattgccaagagccaggataaaaagagttgcagtgtagatgacgttttgagcgcattggaccacatagggcaatcagctttgaagggagctgtcagagataagctcgaagaataccaagctgccgttgaattgcggaaaaaggaaaagcctgaaaacggcgacactgataccaatgctgatgctgatgctgacgtggatatgactatagggggagatatgggaaccacacctgcagaagaggccggcgaacttgaggaaatggaagaacacgaacaagagggagagccatcgcagactgcggaagaggcctctgacaagaaacagaaaacagaaatacaaaatgcagacgctacgatacgaagccctgaggagatgccgtcctccactggaaccgttctctag

SEQ ID NO: 3739 - DNA, 2109 bp, Saccharomyces pastorianus
atgctggtggtggatccaaaaagaagagcaactttaaaacaagttgtggagcaccactggatggtaagagggtttgacggccctcctccttcttatttaccaaaaaggattccactgactatggaaatacttgatacggacgtcttgaaagagatgtaccgtttagaattcgtcgatgatgtggaagaaacaagaagtgttttggctagcataatcacagatcctacttatgttcttctctctagacagtactgggcattgatggccaaaattagagcagaatccaacaatagtgaagatattccaaacataacggaaagttttgaagatccaactagagcgtatcacccaatgctttctatatactacttgacatctgagatgctcaatagaaaaaacgccaaggtacagaatcaacaacagcgacagggcaacgaaaatgtggaaaagcttgccgagatacccgaaagcgtgaagcaaaacaaagttacgaataacgtgtctaccacaaagtcagatcttgaaactgtagaaccaacaccggttagacaagatactcacacgcctttgtcttcaagaaatggaaacagaacgcaacctcccctacatgttttgatcccaccaaaattggtagcaccagaacaagcgcatacatcgccaacaggtagaaagagtccggacaaccaacatcgtgaaacagattacgcgctctctcccacaccgcaagggaatgattatcaacaattcagagcaccatcaaatgcaggcgatccctcagaaaaggctaaatttggcaatatattcagaaagctatcacaacgccgtaaaaagactattgaacaatccgctgcaaacggtagtaatatcgttaataaacctgtacaaaagacgcattcgcgcgccgtttcggattttgttcctggatttgcgaagtcttcttatgaagcaaactatagttcagtgagggagccgatcaagagcaatgatgacgaggacaatgataatgctgattttccagcactacccgttaatgcagagaatattttggaaaagcaaagagagaagcagctagaggaagacataatgaaactgcacaatatcaataaacaaaacgatgatgttgggaaaggtaatacaccggaagtttacaccgggcaaaactatgaagataataacgacgatgaaaacaagcccttacctccactcaatgtcgcgaaaggccgtaaattgcatccaagtgcaagggctaagtctgttgggcatgctcgccgtgagtcgctaaaatacatgagacccccagtacctacatcgggttatcctcaacaggagcttatagataccggattcctggaatcaagtgacgacaacaagtccgatagtttggcaaatgttacatcacataccaatggtagttctagcttacattctgcgaatgcgcacgcaagttcgccaatcatggaaaaggaattgacagatgaacagattttagaagaggcatccaaagctccagcaggttccatgccatccattgatttccctcgttctttgtttttgaagggttttttttccgtccaaacaacttcatccaagcctttaccgattgttagatataagatcacatttgtcttaagaaaaatgcacatagatttcaaggaagtcaaaggaggttttatttgtgtgcaaagattcgtttccaataatgtggtagcaaagagagaagaggggccatcgcctagtcaagaaaagtcgcagttgactccaagatcgataatgccggcttcacatcacggttccattagacgccaaggctctaacaaattatctccctcttctccgttaacaaccaattccattcaccagaggaagacatccgtaattgaaaattacggggacgagaagcactccagaacatcgttggaaaacgttcgccaacaaagtgtcaatagcgaaagcttggatacaagagaaaaggaaccaatcaaatttgaaatacatatcgtgaaggtgcgtattgttggtttggcaggtgtgcattttaagaaaatttctggtaacacttggatgtataaagaactggcttctgagatattaaaggaactaaacttataa

SEQ ID NO: 3740 - DNA, 981 bp, Saccharomyces pastorianus
atggaggattatcacgtaaagacagccttctcgatgggcaaacaacataacgagaacaataatgaagctagtagcgtaaacactcagccaagtgccatggcgcccgcaacactgagaatgatgggaaagagtccacaacaacaacaacagcagcagcagcagcagcatcaacagacacctttaatgccacctgcagacatcaaatatgtaagtaatggaaatggtcaccaggcgcaacaaaaagagagacaaccagaatttgaaaatccgcctagagagaatgcacagaagtcgaatacgtccagccagggtcgagctccctcttctcagggcatgcctaaacagttccatagaaaatcactgggagactgggagtttgttgaaacggtgggcgcaggttctatgggaaaggttaaactagccaagcaccattataccaatgaggtgtgtgccgtaaagatcgtgaatagagctaccaaagccttcttgcataaggaacaaatgctaccaccacccaagaatgaacaagatgttttagagagacaaaagaaattagaaaaggaaatatccagagataagagaactattcgggaagcgtctttaggccagatcttgtaccatccacacatatgtaggcttttcgaaatgtgcacactatcaaatcatttttatatgttgtttgaatacgtctcgggtggtcaactgctagactatatcattcagcatggatccatacgagagcaccaggcaagaaaatttgccagaggtattgcaagtgccttaatgtatttgcatgctaataatatcgttcatagagatttgaagattgaaaacattatgatttcagattctagtgaaatcaagataattgattttgggctgtctaatctttacgattctagaaagcaactgcatacatcctgtggctctttatattttgctgctccggaattgttaaaggccatccttatacagggctga

SEQ ID NO: 3741 - DNA, 402 bp, Saccharomyces pastorianus
atggaaacagctccgcgtaatcacgtaagagagttgcctgcaaacatagcacaattgccaagtgaattctctacagcagcggaacaccaacctactaacagcactcactacagccctccacccttttcggttcccgaaataaaaatcccagattctgagattccagctaacatcggagacgaccctgtgaagataagaaaatggaaacacgttcaaatggagaagatacgaagggtgaacaccaaggaagcatttgaacgactgattaagtcagtaaagactccaccaaaagaaaatgggaaaagaatcccgaaacatattctactgacttgcgtaatgaacgatatcaggtcaatttcgaacgcaaacgagacactacaacatatactggacaactcatga

SEQ ID NO: 3742 - DNA, 237 bp, Saccharomyces pastorianus
atgcaacaagcaacggggaacgaactactgggtatcctagatttggataacgacatagacttcgagactgcctatcagatgccgagcagcaacttcgatgaccagctgccagcacacgtgcacgaaagcacattcagcgctgcgtccccccctctcttagcgcacgagctcggcatgattcccaacgtggcaactgtgcagccttctcacgtggaggcattaccgatcaatcctcaa

SEQ ID NO: 3743 - DNA, 423 bp, Saccharomyces pastorianus
atgggccctttcggagccaaagtatgttggaattatataatggcggcatatagcagagttccctcattagcatttaaggaatatatctttgagctgttctacggtaagggaggaataccagaggtcacaacagacatcttcaaaggattattctcaagaagtattttggcacgagaccccttactggattccttaaaccacttgaatgtacaaaagcttttggtagtatatgggcaatatgattggatgaacaaaaatggtggcaggctcatggtcaaaaacttaaacaatataggtatcgggtcggaaagagcgagttatttggaagtaccttcttctggccataacctgtttttggacaatccggaatcattcaaccagtctatagtgtcctttttgtcggagaaacctttactgtcttag

SEQ ID NO: 3744 - DNA, 540 bp, Saccharomyces pastorianus
atgcgcccctatagacaatgcaagtgggacagagccttacacaccagcagatctctttttgaagagaaaattctgcagaaaaagagtctacaaaggaaaatcttcgaaagaattcttagacccaagggtcaaaatactgtgacaaaatcgggattcaaattatggtctagccatttgaatggtccagcaaagacgtacgagcggttaagggaactgcaaaattgtatcatggaccaagtaaatgtggaaggatccaaaaaaaacgataagttattcgacgaaataaaccaatggcattttcaaaatacaaaggcaagtatacaaacatccacgttactgatacacggctatgccgcttcttcgatgtcttacttccggaattattcgggactgtccaaacacttccaaaacttatattccatagacttgccagctagtgcgttatcttcaatacctaatttagacctcaataccaacaacggctctggcattacacctcacctcaccggtcaagaccagctcacattccatatacgatca

SEQ ID NO: 3745 - DNA, 2082 bp, Saccharomyces pastorianus
atgagagcagcaggcaagactaccattagcaaatggtgtgctgcagccttgggctacaagttagtcgatttggatgagttatttgaacagcaacatggtaaccaaaccgttaagcaatttgttgtggataatggttgggaaaaattccgtgaagaagaaacaaggatttttgaagaagttatccaaaactacggtgacgacgggtatgttttttcaactggcggcggcattgtcgaaagtccggagtctagaaaagccttgaataactttgcttcatcaggtggctatgttttacacttacatagggatatcgaggaaacgattattttcttacaaagcgacccttcaagacctgcttacgtcgaagagattcgtgaagtttggaacagaagagaagtctggtataaagagtgctccaatttctctttttttgccccacattgctcagaagaagccgaatttcaagctttaagaagatcttttggcaaatacattgccacaattacagggacaagagaagtaaagattccatgtaaaagatccgctttcgtgtgcttgacctttgaagatttgactgaacaagccgagaaactgaccccgatctgctacggttgtgaggcagtggaggtcagggtagatcatttggctaattattctgttgattttgttagtaagcaattgtctatattgcgtaaagctactgaaagtattcctattatctttacagtacgtactaaaaagcaaggtggcaactttccagatgaagaatttaagagtttgagggaattatatgacattgctttgaagaacggtgttgaattcattgacctagagctaactttacccactgctattcaatatgaagtcatcaataaaagaggcaataccaagattattgggtctcatcatgacttccaaggattatattcatgggacgatgctgagtgggaaaacagattcaatcaagccttgactcttgacgtggatattgtaaaatttgttggtactgctaatagttttgaagacaacttaagattagaaaggttcagggatgcgcacaagactaaacccttgattgcagtaaatatgactgccaaaggcagtatctctcgcgttttgaataatattttgacgcctgtgacatctgatttactacctaacgctgctgctcctggtcaattgacagtagcacaaatcaacaagctctacacgtctatgggtggtattgagcctagagaactatttgttgttggaaaaccaattgggcattctagatcgccaattttgcataacactggttatgaaattttgggcttgccccacacttttgataaattcgagactgactcagcagaattagttaaggaaaaacttttggacggaaacaaaaatctaggtggggccgcagttaccattcctttgaaactagatattatgaaatacatggatgaattgactgacgccgctaaagtcattggtgccgtaaataccgttataccgttaggcaacaagaagtttagaggtgacaacactgactggctaggtattcgcaatgccttggtcagcaatggtgttcccgaatccgttggaaatacagctggtttagttattggtgcaggtggaacttccagagctgctctttacgctttacacagtttgggatgtaaaaatatctacattattaacagaacaacctcaaaactaaaaccattaatagaatccctaccatctgagttcaacatcactggcatagaaaccgcggaatctattgaagaaatcaaggaacacgttggcgttgctgtcagttgtgtacccgcagataaaccattggataatgaactgttgagcaaattggagagattccttgtaaagggtgctcacgctgcattcgtgccaaccttgttagaagctgcttacaagccaagcgtcactcctgtcatgacaatatcgcaggacaaataccaatggcacgttgtccctggtgcacaaatgctagttcaccaaggtgttgcgcagtttgaaaaatggacaggatttaaagctccattcaaagccattttcgatgccgttacgagagagtaa

SEQ ID NO: 3746 - DNA, 2208 bp, Saccharomyces pastorianus
atggtggaattagctagagttccaattttagggaatgatattatccacgttgggtataatattcatgaccatttggttgaaactataattaaacattgtccctcttcaacttacgtgatctgcaatgatacaaatttgagtaaagttccatactaccaacaattagtcctggaattcaaagccgctttaccagaaggctctcgtttacttacttacgttgtcaagccaggtgaaacaagtaagagtagggagaccaaggcacaactagaagactacctattggtagaaggatgcactcgtgataccgtaatgatagccattggtggtggtgttattggtgacatgattgggttcgttgcttccacttttatgagaggtgtccgcgtcgtccagataccaacatccttattagcaatggtcgattcctcaatcggtggtaaaactgccattgacactccattgggtaagaactttgttggtgcattttggcaaccaaaatttgtccttgtagatataaaatggttagaaacattggcgaagagggagttcatcaatgggatggcagaagtcatcaagacagcttgtatttggaatgctgccgaatttaccaggttagaatcaaacgcttcagtattcttgaatgttgttaatggggccaaaaatatcaaagttaccaatcaattgacaaacgaaatcgatgagatatcgaacactgatatagaagcaatgttagatcacacttacaagttggttcttgaaagtatcaaggttaaagcagaggtggtttcttcagatgaacgtgaatccagtttaagaaaccttctgaattttggccattctattggtcatgcttatgaagctatcttaacccctcaagcattacacggagaatgtgtatccattggtatggtcaaagaggcagagctatcccgttatttcgatattctttcccctactcaagtcgctcgtctgtccaaaattttggtcgcgtacggtttacctgtctcgcctgatgagaaatggttcaaagagttaactttacataagaaaacaccactggacaccttgttgaagaaaatgagtatcgataagaagaacgaaggctccaaaaagaaagtggtcatcttggaaagtatcggcaaatgtttcggtgattcagctcaatttgtaagcgatgaagacttgagattcattctaacagacgaaactcttgtgtacccctttaaggacattcctgccaatcaagaaaaagttgtcattcctcccggttctaaatctatttcaaaccgtgccttgatccttgctgccttgggtcagggcccttgcaaaatcaagaatctattacattctgatgacacgaaacatatgctaactgctgttcatgaattgaagggagccacaatatcatgggaagataatggtgaaacagtagttgtggaaggccatggtggatccacattatcagcatgtgctgatccgttatatctaggtaatgcaggtaccgcatcaaggtttttgacttctttagctgccttggtcaactctactccaaatcaaaagtatgtcgttttgactggtaatgcaagaatgcaacaaagacctatcgctcctttagttgattccttacgtgctaacggtactaaaatcgactacctgaatagcgaaggttctctcccaatcaaggtgtacactgattcagttttccaaggtggcagaatcgaattggccgctacagtttcctctcaatatgtgtcctctattttaatgtgcgctccatatgctaaagagcctgtcactttggctcttgtcggtggtaaaccgatctctaagttgtatgtcgaaatgacgatcaagatgatggaaaaattcggtatcaatgttgaagcttccacaaccgaaccttacacttattatattcctaagggccattatgtgaatccgtcagaatatgtgattgaaagtgacgcctctagtgctacttatccactagcctttgctgcaatgactggcaccaccgttacagttccaaacatcggtttcgaatcattacagggtgatgccagatttgcaagaaatgtcttgaaaccaatgggctgtaaagttactcaaactgcaacatcaacaacagtttcaggtcctccaaaaggtactttaaagcctcgaataaacaaaaacagcaccaagactttgacatgtaatacatattag

SEQ ID NO: 3747 - DNA, 1026 bp, Saccharomyces pastorianus
atgtttgcagtaaatacctttttacgtcaaaacgtaaacaaaaaacatcaagaacaattgagtaagatcaaccaaattaaagaaacacctttcaactcttaccgtagactgttaagatcccacttcagcccaataatcttaacaatgagtagtaaaaaaagccgtaggagtctacgcgacataggaaacacaattggacgaaataatttgccgactgacaaggataatgtgtttgtgagattgagcatgtctccgtcaaaaacaacgggcccaagggagtttttaaaaccacctatgagactatcgcctaaaaagacggatggcacgaaacatagcacacagctcacacctaacaggatacagtcgccggaatgcttaaagggctatactcccaaagtaactcaaagtctggatcgacctcaattcaaaaacacgagtaacgacctgaagattcgaagctccaaccacataacgaatataatatttcctacatcgccgactaagttgacatttagtaatgagaataagattggaggcgatggctccttaacaagaattcgggctcggtttaagaacggtcttatgtcacctgaaagaatacagcaacagcaccaacagcaacagcaaaatctccctttacaaatcaaaaatggcactgacattgaccatagtgatgagtttgaagcgaatccgtttgaggatgagctctctgctggtaaattaaaaggaaaaaacttactgagcgaactaaggaaagaagatgaaggtgtgggaaatggcatagaatctctcactaagacaaacacgaaactgaattccatgcttgcaacggaagggaaggtgcagaaagctaacctccagaagtgcgtaaaatttaatttacctgacaacataaccagcggagaaactacagagttgagggacataaaagacctgctgtcacaaattttaaggaggcaacgagaaatagaatcgcgattaacaaacatcgaacttcagctcacggaaataccgagacaaaaataa

SEQ ID NO: 3748 - DNA, 243 bp, Saccharomyces pastorianus
atgtgtgaatggaatcaggatttcccaggtaaaaagtttgtaactgataagaatatgttcaatgacaagatcattgacgcctctaatccatcaggccttaaaatgtgctccggtttgaaactttacctaagaaaatcgctttggaagttggccgttaaagatggcaaaattatgttgatagctatcaaagctatatcattcaacggaaccaaagagtactataaaggatatgaatatctatag

SEQ ID NO: 3749 - DNA, 1293 bp, Saccharomyces pastorianus
atgtcgcattctccacttatatcgactttgtcgccagagtattttgatcctaacattcctcaaattctcccacacgaaaaaatgtacaagatccaagtaggaaaaacgctgtttaagattagcggtgcttcattaagttcggatggtccaagtttcttcactgaatatttttccaaaaaaagcttacctaatcacaatagcagcagcagaaataatactaaagaatctcctgaaaatgaagttttgttcatagacagatctgcggaggttttcgaaaggatctataaacatttgcaaggctatacaattgagattaaagacgaagttcaatacactatgctttttgcggatgcaatgtactacaatttaccacgattgagagccttactaaaggaaacagactattattttacaaatgtgggcgggcaatcgtttaaagtagccaaaaatttatttagaaggaaaggtgattctccaaactattttgaaatatacgctgccacagtttacatcgatgtggaagagttgattatatcgaaaaaattattaaggccgcctcctcactctgctccctacattccaagatcgtcagagttcttcaaagatctgctgacattactgggaggagcatccatagatttggatgacaataaaagagacgcactgatcaaggaatgccgttattacagattcttaaatcttgaacagcggctaattaagtgcagtattagctataacccgataacaaggaaagaagaaatatgtcttttactgacggatctgtccaaaaaaggtattagtttccctgatactatagcgtgttcagctttaccgttcgaagaggacgtctgtagttcagaagtttgtgatacatcatcacaaactcctgaacagccagtaccgaaaaaaattaaacttgatgtcactgatgagaaggattattcctggaatgtaatttgttacaagagaccatttctggataactgcgcaagagagctgatctttcagatagattcaactgattctacaataatgttcaataaaaaaagtaaaagcattcacttggatataactggggaatctgcacaaaagttcgaagcgttgtttggaaatcatttgctaagtacgccttttggcccgattgatttgagcaattatcaatatcaatctacatcaccgacattagataccacacaagccaaagcagaaacacactttttacttcctgcgtgtatattgctttgtgacttatgtgtgaatggaatcaggatttcccaggtaaaaagtttgtaa

SEQ ID NO: 3750 - DNA, 2298 bp, Saccharomyces pastorianus
atggcaacaactacgccagtgacatattggatgatcttagacgatttttatacctttttaattgacatcacaaccatcccaagaaggaaaatggccgatgttgaagaattgattcaggactccgtagggtttctccacaaaacttttgacgcactccccacttcacttcattctattaaaaatgaaccactttcatccacactgtttgatgacagcattctcaattttgagtgggaaccgctcaagaactgtatctcgatggttcatgacagagatcttttagttgacactgtactaaagaagttcatcatagattcaatgacgaatgctatcgaagatgatgaagtaaataattttgaaagagggttgctgaattcgtgcatatgcctcgactttgtgtataatgcaagacgtaacagaaaaactccgtccacttggggaaacactttttttgacttattttctacaaccattgatctgctaaactcaccatcttcgtttttgaaattttggccctatgctgaatcgcgtatcgaatggtttaaaatgaacacatcagttgaaccaattttgtttggagaaagcaatttgattagttacaaacaaccgctatacgaaaaattgcgtcactggaatgatgtattggccaaattagagaataacgacatgctaaatacgactaagcactttaacatgaaattcaaactcgaaaactttttatcagagctattacccataaacgaagaatcaaatttcaatagatcagcctctatttctgctttacagtattctgacagcaaatggaacaaaacaatttctggacgagaaagtagccataattcagacgctattttttctgccgattataactttgtctttgagaacctaattactcgtccgattgaatttgctttcagcgatgtagaatttaaaaatgatgttgataggtctctggccccccttcttgatgcaattttagagattgaggaaggcttttacggtaaaattaaaaaaaacaataagacccgatttgccttagaggaaactttaaataacgagtattacgccaactacgatgttatgacacctacgttacctgtatatatgaagcaatcaagttcaatgaagatggacaggaacgaattttggctagatctacaaaatatcaaagaatcaagagacttccttcttcggcccaccattatggatatctcattaagcaatacaaacagtctttatagacaattgactcaagaggatgacgactattatcgcaagcaattcatcttgcaattgtgttttactgtgaacctcgtacgaaatctgatctcgtcagaagaaactaggcattcttataagagctgctatttgagggaaaatccaatgagccatatcaattttgaaaaccttgacgaaaataataaaaagcgtggtctcaacctgtgttcatatatttgtgacaaccgtattctgaaattctataagatcaaagaccccgactttcatagcatcgtccaaaaattgctatcttcagatgaaaattttgtaacagccaaaattgacggcttcaaagaatttcagagttttaagatttctaatgagaaaatatcctcacccaactttgataaaagtttcaaaaagtttacctttgtcaagatgggaaataagtctatcaacagcatctggaaaatcgccactggtctagataaaattgaacgagaccttaaaaagcctgaaggtgtatacgaagcggcccattcaaaatgggagtccaaagtttccgctgaggctcctagtgaagaagcaaaagacgagataattaggcaatggcaaaccttgcgttttttgagatcgcagtacctatttgacttcaacaaagttaatgaaaatactggtgttgacggtttatttgaaagctacgaaaaagccgaagtattaaataatgatatcaaaaagaagcttctgtgtaaaataaaccaaggtcacaaaaagaaacttcaagaggctaaagaatataggatcgtaaaagagcagaaaaagagagctttagaggaagggccattgtgtagcgaagaaaaggatattaagttacaacgtttagatgacagttctctagcggatggagatgagctaaaaaggaaaacggcagcatctgggcaagaaccgatagaagaaaatgctaaagtcgcagttgcagatatcccttctcaataccccggtgagacgacggagaagaaagtattttcttcacatagcgacatagcgcagtcagaaaatgcagaaaataattcgatgtaa

SEQ ID NO: 3751 - DNA, 705 bp, Saccharomyces pastorianus
atgacaaaaggaagacggagactgaacagaaccgtaagaatgttaccaactccttatgtaaaatgcgattacgataaggtttacgagcctgctgaggatagtttccttttactagattgtttagaaaaagaacaaggcttcttaaatgaaagatttaataatcgtttagccgttgtttgcgaaataggctctgggtccggtgtcgtcacaacgtttataatgcaaaacaaaatcctaccacaagaaaggtctattcacctggccgttgatgtcaacccgtgggcactcgaagcgaccctagatacggcaaagttaaactcgtgtaaaaattcattcttagatgtggttcaaagcgatttgaatgcttgtcttcgaaataatcaaattgatgtcttaatattcaaccctccatatgtgccagcagaatgtgtaccggatttcccagagtcaagggagcaggcggatcaatggctagacttggcattactgggcggaaaagatggaatggcaatcactgataaactattgcaacagttggataaaattctttctgaggatggtgttgcttacatcttattttgtgcgagaaatagacctgaagaagtcgttaagaaatttctaaaaactcacaggtggaatgtgaaattaatcgaaataagaaaggcaggatgggaagtgctcagcgtttacagctttacaagatga

SEQ ID NO: 3752 - DNA, 1680 bp, Saccharomyces pastorianus
atgacaaaccataactcgtacaagttcaaatttagatcaaagaaattgctagagactttgttcttgctagaacctttagagctgctagaaaatttgattaatattaggccagacgatgttacagttactctggtacatgtgcttgacggaaataaacccgctatgaccataccacatttgttgtatggtgtgattatcaggtataacagaacagcatctgtgaagttttccaatcgtgatggaagcgttagagcaagtacgactaaattaaccaaaggagaaccctccatgttgaaaaagttaagtggggaatcgatcattgcatttttgtttaaatatgtggactatgttgaaaactctgccattgaagaattttatggagatttcctgttattctttagagaagtggcaactaattataacctctactcggatgtatcattgcctgtactaaaactggttgcccttatttctgaaaaggtaagtaaaacacaatttggggaacagaaacgggttagaagagaaatatcagacgtatttttcaaatatttacccaatgcgtttatcaactttcctaatcaaaatcgaggccaatctgcatcatttaaggatttggagtttgtggtgtggcgcgttcaatatattgttaatgatcaagttggaggtgataagttcaatacaacattatctactatcgtaaaccaatgtctaactccatacatcaaaccgaaaagtgaaaaagccatctcaaattatgctctagaactggctgtggttatagccaatttgagttcaaaggtaaagagttggagacttttaatagcggaattatttcaaaatgacaagaagctctcagttattggcagcaaccgagtttgggagaaaattatatacgaatggtctgtttacccagagaataaatcaaaaattttgaatgacttgctgttggagattggatctaaacgttcaggggtagcaccaacgttaatcacgttcaatttaagcaacgaatcggaggttgaatacaagtgccaaaacctctcaaagatatcgtacttgctaatgatatcaccaaatgatgcatatttgttacagttctcctccttgataagttgcgtttgccaatacttggtgtccaaggatatcaagcttaaagggagttgctggattctactaagagttttgctcttaagattttcagagtcgcatttcaacgattactggtctatgattagctactgtttacaaactaatctacaagagttttatgaatcgttacagattcagtccgaagtcgattcccaaacaatattacagatttgtaaaaccttagacttactgctcttactaaacatggaaggtttcacttctacgaacgaatggatatttgtcattgatacaataaattgtgtatacaaaactaattcattcgttgcactagtagatgaaattgctgaatttaaggattatgaaataagtaaaattgatgatctggaattaccaacgactttaaaagacggccttccgttactacggggcatccacaaaatcgaaaggcactcacaattgagaaagtttttccagaatttaagctatgtacactatgagaaagtatacggattaggcactgtagatttacatggttgcagtgaggatcttaagaaagacatcttgtcatga

SEQ ID NO: 3753 - DNA, 3321 bp, Saccharomyces pastorianus
atgtccttacccttgaagccacttacgatcgactcgaataataaacagatagactccaaacaaaagaagtttcgtgctaatgttgagcgtgcattagaaagatttgactctgtgacagaatgggcagactatattgctagtttaggaactttactaaaggcgttgcaaagctggtcaccgaaattccagaacgtaaagtactatgtcccatcgccatatcaagtaagccgaaggttaacatcgtcattatcaccggcgttaccagcaggtgttcatcaaaagacattagaggtttacacatacatatttgaacacattgggcttgaaaccctagctgcggaatgtaatatttggattccaggtattttacccttaatgacatacgcctctatgtctgtcagatcacatttgatcgagctttatgacagttatattcttcagttacctcaaacaacgttaagattactaatcagacctctgatttctagtttattgcccggaattgatgatgagagtagcgattttttacctttaaccttaaagcttattgagaccctgcaggaaaacttggctgacgattccttgttttggcagacattgttcttagttatgactgcgaataaaggcagaagattgggtggacttacgtggctgactagaaaattcccatcgttaaatgcggtacctcacttggtaaaccaaacgaagaacgagacagaagaagatacaagtgaaaccggtactatagattcacatttggataggaaaaaaaagaaagagggagcttttaagatcttgcttcctgcagctagagacttagtgacccccgaaccaggtctacttgtccgctgccttgtcggttgtctagaagatgaaaacgacatccttattaaaagaagcgttttagatcttttactacagagactgaggctagattctcctgttttaaatgttctaattactcccgaagacaagaaactactaataatgagttgttgtagaactactttgagcaaagatatgtctttgaacagaagaatatggaattggttattaggccctacttctgggggtttactaaataataatggcggaacatctattcctgatgctgcttctgctaactctgcaatcgaagaaagcaatgtttattttaggaggtatggattaggcacgcttttagaaggtttaaacgatcttctttcagaagaagagtccattcttattgcgtttagaataagcatggcagtcatggataggtgggaaattggttcacttgtgattcctgaactatttattccccttctctcttcttcggaaaagttcaagcagaatgaacaaattatgaaaaccgcacgtactttttttgacaacgttgaaacaaacgttatatgggggaagctgttccaaaaaattgaagattacaaaaacttgaaaatcctagactttgttttaacgaactttaatatcgaaagcgatgaagaaattattgtacgtcatcttcccttaatattattggctctacttgctctcccatcctctgataacgaccttttggatatctgtaagcttcagaaattttctttgtacaacaaattgttaagctatattcccgaaagagctcttcttcccctaagccattcaaagttaaaatataatgatgccttaagctctgaagaacttctaaacaaaatacatggattctatactagtgtttctaatccctccacatccgagaaggaaaatacaaacgaatgtttgccgccctttacaacagaagatttgacttttttgatcgtaaagcttattcatgaaaagctcctttcaagtttaagcgatatggaaagcatcaatgaaagctctaagttatttataagtgtttttgagaaaatacccgaatctaacgtatctaaaggattatctcacccaagctggtcagatgaagagctaatccagaggacatttaaggcgattcccaagctatgtgaatccaacaatgatgcgaaatcaaaagaaattgtcggaattgttgaaattttcggtaattacttatattcacgcatgcaatttattgagtctatgaaattgctaaaagtgatcatgacggccgtgtggaaatctttaaaagatccacaccatcaaattttaggggtcaagaatttaaagaccctgaacagatttattcccccaaaattcattgaaagtgcattagtttatacttttgtagaagagagcgatataagcgagagactgggcgtgttagatttgctatggacgcaactagactcaaacacagatttaattaggcacccgctcgaattgattttgggtgagctatttgatgatcaaaatccctactacttaacagtttcaaagtggattctgtctattataaattcaggttctgcaacaagactattttacattttgacagataatattttgaaagtctcccatttagagaaagaaattttagatgacagggatgacctcgagatgctcacatatgagtttcaaatgcttgcttatgttttaaaaacaaacaatggccgcgttaggaaacttttttctactgaactcacctcaataaagtctttagatatatggaagaatgaagatgtgtctacatataagagcttattgttggtcatgttgatgagatttttgaatataaagaataacacgcatgcaaaaagcatcaggagtgctttaattctcttggatatactactggatggaactgaagataatttcaaggatatcgttatatttttacttcaaatgtcatctaaatatattgcagaagaaggcattgagccggagctaatagcggtttccttattagatattgtgtcaaaggttctcagattatcacatgataacggtattaaattagacattttcgatgacaatgcagctcatctgaaatatatcgattaccttgttaccagtgtctcaaatatgaagagtccccttattgtaaccgcttatgtgaaacttctgtcagaaagtattatctactttgaacattctatatttcgaatgattttgccgctgtctgcttctctcgtacaatgtgttcaaaggttgtttttgctcgaaaagaaagaaggcggctattaccagccagtaggtctactactcggtggcctggaagaattattggaaatctctcatggatatcttgtgactgatcaaagagaggggtactgtttccgagtctctaatttgaaaggcgatttattcagtccgtggtctcaaatgttttctcatccgattcctccaatgaggagagtagaattcaaggcgaaagggatgtga

SEQ ID NO: 3754 - DNA, 1998 bp, Saccharomyces pastorianus
  modified_base (29)..(29): a, c, g, t, unknown, or other
atgacctctcaaattactcaatggaaggntgaatataaaacactagcaacagacgacctgagcaacatcttgaatttaaactatggagaaacaaatgatataattatgaatgagataaaagacctcaatcttccgctaggaccgctttctgatgagaactccgttaaagtttctagctttcccgaattaactgtaaacgattggcaaaacgtaaattttggcttggggaatagcgctaaagaagctagtcctaacacggctagtttaataactgaaagcaggcccaaccaggacgttgttatgtctaaggatccaaagaggatggcattcacattggataacatgaaaaaaagtgaatctgaaaagggcttcgatagaaaccttggtgagctactgcttcaacaacaggaagaactacgtcaggagctaagggcacagcaagaagccaacaggaaattagaagtaaaactaaaagaaacacaatataagcaacaacaattacaggctactttagagaatgctgatagccaacagtttttgtccccaaaaagaagtactatacctgcttccgagaacgtggaggacgtatacgcgaatagcctttcgccaatgatttctccaccaatgtcaaacacttcgttcaccggatcaccttctaggagaactaatagggcaaagttttctctaggaagaaaaaactctaccggaacagcaggtccattaagttttcaagaattgaatgaagattttaatggagtacttatttcacctaagaggactcgtccaaatccaaatggaagttcgaacttaaaacccaaatttatcgcaccatttactccgaagagtagagttagttcagctacttccaattctgcgagcatcacgccaaataacttgaggctagactttaagatttctactggagaacacgataacgaagattcggatcaacccttggggctaggtatagaaattcttggaaagtcaggatcttctccaaccaaaggaatgtctgtaaaggcccctccaatagacgttatgcccacaatccctgggtccgttaataatactccatcaggcaataaaatagccattccctccaactacattgaccaatataccccgagaggaaaacagctacattttagttcaatcaatgaaaattctttgggtattacctctgtgacgccgcaactaaagcctccgagtcagcaaatgattggacgtcgggaaagtgttttcaatgagttgaaccccaatttagtctttaaaaatattgataatgagggcaatagcgaagaaaatgagccggaaagtagatttgttatatctgaaacaccttctccaattttgaagtcacagggtagatacgaaggaagatcccctcaatttggtgctcatgcaaaggaaaatgacacgtatatcggtaatagcccttcaaaaatcacaaggaaacttactactcttccccgaggttctattgataggtatgtgaaggaaatgccagacaagtcatttgagtgtttgtatcctggatgtgcaaaaacattcaagagaagatataatataagatctcacattcaaacacatttagaggatcgaccttactcctgtgataatcctggatgcgataaggcatttgtgagaaatcatgatttgataagacataaaaaatcacatcaagaaaaggcatacgcatgcccttgcggtaagaaattcaacagggaagatgccttggttgtacacagaagcaggatgatttgtagcggcggcaagaaatatgaaaatgtggtgatcaaaaggtccccaaggaaaaggggaagaccaagaaaggacggatcatcgagtgtttctaatagtccaatcaaagagagccttaaccgggatcacaacgggcaattgatgttcaaacttgaagatcaactgagaaaagagcgtagctacgatgagaatggaacgggaattattgtttcgccaatgagagtcaatcaaaggtaa

SEQ ID NO: 3755 - DNA, 117 bp, Saccharomyces pastorianus
  modified_base (114)..(114): a, c, g, t, unknown, or other
atggactcttcaaactcttggtttgatgtctcgaaagtccagagtctaaatttcgatctgcaaaacagctcttgttctagaaacaatgacctctcaaattactcaatggaaggntga

SEQ ID NO: 3756 - DNA, 5025 bp, Saccharomyces pastorianus
atgactttgttgtctaatgattcatacaatgacctcttacaaaatactgagaaagcattgaaaccgaaaaacgatgaatcggtgactaaagaggctgccaaaaacttgaatataattgcgttacctaatgacgacgatcacaataaaaaggagttttcaatcgaatctcaaatcgaaaaattggaggcttctggctataaagttatcggtctcgaagagttcatggacttgaaacaatccataaccagcccatcatatgattatttgagggagaagcttcaagcgttcagaaagatacccattgaccaaaacacttttgatttattggaacaccctacagttgatttcttacttcccctaacatctaaaatcgactgtttaataataccaactaaagaatataatgagctcgctaaagcctccaagaatccatcaacagaacagatgaaacagtatttggagggcaacaccgatttagaatctactgtttctatatggctagcggagaagaatgactacacactactcaataataatgagtactccagcatgatcgataaattaaatagcccttccaaagaatatttatcgaacaaggcaaaagagtttaatcaagtattgattgatatcaacgaattgaaagatttggaagacccatcactggatttccttaaggagaagatttctgcaactaattacttattactcacaaaagaggactatgaacacccatctttgacatatttggttgaacatgccaaggagactgaccaccatctgctctctgcatctgcctacaccgatctggtcaagtacaaggaaagccctgacattgagttcttgaaggagaggtctaccgatctcggccacacagttgtatccaatgatgaatacttagagttgaagaatcaattggaacacccatctttgacatacttggttgagcacgccaaggagactgaccaccatctgctctctgcatctgcctacaccgatctggtcaagtacaaggaaagccctgacattgagttcttgaaggagaggtctaccgatctcggccacacagttgtatccaatgatgaatacttagagttgaagaatcaattggaacacccatctttgacatacttggttgagcacgccaaggagactgaccaccatctgctctctgcatctgcctacaccgatctggtcaagtacaaggaaagccctgacattgagttcttgaaggagaagtctaccagtctcggccacaccattgtctccaatgatgagtactccaagttgcaacatgaatactctgaagctaaggagcaattggaacacccatctttagagtatttggcggaacaagctgcaggactacaacaaaagattgtttcgttatcagaattcgacagcttaatatgtccgtctttagaagactgtactttaaggttacacacactaaactacgaagtgattccgatcgctgaatatgaaaatttaaaaaattctttggacaacccttccaagaaatatattgaagaaaaagccaactcaatgaagcttacagtgattgatagagcagaatatgaaacaatgaaagacaagttaagcgacaaggattctcttattgcatctgtgaaaacttttggtcttgttccaatacctattccccaactcgcttctctagagaagtcatcactccagaattctaccctatccgatttggggaaaagattagactcactaggttatgttgccatcaccaaggacaatttaacaagcctaaaaaaaccggttgttgaaagagcttctagggacgatgccttggatctatgctccaagtttgacttaacagcattacctagcgaagaatatgttaaaatgaaaaatgaatctaatcctaccgccgaagaactagtacaagaacttacagggcgtggttatgttgttttagcaacaaaggaacataacgacatgcttgaaacactcagcgatccttctattgatttcttgaaagaaaaatgtgaaaaataccaaatgattccagttgataaaagtatatacgaaaagaaggaagaagcaatcgagagtccaacttatgatttcatctcagagaaagcattgaaattaggatatgacttgattagtaaagccgagttggctgacatgaggcgaacaattgatttacctgaaattgattacatccgcggaaaggctatagagaacaatatggttctattgaagagcgaagaaaagaaaaccttggaggatcaaattgaacatccttctatatcataccttgttgaaaaaactgctgagatgaacaaaataattatcgatgaagctgagtattacgggattcatcgaaaatgcagtcatcccagtcagaaagaggtagaggaatactgccatgacttgaatttggttttgctgcacaaggatgaacatgcagctttaaaagactctttagaaaacccaaatgtggataatatgaaggacacattggccaagctaaattaccacgtaatctctaaaactagcttcgatgaactcattgaaaggtgcgaaaacccaagtcttgactatttgaaggattgtttaaagagcatgggttacactgcaatgtcacatcagaattatgaatttatggttgacaaatatgagaatccgcaattggactacttgcaaagttctttagcaaaggttcaccacttcacattgcccatatctgagtatgacgcaattgttgcggaccatgagcatcccaacttggcctatttaaaggaaaaagctactaaattcgattgcatcttagtagacaatgcagagtaccaacatatgttgaacgctattagttccccttccaatacttttgaagacttagaagcaaatgcccggtatttcaatatgggattacactcattaaactccaacgaagcctcctatgagctgaaatcacgccaagcagaaaagccggggcatttagatacccagtctctgaataccaccagcagtatttctactacaacatcaagtatgtttacagatgccttagacgataatatattagactttaatgaaaacgatcttgaccacaacggagatgtgactgacgtaatttcgaagtcatccactatgaaagaaatcactaatttcaacctcacatacgaaaccctagaaaattgtgccgaagagttaggatataaattagttttgatcaaagattcaagtagaaatctcataaacaaagaagctcctttatttgggaaagacaatgacgatgaaattagtgtcgctagtagcatcgacataaatgatttatccaagaaggcagaaaagtggggtatgaccctaatttctgatgaggagttcaaagaatatcacatactgaaggataatacaatacgcctgaatggtgataagaaagaaacgaatgatattgtatcagaaaagcaatctccagtaacagaaattacaaatgcgtctaaagaatatgagcttcaagaacattctgctgatcactctatgaataaggaagaacttgttaagaaggcagaagcactggatatggttgttcttgacgagaaagagtatactgaaatgatggcaagatccgaaaaccatttaatttctgcggatgatgtcatacgtgaggccgccaatttcggtctagtacctgtagagaggcaagagttggaagatattaaatatgaactagctcatccaacattttcaatagcacaacaggaagaacacactgctgatcataatatagttccgacaactagggatagaacattattattgaacgaagaacgcacaatgggccaagatgaagtggattatgatgacgatatttccgccagttttgcggatgaatcacaagaaattcgaaatgatataaatattatcaaaacgcaagccaaaaaatatgggatgttgtgtatacctgaaagcgctttcgtggttacatcgtatgcaaatactccagatacaagcaacgttgttgcactccctgtttcctattaccataatctattatcaacagaagagaagaaatggaatgatgtgaataacaaagatttagaatcagaagccaaaaagcgtggatttcaagtcggattgccatcgaagaaggatattgcggctcaaggcacgccacctaaacacgtaagcaaatcatctaaattgagttcgaaaaagtcgattgtatccacaaagtccgggataaaaaaaggacttgccgaagctgctgcaactactgcttacgaggattatgaaagccacccacagttacagcagcaagaacatcaccaacaccacactcacctacaaagcgtatcaaattcgactccaaagatcaaaacagcaccttctaggaatactgcaggcttcagaagggatgcaatggaatcgtttatgtcacgtgcaggatctgctgatagagcggtatctttacaaactttagcttcactaaatgaaccaagcatcatacctgcattaacccaaacagtcattggggaatatttgttcaaatattatccgcgtctggggcctttcggatttgaatcacgtcatgaaagatttttctggatccatccatacactttaactttatattggtcagcatctaatcctattttagagaatcccgccagtacaaaaacgaagggtgttgccattttgggtgtgaagagcgttacagacccaaacccatatccaacaggcttgtatcacaagagtattgttgttactacagaaactaggtatatcaaatttacctgccctacgagacaaaggcacaatatttggtataattcattacgctatctaatccaaagaaacatgcaaggaataagcttagaggatattgccgatgacccaacagacaatatgtattcagggaagattttcccattacctggtgagaatactaagagctctaataaaaggctaagtgcatcgagaagatccgtatctacaaggtcactgagaagcagagttccgaaaagtcaatcattcagtaacttgagataa

SEQ ID NO: 3757 - DNA, 843 bp, Saccharomyces pastorianus
atgtcccagaagaacagaagcaggaagaacaacaagacgagcggcgcaatggagccacatgctgatgttattcgcgatccatcggcacaggaagacacaacaatcaacagcgtaacgacggcggctaacgcagagcatgacaaaaccggtaatgagaatgcagaaggaacttctaagcgtttttccatctcaaatattttaagtaaaagagatacaaaagacgtgctcccggatttcgcgggcagcagttctcataacggggttctcacaacaaattcatcaaaagacatgaatttcacattagaattaagcgaaaacttgctagtggagtgcaggaagttgcagtcttccaatgaagccaagaatgagcaaattgagtcactcaagcaaacgaatggctcattaaatgacagaattgagcagttgagtagtcaaaaccattcctttaagagggagatagactcaaccaaagacctcaactgggatttggaagctaagttaactagtttggatatggagtgtaagcaactaagagaatcgaacaaaaggacagaaaaatcttggaataatgacaaggaaactttgaaaaatttgaaaactgatttagagatattatcgttaaccaaaaatggcatagagaatgaccttaatgccaaaaagagtttttatgaaagggagattagtgaactaaagggaagaatattgaatttgaataacgaaaacgataaattgattattaatgtttcagaattgacaagcgaaatcaattctttacaaggcgataaagctgaaagagtagaaattcaagagcagattaacaaagctagggcatctatttcttga

SEQ ID NO: 3758 - DNA, 213 bp, Saccharomyces pastorianus
aaaccccccgggcttacaacatgggacactaaatcctgtcccagctccgtatcacaattgaagagaatccagagagattttaagggcctgcctcccgcccaggacttctctgccgcacccattctcgtatccaccgccgccaaggacgagactagtgtcggcgtcagtgccagtgccaccggcggcaagaagactacattcgctgacgagtag

SEQ ID NO: 3759 - DNA, 363 bp, Saccharomyces pastorianus
atgaggtatgtacgcaatacagaggacatctcatcgggccgtagagcacagctcagcacagcacagtacacaatgatgaaaggttccagaagagcaggcaataactcggtcaccacactcaacacccctgtggtcatccacactacacagctgccccagcacgtctccacggatgaggtcctacagttcctggagggcttcatcaacgagaaggagagcatcattgacagcaccacgatgaacaccatcaacgtcaacgccgcggacgcggacgttgccgccggtgccgccaaccccgggctaaacatggacactaatctgtccagctccgtatcacaatccaagcgacacacgagccagtga

SEQ ID NO: 3760 - DNA, 3147 bp, Saccharomyces pastorianus
atgacttctctgttctttgttctgatgttgccactccgttcctttggctctagtcatgagtatgatttacagcctctttttattttcgtctttgttccacatgaaaaacgaaggaataataacaactattcagctctaataataaacaaaatagagttgtttacattcaggcgtcgatcgaacgggaagacaattagcattgggcccggatatagtagacgtgattttactaccatggataactttcaagttagtgatgaggatttactccaattttatcagttgaagactatcaatccaactcgttcatgggtacaagattcctcaaaattaaataacgatgaggctactaccactgaatttgggacggaatcgtcttttgacatattgaaagactttaaatacggtaatcagattagcattgacaaggaatcaagggcctatttgaatgatgaagccttaagcttcatcagggatcccttaagtggtcaagagatgtccaaggaactacaatattggaatctaccaaacgattcaacaaggttaaagtatcttgttaatagcaagcaatttaatgtgaaggcctttttaagagatatgcacaaacaggactccttcaaagatttaaataactcgttggataagctggacaatgatatacaagtccaatccggaaatttaacacagttggttggtaaaaacttcaccaaatatgttaaaatcaaaaacaaactggatcaaatgtacaaagaatttgatgagaagactaacgaaaacatccaagacgattcaccaaaggagaatcaaataaatgtgaaaaatttaaataaaaaagtcgacgaggttattaggacaacaacttttaggttgaaaccattaacggataactatcaaaaaattctaagttaccaagcaaccaaaaaatttatagaacaaaacaagttttacttcaatttacccaaatctttgaaaaaatgtttaaataataacaatttcaatgaatttatggttcaatactcaaaaggtgtcaatatccgccgtggttttaaccaaagtttagatacctcacaatcgttaattattaaaagaatctggtctcaggttgaaaaagtactaaccatctataaagacttgatttggaacagtttgataaactcaaatttcgacgttgaccaacctcaagagactatactttccttattttccaaattattgaatttagaaaacttcatcaacaaaaatcaaactggtgacaagaatgccgcttcatcatctaatgaaaacccaatcttgaggtggatgaccataaaattgaatggttttcagggtgatttaagcgagttgtctaatcatatgatcaataaaattattcattctcaaaagctcatcttacagaacaacaccaatcaagatcataatcaggattgcattgaattgtcctattatctacaaattaaccagctgttccagaatataagtgatattagtaaagacagtgatgacttaagaaccgccactgacccaagcaagatcaataccatctctgcaactaattatttaaacttgaattctcaatctagttctcaggggttaaccgactctccaataattatcgaaatgtggctattgattttaaagtatattaatgacctgtggaaaatatgcaatcaattcatagaattttgggaacacatcgaaaagtttttggatggaacttatcaaaactctattatcaatgaaaagagaaaggaaaatattctgatcggtgattctaacataattgaatcataccaaaaaagtttaatattaaagaaagaacagattagcgacatcaggttaaaaggtgagaatttcatcaacttagtttcacagaacttgctgtcttttttcaagtcttctcaagcttctttacccttctcgttgaagagggaccaaagtagcgaaaaggctggcaataataaggaaactgggtcacctttggactatgggtttataccaccgaattgtaatgggttaagttgtttgagatacctacccaaagttgtggagcccattttaaaattctctaccgaattagcacaattaaacattacaacgaacggtattgatatttgcagaaccactttatcggtcataatcgatcgttgcgtaggtgctatctcttcgacaaaattgagagatatctcaaacttttatcaactagagaattggcaagtttatgaaactgttattttttcaagcaaatcaaaggacaataacaagaatttagtttttgagtatggtgtgacacagtttccagaaattgttcgttccttccaagaagtcagtatcaagaccacgagagacttattatttgcattcgagaaactgccaattattaacggaatttcagtggtcagctacccgtcaaaacaattacttacaggcattgaaattcaacaaattatctcgctggaagctgttttggaagcaattttaaaaaatgccgctaaagataaagacaatccaagaaattctcatacaatattgacattgacaaatctacagtacattagagagtgcacgtttccaaatgtattgcagtactttgatgatgcgtttgaatggaacttaacttccaagaacttagaattgttcagcttattgtccaaaatggaatcgtccatctttggaaattatctttctgacttaaaaattaatttgagagatactcttgaagagaaattccatgaaataaattggccaatgtacacatcaaattcatttagagtgggtgattatattatagaagcgttgatgattttgattgtggtccacagtgaatgttttagaattgggccccagttgattcacaagattctgattgaaactcaaatttttatagcaagatacctattcgaagcatttaaaccttatatcggcaacctttctaacgatggtttattacaagttatagtggatctagaatttttccaaagagtcatgggcccattattggaaaaggacactgaggcaacattaagggcgtgtttacaaaattgtttccagaacgacacaaatagactacagaaacgtatcaatgaaatcgaacccattgtatccgcaaatctgaagaggacttctattcaatttgctgcgttcaattga

SEQ ID NO: 3761 - DNA, 984 bp, Saccharomyces pastorianus
atgatcaggaatatgaaggtaccactgggactatggaaggcttcaagtggcagcatattgtgcacgcagagaagggtcttcccaatgaccagaagcatgaatacaggtgcaagtagtgaagttgcagctgtagccgcggcaaaggagggcccagccctttcagcagacctttatatgcatccggaaaagtggaaagggctgccaccccaaaggattttggaattatactgggaaagaatggctagattgggttcggaatataagcccaacaaggacgagttgagtgctttattaaccacgtcggagtattctgatgtgtcaagtagtgatatcaagaagctatactataaaggggagcagggtgctatcgatattaaaggtggaactgtaaatcgtgatgatagtcttagaccatttatgtttgacgaattaccttcccaagctcaagaattggtggctcaacatcgtgaacaaaggttttataatcgactagctgcctacgaattgccattattggcgcaatatcgccaggaatacaagaaaccatctgcaaagactcacccggtcacttacaggtacactaactacgtcggtgaggaacatccaaattcaagaaaagttgtattgagtgttaaaacagaggatctgaatctagagacaaaatctctacataagtttagagtattggctaggtcacgttatgaccatattacggatattttcaaaatgtctagtgacaaatttgaaaatgcgtcacaaaacgcacgttatctgcatgatattttacaaaaactgctagccgaatcaaaagatttgaccaaagacgattttagcgatgtgcctattgatatgagacatactattgccaagaacctgcgtaaaaagaagcataatcacaagtttcctgaagaatggaaacgtcctgaagatgcgccgaaaaagaagtttgatatagtagatcagtttatgaatacacttcaatga

SEQ ID NO: 3762 - DNA, 780 bp, Saccharomyces pastorianus
atgaacaataggactgacggcacagatatgtcattatcacaagagactggacccagtgttcggacacccgacagcgacatcgacgaagacgcatccttccaggcaaaatcaacaggaaacaaagacggtggtagtaccacaagtacactacctcaacagattggatggataacaaatggaatcaatctagactatccaacctttgaagaacggttgaaaagagaactaaagtatgtggggatatatatgaacatgcccaaagatgaaaacaatcctaactcagatgaccctgattggattaccggtagagaagacgacgagataagcgcggaattaagagagttacaaaccacattgaaacaggtgaccaaaaaaaatcaaaaaaggaaagccctgctgattccgttagtcgagaggcaattagcatggcaggaatactcatctattttggaggacttagacaagcagattgaccaggcttatgtcaagcgcattcgtgtacctaagaaaagaaagaagcatcatacagcaacttcaagtaatgtgaatacaggaaccacatctcaaatagcacaacagaaggctgctaactcgagcctaaagtcgttactagataagaggcagaggtggattaacaagattggtcctctatttgacaagcctgaacttatgaaaagaattcctgctgaaagcgtattcaaggacatagaccaagaagaagatgaagacgaaggcgatgtgtttggacaaaacattaacaaggacgtggaactaaactga

SEQ ID NO: 3763 - DNA, 1095 bp, Saccharomyces pastorianus
atgcctagacatggaagaagaggaaagctgccaaagagcgaaaagctccctaagaaagaggaaacagacaatacgccgtcgaaacttttatcatctatgttaaaaacgttagatttatcattcgagcgtgacattggaatgctcaatggaaaagccgttagatctatacccagtaagaagacattgttagaattacaagctcaattggatagcctcaacgaaatattgggtgcaattgcccaaagtgatagagagactatagaagctttacgaaaaataagagatagtaaggacgaaaaggaagcagacaatgaagagcagaaagaattaactgcaaatggaaaagacgaaaaggaaatggctgataaggaaaaggacgaaaataaacagaaggaagataatttattagaatcacatccatctgaaacccttcctggcacaattgaaaatgatgtagaaagcatcaaacaagccgcagatactatggctagggaagaaatcaacgaagacaaagagttgcaggtaaacaaagaccaaccaagggaaaagaggccatttgagtctgaaataacaaatgacggcgcagagaatgaaagtacgaacgaaccagaaaataaaaaacagaaagttgacattgataaaatggaaaatgatccatcagtgaaaaatccaaaatcagaatttgttgtatcacagacactaccacttgcagcagcggccttgggattatttaatgaggagggactagaaagtacaggagaggatttcttgaaaagaaaatataatgttgctagctaccctacaaatgatttaaaggaattactaccaggtgagttaccagacacagacttttcgcatcccaagccaactaatcaaatccaatttaacacttttttggcctttgtggaaaacttctttaaagacctcagtgatgacaatgtaaagtttttgaagacgaaatatattttaccggatagtttacaatttgacaaaacatatgaccctgaaataaagccatttgtcataccgaaattgggtcctctatattctgacatctggtctaaagatgaaacacgactaaaaccctgcctttaa

SEQ ID NO: 3764 - DNA, 147 bp, Saccharomyces pastorianus
atgtacatgctagggttaggttctgctttctctcttttcgggatttataaattggagacagaaaacgatggttttgttggcttggttaagagtctatgggactcttctaaaagagaagattcagcaaagattgaggccaagaaatag

SEQ ID NO: 3765 - DNA, 744 bp, Saccharomyces pastorianus
atggtaggcatctacacatatagaagtaaggtcttatggtataggcagacttccctggtgattattgcaatttgcttttcttatgttgttgctttcttgccttcttgcttattatgctttcggaatgcgaaaataatggaactgaactactcatgtagcctttttttatgtatatactgtatcacatacaagggtaaacaaacaaaaggaaaaacaagtgatgatctgaatggaacaaaaaaaaaatcagcaatgagggaggaaacaataagagcgttagaagagcctcacaaataccattataaagcagaatggttggagagtaaagatctcgatgaacgacagttatttgaaatatttgcttttggaaacattaaggatgttccggaagatacaaccttaacatcttcgatgcgatcgaaacttgaaaagttgactttgataacattgagtgaaacatataatgagttgacgtatgagaacataaggaagcaatgtcaaattgaagataacagtatcattgaaaaccacttaatccagttacaagatattttcaaagtagaaatagactctgttaatttatctataatttttttgaaaagactggattgcagagatgtatattgtaatgaacgagaattggttgtgattgagaacccgcgagtgacgaaagagtgtttagtaaacaatctacgaaagtggaagataaagctcaaacaagatatactggatcagtcgaagtaa

SEQ ID NO: 3766 - DNA, 1386 bp, Saccharomyces pastorianus
atgcctaccattttatataacaccaattccagcttaatttctaaataccgaagatctaatgcctccaagccatataaaggactaccatcgaagaaagcgcataagcgattgagtttgccaccagatattttcaaagaggagtctggctatacgcgaaattgtaatgacgatatatcattccaaagtgaattcgagaaggattctgttggatatctccaggatttatgttgctccgtatacccaagttcactgcatcaaaggatcaagaacctgagaggttcaccagatttacaaataaatgcattcattgcgttaattttcaaaaatttcattaaatcttggtacggtgtcaaaatacctactaatgattcaaaattcttaactgaattgtacaatttggttcaaaatttggtaaagtatatgaaaaattcccaaatcgactacggttcccttctacttgattacattccctgtttggtttcatcccatttgaaagctttgagagactgtccccaggataccaatcttgtttatgaacattattgccagttaactctatatgattccaaacgatacccaggcttattcatagatattatccaaaataaaatgaacaccaaatctctattgcaaagaagtttcttggatagttttcttaatgaacttgtatttggacatatattggattcgataatagagccatatcatcttctgaacggtctgaatataatttgcaagaagataaagctaaggtcagcaatgaaccccaaagaaagtagcacagatgaaaaaagtaaagctggtgcctggtcgtttgtaggcaaaataaagcataagatttctcaagtgggtaaacttgtatcttattcaacttcaatgaaatcgccaaacatggacagcaccggtattccagaaataccgtttttacagaggtacatctttaccttcattcttgttgattttttcaaattgcccatgaggaagccgtttttattctcaatgtgcagaacttttcaatgctggatctctaaatctaagtttttgaacaaaatgatgtatagaatgtttgctaatactgcccaggctaaaatcaccgatcctacaatacttggcggtttgtttgtatcactacggcattcactgttccctaatgatagtgcaatgggaccaccgaaaacaataccaatagacgatgctttcttggagtttaggggggaatgcgtttctaatgtatgggatgtgtgtatcgcttacagaatcgataaaattcttgccatcaagaaatttgacatcgaggaagttatccattctttgtcaaaagatcgggattgtaataaactactgctttatagagctatggactgtgttgctgctcaattaccttaa

SEQ ID NO: 3767 - DNA, 1470 bp, Saccharomyces pastorianus
atggaaccagtggaaaaagcaaagaatgattctaaaaggtcactaagatcaaaggctcaaaacgagcatggggaaattgaaaagtttgattttgatacagaagaatatgaagtcaaccctaaaaggaaactaagactggttagcaggataaatccaaacgcgaggcatttaaggaaggctaaatcccaacttcatattacagcgaaaattgcaagcgttgttcctcatgaagagcatgctaaggaagcggctagtcagcaacctgtattgaaatctccagccatgatgagcactttctgtagtgaggtcgaagaaaagaaaaaaacaattacgaagatgatacttaatattgaaaaccatgaattaaatttatcaaacaacaactcaacagaggatttgcttcccgattgtatatatcaatcttaccataagaaaatgctgaagcaagaaaataggatgattcaatcagatgtcgtgaacagcgaaaatgaagcagataggctttctttgatatctgatagattggatatgttaaactggacaacaacactgcaaaaggttaccaaaataaacgatcccacagacaagaatgaaatggagaccaaacgctaccagacaaaagagctaattgattccatgctaagtaaatttgaatccatgaaaaaaaagagctataaattagctcgaaggccagcatcaagcgactctttgctaaaactggtcagtagtaaagactggcctaaactatacacacggattgaccgaactttcatcccggattatgcaagctcatctgatgaagaggaagatgatataatagtcgaggaaataaggcagaggcggttaaagaaaagagaacagcaatgcggcggctctattataatattactaagtgaccatcaatcgcaaaaaggaatgacacggtttgctattgtagctgagccgctacggaagccgtatgtgatcaaaacgtcacatgcagagagaactttatggaagacgaaagcgcctttgaacccaaagaagttcagaaaaaattttcgagcaccaacacaagtagctataaagaaaagaaaactagctatccctttgactatggaggtagaaccagagatcattcgagatataagacacaaactacaagaatctctaaaatcaaatgctatagaggaggaaatggcgatagcagatactgatgagtcgggggtcaaaaataattctagggacactccggaacctccaattctaaccgttccagaaacgacaccatttgactatacctttgcgtcaactgcatctgagactttaccgggctcttccaaaaagatagctacggtgggcacgaacatagagacaagtttcacaacagtgccttctgttgacgaagataaattcgtaaaagcgcacaatggcattattagtgattcggatatcaccatcttgcctgtccgcaaaagaaaaaaagcttga

SEQ ID NO: 3768 - DNA, 384 bp, Saccharomyces pastorianus
atggttgtaatacattttgaattagagtcattcgggaagtgccagtacatgaatgagaaactggaaatcttggctaggaaacatctaactacaagatttattaaagtaaatgtcggaacgtgtccttttctagtcaataaactaaatgttaaagtactgccgtttgtactaggttataaaaatggtctggaaaaagtccgttatgttggctttagcagattaggtaacgatccaaacggatttgatattaaaagactggaagagtctctgacgctttcaggagttattgaagacgaattcaaaaccaagaatcgatcatttggtaatgcgaaatcttttacttccagaagtgatagtgatagcgacagtggtttagatatttag

SEQ ID NO: 3769 - DNA, 1128 bp, Saccharomyces pastorianus
atgcagagccgtaccatgaaacacgaaactgccttacccattactccacctagcacggtggaaaaaaagcctcaagtgggggatcgttgtgatgagcgtttaaagccaagaaagttgttatcgcaattgaagaagagtgtcagtagcaggaaaccaagattgaagtataggcctgtattgaactctgtgtttgatctggacgccttcatggattccaagctctcctgtacgtcgccaaaccatcatatggaccgcgatgctggtttcattaaatatgcattgagttatagtaaaagaatggtggtggttagcggtgcaggcgtgtcagttgctgcagggataccagatttcagatcgagtgaaggtgttttctctacagagaacggtggttctggtaaggatttatttgattacaaccgtgtgtatggagacgaatcaatgagcgttaaattcaatcggttaatggtttcgctgttcaagttgtcgaatgattgtctgcccacacgatttcatgaaatgctcaatggttttgcgaaagatggaagacttttaaggttgtacactcagaacattgatggtttggacactcaattatctcatttggcaacaaatgttcctttggcaaagccaataccgagtacagtacagttgcacggaagcataaaacatatggaatgtaacaaatgtctaaatgtcaaaccttttgaccctgaaatattcaaatgcgacgacggatatgattcacgaactgaaattataccgtcatgtccacagtgtgaagaatttgaaacggtgaggagaattgcgggtttaagatccactggcgtgggtaaattacgtccaagggtaatcctatacaatgagattcatcctgagggcgatttcattggtgaaattgctaataacgatttgaagaaaagaccagattgtttaattgttgttggtacaagtttgaagattcccggtgtgaaaaatatttgcagacagtttgcagccaaagttcatgcaaacaagggtattgtgctatatttgaacaccagtatgccccctaagaacatattggattcattgaaatttgtagacttgattgtgctgggagactgtcaacatattacttcattgctatag

SEQ ID NO: 3770 - DNA, 174 bp, Saccharomyces pastorianus
atggcgttgttattggtgacgttggcagtgaacggattcataccgttcgtattggagagattgggcttgacgcccgacgtgaacggattaccgaaacttgacattatagttatgttgttactcgcgttcaactcctatgggaaattgatgaaatcctgtgttatagctctctga

SEQ ID NO: 3771 - DNA, 141 bp, Saccharomyces pastorianus
atggaatgtgaaaagttaatagtatccacaagcgatccaactttgatcagtataagtgccaaattgaacagtcttagagctacgatgacaaatcatcaagccaatttgaatgccaataaacgattacttgcaaccaagtaa

SEQ ID NO: 3772 - DNA, 882 bp, Saccharomyces pastorianus
atgagtgttgagttgtatccaaatgacaggtttggagcagctgcccagtatgatgagcataaagatgccatggcagaatgttcatgggtcatcgaagagattgttaaaccacaactgcctaacatcattgacaatttctccaaatgtctggaaatgctagagagtgaccagatatttaagatgcccatatccaatggtattcccaacgaaaacagcaaacaaaacgattcaccgacggtcaagggcgtcatcacgagacaaggtgaatatatcattgattttcatattgtagtaaaatttccacagtttcaaagaggcaaacaagttatgttccggatgaataccgggttgaatttcttacttgtccagttcagtaagataatgacccatttgaaaagtatactagaaatactgaaccagttacaactggccactgatgtcaacgagttcggggataagtttgacgtggcgatggagctactaaatcattccctagcactcttacaaaatcctccaagagatctggtatttccagaggataataactatgccatgaaggaaatgtttcaggattgctattcaatctgcgaatccacggctcatatcctgggactggaactaacgctttgtaaaaatgagctctgcattgaattgcggaatcttattaaagtgacaaagaaaccttggtgcgaaattgataatagaactggcaaatcattttgtgacgatataagaaatcaagtgacaaatgaaagacaaaaaaatttgtctaaaatcctttcagaaaatggtgtgcaagtccaggattccaccttactgaatcatttgatctcttcttttcaagcgaagccattacactcccagaagcccaggaactactaa

SEQ ID NO: 3773 - DNA, 2178 bp, Saccharomyces pastorianus
atgatgggtctgcaagaactactggcgaaagtgccgttgttgctatcgtatccaactatcattctatccagcaatctgatcataccctcccataatgatctaataagtacagctacatcagcagcggaacaagatgggcaaagaccggttccgtttaccacagaccacatcatcagagtggttctacttccaacatttatcgcctcatcttttaacctgtttgcgtactacttcaatttcgtcaattacaccaaccgaaagaagtattgggttttatttgttgctatcttcctcatatcgatactgactaccattttccatccaattcagtccacatgtatttctctgtcaattattaagcgcttaactgctgctactgaatcttcatcgaaaactgttttcgacttcaaaaccattctaaaaatgtttgtgccctttatcgttatgacactggtgatactgcgctttgatccgtcattagagtctggtatgagtgatatggataaattttctgtgcctttggttacatatgcattattagtgattttgctaagatgcgtatcaccactgctactatcgaccttatcggataacgtagatgttgcatctaaagacagcggtacacagaaatcggtaggcaggaacaagaagtttccgctgatgattatactaccaattgtttcgtttacttttttgtacctaacgactataataaacaatacttataacatccagttgttgatggtgtttgtattttttggatgtttgtctatcttcttcctatctttaaaagatttgttcgcagaagatgtgaatcaagaaaaagagattcacgaagcggagcatcgtcataagtttgggataaattacgtgatttctcacttttggttgacaaggttcaccattctattaactggaacaatggctattatagtacattttttatcgtttaatgaggttacttcttccaagaagacagatttgctgagtttactttttgtcatagtggcagaatgtatttcttcttcttccagcatagaggcagattcgcattctcttaatcatgcgcattgtcattctcatacgtgtgattcgacatcacttgaaaatgaaagtatatttagacagatggctttaaacaaggatacaaggtccattttttctttcctattattaaacactgcctttatgtttgttcaattattgtactcttttcgttccaagtcattaggtttattatctgactcattacatatggctttagactgcacttctttattgttgggtttaattgctggaatattgaccaagaaacccgcaagtgataagttccccttcggcttgaattaccttggcactctggctggtttcactaatggtgttcttttactaggtattgtatgcggtatctttgtggaggcccttgaaagaatctttaaccccattcatctacatgcaacaaatgagcttttagttgttgccacgttgggtttgttagtcaaccttgtcggtttatttgcattcgaccacggtgctcatgatcatggtggtacggataacgagaatatgaagggcattttcttacacatattggcagatacattaggttctgtcggggtggttatttctacgttattgattaaactgacacactggccaatctttgacccaatcgcttctttattgattggttctttaatcttactaagtgctctgcccttactgaaatcgactgcctcaaatattttactaaaattagacgataaaaagcataacatagtgaaaagcgcgctgaaccaaatatcaacgacaccaggtattactggttacacaacccccaggttttggcctacggagtcaggtagctccgggcattctcattctcatggtcacacgcactctcatgaacaaggtcatgggcacgagcaacaacatgatcatactaaccaaccacaaataaagccgactttggtagggtacattcatgtacagtacgcagaaggcgaaaattcgacaatcatcaagaaaagagccgaaaagatatttgaaaatgtggggatcaaagcatgggtacaagttgaggttcagaactctacctgctggtgtcgcgctacttcaatgaatacagtttcgaccacgagccccagttctctacctctacaatccatagcgaattga

SEQ ID NO: 3774 - DNA, 1014 bp, Saccharomyces pastorianus
atgagattcatcaaacagattgatcgttcgtttactgaaaaggtaagaaaaggacaaatcacaaagatattcgattcatttttgaattccaaaaaattgaacttcctaaaggattcctctattgaggtactgtgtgagtttctagtcgctttgaacttttctattcgtaacattgcatatctgtacattgaagaagacaccagtcttgaccaccaaggaacgaactctctagagaagccaggtatttgtttaaataaacaagcgctctcggttttcaatttgcaaggcttttattatagttttattttaatcataaaattcttattggattttgaggcaacacccaatttcaaattactaagaatatttattgaattaagaagccttgcaaattctatcatgttgcctaaattatcaaaattatatccccgcgagttttctggatttccagatgttgtactaatgcaacaacttctaaataaagaaaaccattttcgcggtcctgatttatctagaagcgaacgtaccaatagttcattcacaggtttaaaggcaaaattgaacaagaagattaatgtcgaaggcttggaattgtttattaatgaaatcctggtgaattctttcaacgatacttccttcttgaatatggaagattctatccgaaacgagttttcttttgataatcaagagaggccagttttagatatgactcatccagcacactttctatcaaattcgaacttagaaaatgttaactgtaatggtctaaacgactctcaccaaacgatttctactttaaatctgttgcgttatggagaacatgattcgtccagccataaaaatggcgtaaagggacaaggttttgctgaaaagtaccagttatcttcaaaatatgttactattgcaaaactgtttttcaccaatgttaaacaaaactatattcattgccatatgctggacaagatggctggcgatttccatactttggaggagtatataaaggaagtcagctga

SEQ ID NO: 3775 - DNA, 1083 bp, Saccharomyces pastorianus
atgatagtaatggagactccgctggactcgaattcgaatgtgctgtccaaagaattgataatgccaactacaacggaactgaatgaatacttggaccttttcaaaaacaattttcttctgcacttccccatcattcatccaagtttgctcgacctggatttgaaaaatctacaacagtatactaatgaaggtgagtataccgacatcgagaacgcccaatttgatcagggtacggataaggattataattttaaacactatcaaatattgtccatttctaaaatcgtttgtctccccctatttatggctacatttggctctttgcataaattcggttataagtcccaaacaattgagctgtatgagatgagtagaagagttttgcacacgttcctagagactaagagactatgtcgcaataaagccatgagtgagaatcatcaaaatatctggctgatgcagtctttgatattaagcttcatgtttgccttagtagctgactatttggaaaaaatcgattcttccttaatgaaaaggcaactgtcggcactttgttccactatcaggtcaaactgtctgccgacgatttctgctaactctgaaaatagcttcaacaacaacaatgaacctttaacgtttggttcttcacttcagtacattatttttgaatcaaaaatcagatgtacgctaatggcttataatttctgtcaatttttgaaatgcttcttccatatcaaattcgatttatccataaaggaaagcgatgtcgaaactatttatatacccgataatgagtcgaagtggacaagtgaatcgatactgttcgacaagcatgttgtacaaaaggaaaaccttcatgattttagaaacttctactacagtttcacatatggacatctactttcaataccagagtttctagggtcgtcaatgatttactatgaatatgatttgaaaaagggcactaagtcgcatgtgttcttagatagaatcgatacgaaaaggttggagagaagtctggatatttcttcgtataacatcgataatggcatgacaacaaataacaaagataatacatcttag

SEQ ID NO: 3776 - DNA, 1125 bp, Saccharomyces pastorianus
  modified_base (94)..(121): a, c, g, t, unknown, or other
atgttaactttgaaaacccacaatatatctgtggttggatcattaaagaatgtgcagcaaaagtacaaattaggcactttagatcaagtaaagnnnnnnnnnnnnnnnnnnnnnnnnnnnnccaaaaaagaaggaaatgcttctttcaaagattcaaatctagacctaagcaagtgctccgagacaccaagggaacaggtcgtccatatggccgtaatacaaggaatgaatcactttattgaactgaatgataaagcattccagacgcattcagctgattcagatgatacatacatagatgaaaacaatgatgagatacattcccttcatgagttggaaaagaacacaacatttgaggaggatttggctaaaaagccatgtttcaccccatccccaacgttttctaattattccagaagctcaactaattctgtcttttcaagttcgtctcctaaacttctagatgatgattggaataatatcgcggctgatttctcaaaatcacaagatccagactacaaagagacaacccctacatctaccgaatcgtctgattcaattacgagattgagaaaatctagtaaagttaaggataaagccgagttgtttgaaaagttaatttttagagatagcaggccattaaaagcaaagaaaaaagacaacccaagaatgaaactacctagttcgttaagtgttaatgacgaagactttagaaagatcataagccctccttctgaaattttacctaaagccagccgaagaagcgtctcgagaggctacttagaagaaattgaaagacgcagtcccgatcaaaccaatgaaatgctaaattctttggcaattaaaagaataaacagcaggaaagtagcagactatgagcaactcattaaaagagaaaataatattaatactgaaaaaggggaggagaataatgatgaaaataaacttcagaggagtcatacttccccagtaatagaaccactaaaacctcaccaaagaagcaaactcaaggcagttgtcacaactggtagtaaaataagctatcgtaaaattgatttagataactcgaatgcaaatgaccatgtaattaagcaacttcatactaatactaattctaatatataa

SEQ ID NO: 3777 - DNA, 789 bp, Saccharomyces pastorianus
  modified_base (358)..(385): a, c, g, t, unknown, or other
atgtcatcatattcttaccatatactaacaccgctggaggagaagtctttgacaaacttaccgttgaatttattattccgaatactgtcacacctggacatgaatgatttgcaaagcatagggaaaacctgcactctgttacggatgctggcaaatgaaaacattgtttacagaaatgctcttattggttcaaacgggaacatgtggtggaccaaaaatgtccttgttgatgtttttgatattttgaactttaacagaaaggcaatgttaactttgaaaaaccacaatatatctgtggttggatcattaaagaatgtgcagcaaaagtacaaattaggcactttagatcaagtaaagnnnnnnnnnnnnnnnnnnnnnnnnnnnnccaaaaaagaaggaaatgcttctttcaaagattcaaatctagacctaagcaagtgctccgagacaccaagggaacaggtcgtccatatggccgtaatacaaggaatgaatcactttattgaactgaatgataaagcattccagacgcattcagctgattcagatgatacatacatagatgaaaacaatgatgagatacattcccttcatgagttggaaaagaacacaacatttgaggaggatttggctaaaaagccatgtttcaccccatccccaacgttttctaattattccagaagctcaactaattctgtcttttcaagttcgtctcctaaacttctagatgatgattggaataatatcgcggctgatttctcaaaatcacaagatcgacaagctgatccg

SEQ ID NO: 3778 - DNA, 1695 bp, Saccharomyces pastorianus
atgctagctgatatacccgctgaaagcactatgcggcgcaagtcccacttgccaaatagaaatgtgccgaatgaaataagcagtactgccctatcttcatcgacctcttcagctgtctcctattcatctaataatgatgatggcagttttgatttcccttcagattcttctttaagcgacatttctgacgtagaaagtagttacacaagcataaaaagattgaaattagaaaacagcaaggaagggaaaaatcagtcttacaattattttgagaagaggaacgcaaatgctttagaaaaggaggcttctcttgacgacgattctaagatagaaacagatgatagaataaatcatctgcttacctcagccagccgcacgacatacgtcagtaatatgcgcgatggcctagctgaaaatcggcctgatttgtcaataagtaaatgtggagcccacgaatattatttaagcgattcatcatcgggaatcacccagaaagaggaggacattggtgtcgaagtctttagagatggggaacttgattgttgccaagtactatcgataaataatgacgaacttgttaattttcaatatccggaaacagaaactgatatggaattcgacgaagtatttttaacaccattagatggtgtgaacagagtaggaaaagggaagggatcgattggaaaagatctgaatagttgcatttttgagcaacacacgcagctaaattcaggagttcagcttgttggcgaaagcaatgcctttccaatattgagtacatccaacgtttcttctctcaccgaggctttgcataaaattcatgaagacaagctccgttcgcctactgatgagaactttaatgcgtcaaatgtcgttatagattcaaataaaatagacatgaattacctttataccaatgctagagaggagttatctactccctcattttcatcaaaagactttgaagatgaaagttttgataacgatgacaaagtcgatgaagtcatatacagggatgatgattcaacagacgaagatgagagtttaccaccaccggatccaagaaggaaaaaaatcggttccaaagcttgtgaaatagtggattctagaaaagttggcataaatgtaccaaagttatgtatgtggtccctaagtgataaacccttttgtgttattgacggactatgtacaaaatcgctctgtccattagccgagaacctttctaactgcgaaagctcaagttcgagctcaagtcccattaatccacaggaggagcaaaaagaaaactcaccttttgataatgataccatgttaaccgatcttttaaacataagtgaagctgaagcagagaaagcccccatttgttgcagcgaacatacacatgaacctttttctgaaattccaaaagggccattatcgtcatttagagatagaggaaaagctttacaagacacaggcgtaccttacaagctgaacgtttcaaaattcactagaatgggcacccgttatgtgagcaaagatcaatcagagggaggaaatggaaacttctgttattccgaatcactaccccaagagaaaaagaggaatttaatgattagagaaagacgtctaaagcagaaacagaatcaagggaagctttataaacaaaagctaacctccgtcaataatttgctcgacaatattactccattttga

SEQ ID NO: 3779 - DNA, 3114 bp, Saccharomyces pastorianus
atgaaagaggatgccgatctaaggcggatggagattttaaagtcaccgcattcatctaaaaaatcacctgaaaaacctcttggactaaaggacaaccaagatgtgtcaaccgaggatgaggtctctgactataccgcctctcccagtaaaagtgaaagcgatagaagtggaaataattccaaagcaccatttagtgctggacctgaaattgcagaaaataaaaatgatataaacggttccgaaaccaacgggaatgacaaaactaaagaagttaaaattaaacgccccgaaaccaaaatcaccgaagcatatatgaataaagctagtattaacgaagcagtcggaacgatcaggcaaataacgcacaaaggaccaataaatagtggaaaaactgtatttcagagctcccaaaagatcgaaacagatcctcttcagaaggcttttcaaacaaattcaacaattgaaatttcaagcttcaatccatcaaaaagagctcgggtggaggatctgctgaatccctcgaaaaagaacaaacttaataaggaatcattctcaaatacaccaaaaggtacagcgaacccctccgtgcatccagaaacccagttagctatcaaagatgcctcgaacacaaaagaaataataaatgtaattgatactggcaaacaagatattttggttagctcacctcaaagcgacgctctccgttctacacaaacaattatacagagagacaacttacaaaaaaatgtacgagatccttctcaggccgaatatacttctgccaaatcttcagtagccatcaagaagcgggataattcaaaaagcccacctccggcacataataataaagaaccagcaaagaagaagtggagtagtgtcctagacgaagaaggtgtccctgaggctgtcgaaagtcgttcgttattgaatttgttttcaaacgtattcaagacttcccttcatagtaaaaataaatctccgattggaaatgctttacatatgttagggcaaaagcctagtgctccggaagttgctgttaccacggaatcgctgggaaacaaatctgatgatatgccactatcccaaccagttaacggaagtaagcctgagtatacgaatgatcctcaaacctctttatcccaacccactggagctggcgaagccgttgctcaatctattaaaagttctttactagatttggcaaaggataagcaaattatggaagagaagttcaatcgcggaagaacggatacgggaatatctcaccctgcaaaaatggagcttatttacatatctgaccccgacaagaggtattcagagaatgatagttcaagcgatttggagagcttaagttctcgcgaatcagacgaaatcaaagtagtaaaagatatcgatacaagcactggaaagaaccaaaatcaaacatggtctgaccctgaattagagtggcgaagatctgaacgtgaattaaccaaaaacatacttcgaagtctagatgataatacaaaatacgataagaaaacaatgtgtatccttatcgagcaaggtattcccaggcacagccacctaagcaataatccattgactagtgtgactaataacatctgctctgttgaaaactatgaaacgtcaaacgcatttttctatcaacaagttcacaagagagatagattacagtacttaccattatatgaggcttcaacattagaagaatctgatgttgttaaaagggaagattcggtcaacaaaaataccagaacagaaggaaaaaattcagaacagagtcttactccgacaaaaacttttcaaacaccaaccatatcatctccattaggctttgaaataataaacgcacctataaacaaaaatggcacgatcaccaaagagactggcgtgactacccaccacgatattagtcacagtaaagccaagaataacaaagagaacctatcgaaagatttttggagacaagagtggttagcaaatctgaaactcatttcggtctcacttgtggatgaatttccttcaaaaactcccaagagtgagagacagacaattaacgaaaacatggaaaggctcaaagagatatttgttaggaagtttggttcaaaaatttccaaggttttaactgagagcgacatcgttatattgaaaggcgagatagaggattttccaatagattctagagtcaaatctttatataatgatacacaaaacaagcctgggacgaaaaaaaccaggttttggtcatacaagaagactctaagattcgttgtcaacatgggaattcatatacatatgccacagaagcctatttccaaactggcattggtcaaaccacaagaagtcgtaccgcagcaaataatagatgccaaacttaaaccaaacgataaaaaatcacaaccgacaaaggaactgtcatcgattaaacatgtagctgcaccaccgccagcagcttcaaagcctgtaaggcagcagcaaaagatagccaataaggagaggctaccagaaaaagagcagatcgacggcaaaaacgaggaaagaaaaaaggtcgttgaaaatggtgaggtcgagccgcaaaacatacccctatcccacttgaatgcggtatcttctggctatactaatctggacaaaaatgttgcaactgctgaagatcaaccagatactcaatccgaaattatcacggataagaacacaacagacatttttagcagtgttgatgttttgaaaacacagtcagtaatctgctcacaaccagcaaatatatacacatcaactcaaaaaacagaatatgaaaccaaaaatcaagacaatgatatcgaaaaattggaaggagaacatatggatgacgacggcctttcctttgttgataaccttttgtcgagaacagagttaattttggacgaaaaggaaaaacagctggtcgcagcaaatgaaatcatccagtctttgtcaagtgtgattatgagagatgaaatcaaaataacgtcacttagaggagacctcaactttacaaaaaaatctctcaaggatgccaaaagtcagatttctgagaaagatgctaggattcaaaagttaatgctaagagtttttaaaaaaaggagaggatga

SEQ ID NO: 3780 - DNA, 720 bp, Saccharomyces pastorianus
atgtctgatggtaagaaaacgcccaataggttgagcacaccgaagattactaatgattcaaagacaccaacggataaaaacgctaaaattagtgaaaaattaaacgaaaccaaaacacctagaataccattatttacgtttgctaaaggcaaaagccattcaaggccgtcaactccaactcataagacacgcactttgtcgaaagaagcaaagacaaccccacgtaaaatgcatcaagaaacaaaatcttcaccattgagaaaggatgcaaacaactcttcttctcactcaagtctagggaaagtaagcaatagcaaattactcttccttcttcgatccaagacgtcattggggagaattgaatcaaacaatagcacaaccgcaagtgctaagacacaagcaactattgaccaagcgcccttactcccacatgcgatacaacaaactccaaacttaaacactaaacctgaacatactataataccgatatcaaaaacccgaaacaataactcattcttatcaggagtcaaaagtttattaaataaaggacagatacgtgaccattctgatggggttctgagcaaaaatatgataaatatgccatgtgtttttgagaaatcacttaaggagaaaaccacgatcgcaagcgcaacaccggcatcctataaagaaaataagactattgagtctgataactggaaggggggaatgagactgtaa

SEQ ID NO: 3781 - DNA, 1059 bp, Saccharomyces pastorianus
atgaaggacctggtgattttttccgatgaactaaaccatgcctccatgatcgtcggtatcaagcatgccaatgttaagaaacatattttcaaacacaacgacttgaacgaattggagaggttgctacagtcgtatcctaagtccactccgaaactaattgcattcgaatccgtgtactctatggccggttcagttgccgacgtagaaaaaatttgtgatttggctgataaatacggtgctctaacctttttggatgaagttcacgccgtcggcctatatggtcctcatggtgcaggtgttgctgagcattgtgattttgaaagtcaccgcgcaagcggtattgctaccccaaagaccaacgacaaaggcggtgcaaaaactgtgatggaccgtgtcgacatgatcaccggtaccttgggtaagtcatttggtagtgtgggtggctacgtagctgcctctagaaaactaatcgattggttcagatcatttgcacctggttttattttcaccaccactttgccaccttctgtcatggctggtgctacagctgctatcaggtaccaacgttgccatatagatctaagaaccgcccaacaaaggcacaccatgtacgtaaagaaggccttccatgacctgggcatccctgtgattccaaatccttcccacattgtcccagtgttgattggtaatgccgatttagcaaagcaagcttctgatatcttaatcaacaagcatcaaatttacgtacaagccatcaacttccctaccgtcgcccgtggtacggaaagattgagaattaccccaacgccaggccacacgaacgacctatctgatattctaattagcgccgtagacgacgtgttcaatgaactacaattgccacgtgtcagagactgggaaaaccaaggcggtctgttgggtgttggcgaagccggattcgtggaagaacccaacttatggacatcgaagcaattatctttgactaatgacgacttgaaccctaatgtcagagacccaattatcaaacaactcgaggtgtccagtggtattcaacattga

SEQ ID NO: 3782 - DNA, 618 bp, Saccharomyces pastorianus
atgcaacgttccatcttcgcgaggttcggcaactcttctgccacggtttccgctctcagtaggctgtctcccacagccgcaccatatgcgaaaaacggttatgccaccaccaccggtgctggcgccgctactgccactgcctcagcttcatctacgaacgcagcagctgccgctgctgccgccgctaaccactccacccaggactcgggcttcgattacgaaggcatgattgattctgaactgcagaagaaaagactagacaagtcatacagatattttaacaacattaatcgtctggccaaggagtttcctttagctcaccgtcagactgaagccgacaaggtcaccgtttggtgttctaacgattacctggcgttgtctaagcacccagaagtgttggacgccatgcataaaaccatcgacaagtacggttgtggcgctggtggtacaagaaacattgctggtcacaacatccccactttgaacttggaggcggaattggctactttgcacaagaaggaaggtgcttcggccttctcgtcctgttacgtgtttcaacgacgccgacttgtccttatagggccaaaagatgaaggacctggtgattttttccgatga

SEQ ID NO: 3783 - DNA, 387 bp, Saccharomyces pastorianus
gatatagggctcagtgggttcaattgcgtaaccggttcctccagggaacaagcggccaccgccttattggctaaaggtatcaacttagttgtttcaggatcttttggtaatattttttcaagaaactccattaacaatgctcttctgaccttggaaatcccagcattaatcaaaaaattacgtgagaaatatcaaggtgctccaaaagaacttacaagaagaactggttggtttttgaaatgggatgtagctgatgctaaagtggtcgttaccgaaggttctttggacggccctgtgatcttggagcaaaaagtgggtgagctaggtaagaacctacaagaaattattgtaaaaggaggcttggaaggttgggtcaaatcccaacta

SEQ ID NO: 3784 - DNA, 396 bp, Saccharomyces pastorianus
atggattacattaagccagccagtaccgatgatgaacatttccgtactatgtggaatgcttttgaatgggaaaacaagatttcagtcaaatcacaactaccaacactgcatgcttatttgaaagaattgatcacgggaacaaacatgggtattttaacaccatcagagtctttaggagaagatgactgtagattcttaagttgtaacttgtatgcaaaatcatctttcggagaagatgccctggccaacttatgtattgaaaaggattccaagaccgatgaagtcataggttatgtgcgtatccgttcaaagggacaaggtctggctctgtcattaggtgatagagtggcattgattgctaaaaagactaataaactcaatattacccatgtttga

SEQ ID NO: 3785 - DNA, 2022 bp, Saccharomyces pastorianus
atgtcttcactttcttcacaaccagcgtacacgttggtttttgatccttctccgagtatggagacctattcaagcacagatttccagaaagctcttgaaaagggatctgacgaacaaaaaattgatactatgaagtcaattttagtggctatgttggacgggaacccaatgcctgaactgttgatgcatatcatcagatttgtcatgccttccaaaaacaaagaactaaagaagcttttgtatttctactgggaaattgttcccaaactagcagaagacgggaaattgagacatgaaatgattcttgtctgcaatgccattcagcatgatttgcaacatcctaatgagtatattagaggtaacactttaagatttttgaccaaattgagggaggccgagttgttagaacagatggttccttctgttttggcgtgtttggaatatcgccatgcatacgttcgtaaatacgccattttagcggttttttccatttacaaagtcagtgagcatttacttccggatgccaaagaaattatcaattcgttcatagtggctgaaactgacccaatatgtaaaagaaatgcattcattggactagctgaattagatcgcgaaaacgccttacactatttggaaaacaatatcgctgatatagagaatctagatcctttattgcaagctgttttcgttcagtttgttagacaagatgcgaacagaacccccgcattgaaagctcaatatatcgaactattaatggaactgctcaccaccacaacatctaacgaagtgatctttgagactgcgctagctttgactatcttgtctgctaatccgactgtattagttcctgctgttaataagctaattgacttagctgtcaaggtttctgacaataacattaagctaattgttctagaccgtatccaagacatcaacgccaagaatgcaggcgctttggaagatttgactttagatattctgagagtgttgaacgctgaagatttagacgttcgctcaaaggcgcttgatatctctatggatttggctacatccagaaacgctgaagatgtcgttcagctcttgaaaaaggaattgcaaacaaccgtaaataacccagatcaagacaaggcaatgcaatatagacaattattgattaagacaattcgtactgtggcagtaagctttgtagaaatggcagccggtgtagtatctctactattggatttcgtcggtgatctgaattcagttgccgccagcggtgttatcacttttgttaaagaagccatcgagaaatacccacaactaagatccaatatcctcgaaaatatggtccagtccctagacaacgtcaaatctgctaaggcataccgtggtgcattatggattatgggtgaatacgctgaagaagagcatgaagtacaacattgttggaagcacatccgtaatagcgttggtgaagttcctatccttcagtctgaagcccggaggttgacacaaaaccaagatgataccgaagaaaacgaagacgacgctgccgctaagccaacaggtccagttattctaccagatggtacgtatgccactgagaacgcctttgatgttaaaacttcccacaaatcggttaccgatgaagaacgcgactctagacctccaatccgtcgtttcattctaagtggtgatttttacactgccgctatcctagcgaatacgattatcaaattggttctaagatttgaaaaggtctctaaaaacaaaaccgtcaccaatgctttgaaggcggaagctttattgattttggttagtattgtgagagttggtcaaagttctttagtggagaagaaaatagacgaagattccttagaaagagtcatgacatctatctccattctattggatgaagctaatcctgatgaaaaggaaaccgaagttaagcttttggaagttgcattcttggacactactaaatcttcattcaagaagcaaattgaaattcaaacaagaacaagcataagagagctctag

SEQ ID NO: 3786 - DNA, 2442 bp, Saccharomyces pastorianus
atgcgtgaagtgatttgcatagaaacagttcatagaaaccaaaagatactgcacctaataccgaaaaaaacactaatgtttgatagtttcaatagcggtaaaaatagacgaaggtccttttttcgctttggctctgaaagtaaaaatagcgactctgaacaatctgtgaggaagctatcaacaccccctgcaactaggaagtcaacaagcaatacgccaccctccagggataaaaagattactcctgatgtaccgccaagaagcccacacaggaatgtccacgccagaagccgttctatacaagcaccattagaaaagggaccgttaaaaaatacgaatccgtttttgaatgctggtactaatacaagtgattcttttcaatctttaaaatttaaagaggtgccgatggatgattttaaagagaatcaaaagtcggcaacgaacaacaccactaagaagaacacaagtccctttacgactagcactaatttaaatgtaaatctttccagtcttaaacgtccaaggcctccgccaccacctgtagatatgaaatcaataacaagctcactaagtaatagcactatcaaggaagatactagcatggataatgattacgagcagaacattatttcaccgccatcccgtaatcaacataggcgacagcgatcagaagcagaaaaattagtcgacgacatcgaagattatataatcgagcataacggaaatccagatagtccaatatcggcaaatgcagccagtttgtcagacgtggaaacggcgcaggatgtgccagtaaattctttgtctattcccatcctgagggacgttagcatagaaagctctttgagttacgtgaaaccgctcgttgttggtggtggtgtagtgaatgggcgtagtgataccaaggacttaaaattagagcacccggtacaattatcttctaatgtagatgatggcaatgatagattttcgtttactacatcggttagtggtaagtccaccagaagtcttcaacaggttgttaaagatgaatctaatggatttaaatctgcgcattctgattttgtatataagtcaattgatcatctcaaaagtgatgaaaatatagggagcgctagaaggcctttgcggataactaatgaagcagatagcggttcttcagacgaggagcaaaatgattatcaagataaatattcatttggggaagagaaaagcaacacatcgacaagcactgaggatcaccaaggcctacgaataaaaaatgacgttccaacgcaagagcccgagctggcaactcaccgtagagtttttcgagtggtcaatgaagatcgtcccagtttttttttgaatagtgcggaggatacaggcagtttgattgatggacattccctcgatactgcaacatcttctggcgagtatggtatgccattaaacgttgctaacccatctgaaccctctatctcaaaaagcgctcaatcaaatgtattgtctactcttgactcaagtggggacacgaaatcctcaaataaaacatctgagttaaacagttcaacttcgatttcagaaagcctggtacttgctccacaatctttaaatgaagacacaatttccgctgaagaagccaccggctttccaagctcagcaccaactgtaccaaatgaaaaatctgtcaaaggttcgacgctaacttccgtcgtatcaaacaaatcggagaagtcggtgcctctggtctcgagttatgtggaagagttgcggttaaagtattacaggacatcgaacttcttacaagcccctcctaacttaccagtggccttaaaacaaaagaataatctaattcagcccagaaatatcaaggttaagctgagaacaagttccaaacaaatcggtataaagcacggtaaagttaaacagaaactattggcgctagagacaaggaacgaggactcgaatgagagatcgaacggttcagattcgaaaaataacatcaatgtcgaccatacaaaggagtttcataaattgttggagaaggaaaccggggtcgattctacctcaaagagcggaaacgctggtgaagatcaagcggaggattatctcaaggatataccaggtgatgaagcatataatagcgacgatatcatggcaccgttgagagaaaaaaagggccaaacagattcagctgattcggtaacaagatcgaatacggtagttagctactacacaaggtcccaaaatagaatgagaagcggaacgctcgacaatgactacgtgaataggcagaaacttcctactcatatttgtctgcaggattaccgcgactccaatgctaaaaatgatgtaacgcgacaagattctgtctccacaacggactcagaggtgattgaacccagttattccctgggtcgcggcttgcgtgtggcaaacccagattctgatgcagagtaa

SEQ ID NO: 3787 - DNA, 843 bp, Saccharomyces pastorianus
atgaatgagctttccaatttctttgctcagataaaatttggtcagtgtgaaggaaacgtgatagatcgtttccagtgcgaatataggcggactgattctcaaatatctcttgctctctacgaacttcccttgatcggagatggcttatttgatatgaagtcttttatcagcaagaccaaaccaattatagaaacttcgaaagatcagatggtgaaacacattgctgacatgaaagcctataatgagataactaacactgaaggtattctatcttcaccacaacagaaaccttcgtcgacgtcatcttcgaatgtgatcccctcccttaaaggtgatcagacaagtgccgcttcataccaatctcaaactcaaaagtacgctgctaaccaatcatcaagtgcattgcactcctctagtcgttattccgggcctaatagccagttgggcgcaagaggtaccgagggtcataaggcgggtttcatgacacaagatgaaatcaagcagcactgtattgctactataagggcatctatggattcagcgaaaaagaaatcctcgtatcaaattttaaaaacatatgtaaggtgcccaagacagaattatattgatgttgtctatcagagtttgaatgacttgcgatcaaaaacgaattgtaatattgtcgtactgaatctgaacaatcttcacgaatcgcagccgtggcttgattcgttgaatatatcagactattccgcattttcccagcagcctcacccaagcaccgtacgcattattagtattggtggtgtgggtgagtatataatcaaagcgctagagttgatattgaacatattagaaaattag

SEQ ID NO: 3788 - DNA, 555 bp, Saccharomyces pastorianus
atgatcatggaaccctccaagtcattagaagaacatatttttgataggctggatactttggccgatagagaactgaaaagtttcaaccccttagaccttacaaccgatataccctatgtcaattatgcggaggatttggaatttttaattacacaagattgtggtgggttcaaccttggttcatttctgataaaaaatagcgaatggtccaaactactcttagacatgtggtgggaccctgttttgtacgaacaaaaacatatggtatgggagcacagagaacaagatgcattggaagcgctgtacgagagcgaaccgtggattcgttcgagaatagggtttttgcccttaagaacaatcaatgcattcccaccgggggcatgttcggaatacagtggtgactcaagatacttttacactgaaaaggaacacgattttgtcgtgaatatggccggatgcaactttggtagagactgttggggggagatgcaatactataccaccttaatggaaaagctgaatagaaaatggtatacgaggttttttttcccatag

SEQ ID NO: 3789 - DNA, 609 bp, Saccharomyces pastorianus
atgtctagtgtaccttatgattccccacttcctataacaaatcatcaactagatttcgatgaagaggaaaagaaaagcagaggctcaaaattcggtttgagatacaaaataatgtactggaggggaagactagccgactctttagcgagaagcaaaagacaaatactattaatatctttgattttgtttctatttatatggataaacgattctactgtcagcaggaacccatctaccacaagcttccaagggcagagtagtaacgataacagtttgaacaaaggtggttccagttctgattccaaatggtatctgccaccgtattccaagagatcaagatggtcgttttggaaccaagatcccaagattgtcatcatattagcggcaaacgaaggcggtggtgttctgagatggaaaaatgaacaagagtgggccatcgagggcatatctatagaaaataagaaggcgtatgcgaaaaggcatgggtatgggtttacccaattccagggaattttacggaggttcaaggaagattcttccaaggaattattgaaaagggttgggcgaaagtggattttttggaaaacaaacactttaaaagaattcccc

SEQ ID NO: 3790 - DNA, 162 bp, Saccharomyces pastorianus
atgaaagctgatatgatggaatctcaattcagggacctagaattgcctaaccttaacgaagaaagctattgtgacgttgttcccctggatttcaaaacattctaccaaattgaaaaagatgtgatacacgtagtgaagaagaaggttttaaaaaccgagtaa

SEQ ID NO: 3791 - DNA, 372 bp, Saccharomyces pastorianus
atggggaaagtcaaaatcattgtgctggcaggaacagcgggcactgggaagtcaaccattgcagccgaactgatacatgagttcaaagatacgtatccggatttgaagttcattgagggtgacgatttgcaccccccagctaatgtggaaaagatgacgaagggaatcccgttgaatgacgacgaccgctgggactggttgaaaaaagtagctgtagaatccaccaaggctgcagcgagcaccaaagaaggtttatcgattgttgcgtgttccagcttgaaaaaaaagtacagagatttgataaggaacactttgttcccgactcagagttccattttatctttttgtatgcaagtaaaattgaggttttaa

SEQ ID NO: 3792 - DNA, 750 bp, Saccharomyces pastorianus
atgatatttcactctgcagataaggatatttatgctagactgatattgcaaagtattagtcgagccatatcagaaagagaaacaattattttcaaactaatacaaaaaataccgataaagtcaatagatagtatgcttatttcaatgggaccttcaagatttgcagagtctatgggcccttggaaatgttatgctgatgctaatttcgaacactcgccattgcacgattatgaaaagcaccagggacttacgggcaaaaaagtactaatacgagattttgatgactcgtttttaagtagcgatgtgggattcaatgggactgaagaacccgagatcagacagctcaggttagaaaaaaacatggttagattcaaaggctcaacgaaaggtataatagacgaaaaatataacaccttgaaagaattcaatgaacatgttcacaacattagtagggggaagaaagacgcattctcaaacgatgctgtgtatatttccaggtacacttcattagtacctgttgaaaaagtaggcttcactttaaagaaggagtttaacaatagagtaattacaataaaattcaaattccgtgggaacgatgtttttggcggattgcatgaactgtgtgataaaaatttaataaacgttgaaaacatccctgggtggctagctggtgaaaacggatccttttcaggaacaataatagacggaggatttgtgcaagagcaggttgataaaggtgggttgctatag

SEQ ID NO: 3793 - DNA, 345 bp, Saccharomyces pastorianus
atgttcaatgagtcgagtcttgaagatgattatgtgccgaactcggatacgtcaatagttttcaagcaattgatgaaactaccaataaccacattatacgatcttacgttgtcatggttcgccaagtttggcggatcattcgatggtgacataaacctattaactgagacgctagatctgctgattgaaaaaggcataaagcgcaaggtcatagtaaataggatattatacatgtattggcctgatggcctcaatattttccagttagctgagatagattgccatctaatgattagtaaacccgataaatttaagtggcttccgtcaaaagcttttcaagggtaa

SEQ ID NO: 3794 - DNA, 1542 bp, Saccharomyces pastorianus
atgtcaggacaagaggagaataaagtaaattcttctgacgtaagaaaggatagagttgtgacgaactctactggtaatcccatcaatgagccatttgtcacccagcgtgttggggagcacgggcctttgcttttacaagattataacctactcgattctttggcgcattttaacagggagaatattcctcaaagaaatcctcacgcccacggttctggggccttcggttattttgaagtgacagacgatattacagatgtttgtgggtctgccatgtttagcaagatcggtaagagaacgaagtgtctgacaagattctccactgtgggtggtgataaaggtagtgccgatactgttcgtgacccaagagggtttgcaactaaattctacacagaagaaggtaatttggattgggtctacaacaatacacctgtattttttatcagggatccttcgaaattcccccattttatccacacgcagaagagaaacccgcaaactaatctaagagacgctgatatgttttgggatttccttacgactccagagaatcaagtggccatccatcaagtcatgattctcttttcagaccgtggtactcctgcgagctatcgtaacatgcacggatattctggtcatacttataaatggtcaagtaaaaacggcgattggcgttatgtgcaagtccatattaaaaccaatcaaggggtcaagaatttgactatagacgaagccactaaaatcgcagggtccaacccagattactgccaaaaagacttgtttgaatctatccaaagcggtaactatccatcgtggactgtttatattcaaacaatgactgaacaggaggccaagaatttaccattttcggtctttgacttgaccaaggtatggcctcaaaagcaattcccattacgtcgtgtaggcaaacttgttctgaatgaaaatccactgaatttcttcgcacaagtggaacaagcagcgtttgcccctagtactactgtcccataccaagaagccagtgctgatccggtgctacaagctcgattattttcttatgcagatgctcacagatacagactgggccccaatttccatcaaatacccgtcaactgtccctatgcctccaagttttttaaccctgccatcagagatggcccaatgaacgtaaatggaaattttggttcagaacctacctatttagccaacgacaaatcatactcgtatattcagcaagaaagacctattcaacaacatcaagaagtatggaacggacccgctatcccttaccactgggcaacatctccaggtgatgtcgattatgttcaagctaggaatttgtaccgcgtcttagggaagcaacctggacaacaaaagaacctagctcacaacatcggtatccatgtagagggcgcctgccctggaatccagcaacgggtttacgatatgtttgcccgcgtagataagggactatctgatgcgatcaagaaagaagcagaggcaaaacacgctgctgaactttcaaataactctaagttttga

SEQ ID NO: 3795 - DNA, 171 bp, Saccharomyces pastorianus
atggctcagagagttttaaaaagcgaagtagagtcactgcgggcgtgtgagaactcggctggcaagaactacaagatcatacctgaccaaaaactgttagcaaacatcttgaagagcaaaccaacaacgagcgaagaaagtgctgccaagcgtccttgtattaggaaataa

SEQ ID NO: 3796 - DNA, 1239 bp, Saccharomyces pastorianus
atggataatttttctacaaatacggaatgctttgttaattggttggaaaagaacgccaaaattgaagtttccccaaagattaagatcaaggacctccgttctgatagtcaaggccgcggaatagttgccatccaaaaagtcaagaaggatgaagtgttgtttgaaattccacgaacttcggttttgaacataacaacatctaaactggtgagagattacccttggctcgaagagaagtttctgaatgaaatggagtcatgggaaggtttaattatatgtatactttatgaaatggaagttttgaaagaaaagagccaatgggcgccctacttcaacgtttggaacaggcctaaagatatgaatacgctgatcttttggaatgaaaaggaattggaattattacagccttctcttgtacttgagaggatggggagaaaagaggccaaagaaatgtatgaaggaattcttaaaatgattgaacaaattggcggaaaacttgctgatgtggctgtgcatttcgagttcgatgattttgcctacatcgcaagcatcattttaagctattcttttgacatggaaatgcacgataataatgcagatgaaagtgaagaagatagcgaggaagaacctgaaagtaatcgctatttgaaatctatgattccactcgctgatacactgaatgcggataccagtaaatttaatgccaatttaacatacgactcgggttcattgaagatggttgctgtaaaggatattgggatgaacgaacaagtatataatgtttatggagagcacccaaattctgagatattgaggagatatggttatgttgaatgggatggttccaagcatgattttggagaggttttactcaaagacatcgttgatgtattaaaagagacccttaatgcaagtccacaatttttggaaagctgcatagccattttacgtactaacaccactattcaagatttattggaaggcgaagatatagtattgaattcatacgaatgttattttgatggtgaatcggtccctcaatcaatagtttttgttcaaaccttgactattctctgccaaattccaggtttatctgaaatgaatgggaagatactagaaatacaagtagaaagagtgataaagaagtgtttgcaactgatagaagggagccgcgttacagaaaactaccataccacatggaagcgttgcattaccaagcgtctagaaaagtattcttga

SEQ ID NO: 3797 - DNA, 3024 bp, Saccharomyces pastorianus
atgagagaagtaatactggttgttcatggaatgacatgtagcgcctgtgtgaacacgcttaccacgcagctacgagctttagcgggggtgacaaaatgtgatattagtttagtgacgaatgagtgccaggtggcatacgataatggggtgactactgattctatcaaggaaacaatagaagattgtgggttcgactgcgagatactaaatgacaaggatactacaaccgcaactacaagacaaggtttactaagcatacaaggaatgacctgtggatcctgcgtttccacagttaccaaacaagtggaaggcataggaggtgtagagtctgtggtggtttcgttggtcacagaagaatgccatgtcatttacgatccatccaagacaacactagatagcatcagagaaacgatcgaggactgtggatttgattcaagtattataatagatgatgcgggagcgcccgatcagactgaaaaacccgtagttttgaaaatattggaggactcagatggcgaatctccacccgcgctttcatcatttagtgaaagattccagttcttactagacctaggtgtaatatcaatagatatttccgatgaattgcgcacgcttaccgttaaatacaactctaacaaactcggtatcagagacttattaactcacatagaaacaaccggctgtaaattcaccgtatattccaatttagatagctctacccagctaagactactatcgaaagaagaagaaataaaattctggaaaagaaactgcataagctcttcttcattggccgttacatgcttggtattatatatgatttttccgatggtggcgccatcagtagttcagaaacgcatcttcccatatagagaaatatcgttcataaaaggtcttttctacagagatatcattggtgtgatattggcaagctacattcagttcggcatcgggtcatatttttataaagctgcatgggcctcattcaaacacggctcaggaaccatggatacactggtttgcgtttccaccacttctgcgtacgctttttctattatctctctacttcacaacatatttcatccctcagacacggggaaattaccaaagattgttttcgatacatcagttatgataatttcttacatctctatcgggaaatacctcgaaaccttggctaaatcacaaacttctacagcactctctaaactaatccagctaacgccttctgtgtgttcaattttatcgggtacagaatttggcgagacaacagaaatccccatagaattattacaagtgcacgatatagtggagataaaaccgggaatgaaaatccctggcgatggtatcataataagaggtgaatctgaaatcgatgagtccttgatgactggtgaatctgtcctggtacccaagaaagagggctctttggtgatcgcaggttctatcaatggatctggccatttctattttaaagctacgacagttggagaagaaacaaaattagcgaatattatcaaggtcatgaaacaagcacaattgactaaagcccccattcaggggtatgcggattatttagcttccattttcgttcccggaattttaatcttagctgtactaacatttttcacctggtgtattattctagaagcctcagccaatccgccaacagttttcagctcgaatacaaaaggcgataattttttcatttgtctgcaaactgccacatcggttgtgatcgttgcgtgcccatgtgcactagggctagctacgccaactgcaataatggtgggtacaggggttggagctcagaatggtgtcctgattaaaggtggagaagtgttggaaaaattcaatggtatcagtacttttgtttttgataaaacaggaaccttaaccaccggctttatggttgtgaagaagtttctcaaagatttgaatgggattgaaaaactagatgaaagtgaagtgcttgcttgtatcaaagcgaccgaatccattagtgatcatccagtgtcaaaggcgatagttcgctattgtgatagtttgaatcgtagcaaagcctcaagtgccgttgttttagaaagcgaatatgtgttaggaaaggggattatatcaaagtgtcaggttaacggaaatatttacgacgttcttatcggcaatgaggcattgattccggatgaagtgttaaaggtgtccaggattaatcacaaggacatggatcaaggacatacagtttcgtatgtttccgtcaatgcgcatgtcattggtttatttgagataaatgatgaagtcaagcatgattcctacgaaacaatccagtatttacaaaggaacgggtacgagacatatatgataactggtgataacaactcggctgcaaagagagtggctagagaagtaggtataaacttccaaaatgtttacagcgatgtttcgcctacaggtaaatgtgatctcgttaaaaaaatacaagaggaagaaggtaaaaacaaagttgctgttgttggtgatgggattaacgacgcacccgctttggcattaagtgaccttggtattgcaatttcaactggtacagaaattgctattgaagcggctgatattgtcatactatgtgatagcgacccaaacactatcggcctgaaaggtctggtcaatgccattgatatttcgctaaagacattcaaaagaataaagttaaacttattttgggcactttgctataacgtattcatgattccgatagctatgggtgtgttagttccctggggagtaacacttccaccaatgcttgccggtttggccatggcatttagctcagttagtgtcgtactcagctctcttagattgaagaaatggtccccaccggatattaaatcttacgagacctcagattccaaatctaaattttccatcggaaacgtttggtcaaggcttttctctcgtcaggttgtccgaaatgggcaagatatagaatcacacgctggattaatgtcaaacgaagaaagctttgcaagtacttga

SEQ ID NO: 3798 - DNA, 342 bp, Saccharomyces pastorianus
atggatgttgctctaaacaaatctatcctggaaacggtaggtaaggaaaattggggcaaaacaaaagtttacccaggacacgaatacaccaaaagtaacgttaagtttgttcgtaagatttacccacaagttggtgaaaacaaagcgctggataaattagagcaattttgttctaagcacgaggtcactgcagggcatttcaccttgaaggacgaagtggatttcaacccctttatgaggttagatgacccgacggttcaaaaagccgtcggagatgcaagtgcttcgtgggacagaggtaaaattatggataagttgagagcaatgaagaatcgtatgtaa

SEQ ID NO: 3799 - DNA, 210 bp, Saccharomyces pastorianus
atgcaggtcaagtcgattaagatgagatgggaaactggtggtgtcaattactgctatttgttgtccaacaacaataacagtaaatattggttgattgacccagcagagcctccagaagtcctccccgagttgacggataatgaaaagaaaagcatccaagcggttgtaaacacgcatcaccattacgatcgacaagctgatccgcctaag

SEQ ID NO: 3800 - DNA, 342 bp, Saccharomyces pastorianus
atggctacaagatctaagaaagccaataaaagagaaaaatgggtatacgaggacgcagctagaaattcttcgaatatggtaatacatagtttatccaatgcaccaattattactgttgatgcattgagggatgaaaccttggaaattatctcaattacatccctggctcagaaggaagaatggctgaggaaagtatttgggtcaggtaataattcaacccctaggagctttgccacgagcatttataacaacctctccaaggaggcccataaaggaaataaatgggccattttgtattgccacaagactgggaaatcatctgttattgacttacagagatga

SEQ ID NO: 3801 - DNA, 4467 bp, Saccharomyces pastorianus
atgtcattgagccatctcactttagaccaatattatgagatacaatgcaatgagcttgaagccatgcgttccatttatatggatgattttagtgatttgactaaaaagagatctagctgggataagcaacctcaaatcatattcgaagtctcccttcgatctgttgacaaagaaccagtggaatcatctttgacattgcattttgctatgacaccaatgtatccttttaccgccccagaaatagaattcaagaatatagaaaatgtaatggatagtcacctagaggtgctaaggacggaattcaaaaaaattcataatacttcccggggtcaagagattatattcgagattacctccttcacacaggagaagttggacgagtttcaaaatgtagttaatacacactctttggaagatgatcgcctacaaaggataaaagaaactaaagaaaagttggaaaaggaagaaagggaaaagcaacgggagacgataaagagaagatctgacgaacagcgcaggatagatgaaattgttcaaagagaattggagaaaagacaagacgatgatgatgatgaattgctactcaataggtccacgcaattagacttacatcctccttcggaatgggttgcatcaggggaagccattgtcttttcaaaaactataaaagcaaaactacctaataactcaatgttcaaatttaaggcagttgtgaatcctaagcccataaaattaatttcagacctattcagcttttcgaagcaatttctcgtaaagccttatataccacccgaatctcccctggcagattttctaatgtcatctgaaatgatggaaaatttttattatttactatccgaaatcgagttggataatagttattttaatacaagcaatggaaaaaaagaaatagcgaacttggagaaggaattggagactgtgctaagagtcaagcacgataatgtaaatcgattgtatggttacacagttgagcgtaaggggagaaacaatgccacatttgtttggaaaatcaggattttgactgagtactctaactactatcctgtaggagatttgatacaatccgtcggatttgttaacttagcgacagcacgtatttggatgatcaggctactagaaggattggaagctatacacaaattaggtattgttcatagatgtatcaacttagatacagtaattttggtcaaggatgcagatttcggaagtactattcctaagctagttcattctacttatggttatgtcattttaaatatgctatcgagatatccaaacaaacacggttcttcgattgagttacctccagacacatggatagcccctgagttggtgaaatttaaaaattctaagcctcaaagactgactgatatctggcaacttggtgttttatttattcaaataataagtggttctgatacagttataaactttacaacaccccaagaatttctggactcaaccagtatgaatgagagtttgtatgaccttctttcaaaaatgcttcatgttgatcccaagaaaagattaggaacattagaattattgcctatgaagttcttgaggaccaatattgactctactataaatcggttcaacttagtttccgaaggcaccaattgcaattcattggatcaagtttctggagacaccgttaactgtgggggtggaagccgaagaactatttcacaaactagtatacgaagaagatcttttaacgttggctctagattttcttctataaatcctgcgacacgatctcgatatgcttctgattttgaagaaattgcagttttgggccagggcgcattcggtcaagtggttaaagcacgtaacgctcttgacagcaggtattatgcaatcaaaaagatcagacatacagaagaaaaactgtctactattttaagcgaagtgatgttattagcgagcttgaatcatcagtatgttgttcgctattatgctgcatggctagaagaagacaatgttgatgagaacgtttttgagtcgactgaagaagaaagcgatgtaagcgaatcctgctctgattttgaagaaaacgatttattggaccaaagcagtatttttaaaagtaggacaaatcatgatttggataacagtaactgggatttcatatctggctcaggatatcctgacatcgtttttgaaaacagttctcgtgaaaatgaaaaagaaggtgtgagccacgatccttcttcttcttcctcttcttcttcaagcgaaagtgatgaagatactagtaaagaatcaatgagcagcctgaaaccattgaaaaggaagaatcgcatgatgcctatgacggctgtaaaaatgaaaagcacccttttcatccaaatggagtactgtgaaaatagaacattatatgatttgatccattctgaaaatctgagtcaacagcgtgatgaatattggaggttatttcgacaaatattggaggctttgagctatatacattcccaaggtattatccatagagatttaaagccaatgaatatttttatcgatgaatcgagaaacgtaaaaatcggtgattttgggttagctaagaatgtgcatagatctctagatattctcaagttagattcacaaaatctgccaggtagttcagacaacttgacctctgcgattggtacagctatgtatgtcgctactgaagttttggatggtaaaggccattataatgaaaagattgatatgtactcacttggaatcatattttttgaaatgatttattcattcagtaccggtatggagagagttaatattttgaagaagttacggtcagtgtcgatagagtttcctcctgattttgacgataacaagatgaaagttgagaagaagataataaggctattggtggatcatgaccctaataaaaggccaggcgccaggatgctcttaaatagtggttggcttccagtaaagcaccaagatgaagtgatcaaagaagcgttaaagagtttgtcgaatccatcgtccccttggcaacaacaggtgagagaaagcttgtttgaccagtcttacagcttaacaaatgatatactgtttgatatttccatcccaacatctactccgtttgcaaacatcctcagatctcaaatgactgaagaggtagttaaaatttttaggaaacacggaggtattgagaacaatgcccctccgaggatttttccaaaggctcctatatatggtacgcaaaacgtgtatgaagtccttgataaaggcggtactgttttacaactgcaatatgatttaacttatccgatggctcggtatttgtctaagaacccaagtttaatttctaagcagtatagaatgcaacacgtttacagacctcctgatcactcgaggtcaagcttggaacctagaaagtttggcgagattgattttgatataatatcaaaatcttcttcggagtcaggcttttatgatgcagaaagtctgaaaattatagacgaaattttaaccgtatttcctgtatttgaaaaaacaaatacattttttatattaaaccacgctgatattttagaaagtgtttttaattttacaaatatcgataaagctcaaagacctctggtctcacgtatgctttcacaagtcggatttgcaagatcgttcaaggaagtgaagaatgaattaaaggcacaattaaatatatcttctacagcattaaatgatttggagctgtttgatttcagattggattttgaagcagctaagaagcgtctttataaattaatgatcgatagttcccatctcaaaaaaattgaggattctttgtcgcacatggcgaaagtgcttggttttctgaagccccttgaggttactagaaatgttgtcatatcgccattgagtaactataacagcgctttctacaaaggaggtatcatgtttcatgcagtgtatgacgacgggtcatcgcgtaacatgatagctgccggaggaaggtatgatactctgatatcattttttgccaggccatcaggtagaaagagtagcaatacacaaagagccgtaggatttaacctggcttgggagacgatttttggtatagctcagaactattttaaactggcctctggaaatagaattaaaaagagaaatagatttctgaaagataccgctgttgattggaagccgagcagatgtgatgttttgatatcaagtttttcgaactctttactggacactatcggaattacaatattaaacacactatggaagaaaaatatcaaagcagatatgctaagagattgttcatcggtggacgatgtcgttagcggtgcccagcaagatggtatagattggatcttgctaattaagcagcaagcatatccactaaccaaccagaaaagaaaatacaagccactaaagataaaaaaactgagtacaaacgttgacatagatttagatcttgacgaattttaa

SEQ ID NO: 3802 - DNA, 2463 bp, Saccharomyces pastorianus
atgcaacaccatattattcctttgaacagtagtgacgattaccacaacgatgcatctgccactgcagcaacgagtaataattttctatcgtcatcttcgtcatccgactcgccaaacaaagatgactcgtccattagaagaaatacgtcatcaaacatcaataacgacaacgatcctttatcgtctcccactaaaacaggtgtgaagagaagaagttcattaaagcaacgtccaacccaaaagaaaaatgatgatgttgaggttgaaggtcaatcgttattgttagttgaggaggaggaaataaatgacaaatacaaaccactgtatgcaggtcacgttgttgctgttttggatcgtatccctggtcaattattcagtggtacgttgggtctattgagaccatcccagcaagctaacagtgacaataataaaccacctcagagcccaaaaatagcctggtttaaacctactgataagaaggttccgttaatcgcaattccaacagagttggcaccaaaggactttgttgaaaatgcagataaatactccgagaagctatttgttgcctctatcaaacgttggccaatcacatctttgcatccgtttggtattttagtttctgaactcggagacattcacgatccaaacaccgaaattgattctattctaagggataacaatttcctttcaaatgaatatctggatcagaaaaatccacaaaaggagaaatcgagctttcaaccactgccattaacagcggagaacttggaaaagagaagaaattttacagacgataatgaatacaacattctcgcaatttcagagcttggatggatctcgggatttgctttacatgttagaaacaacgatgatggcacggttgagctaggttgtcatgtcgttgacgtaacaagccatattgaagagggttcttctgttgacagacgtgctagaaaaagatcatccgcagtatttatgccacagaagctcgttaatttactaccacagtccttcaacgacgcactctcactggcaccgggtaaagaatctcccaccatatcagttgtatatactctagattcttctactctaagagttcaatctacttgggtaggagaatcggtcatctctccatcgaatattttatcattggaacaattggatgaaaaattgttaagcggaaaccctgggacctacctctctctggtacaagaaattgcaagatcattctatgctgtaagaataaatgaccctgaagccaaattgcttcctacactatctttactggagagtttagatgacgaaaaagttaaagtcgacttaaacatcttggatagaacttcaggctttattgtaataaacgaaattaaaagaaaagttaattcgaccgtagcagagaagatttataccaagcttggtgacttagctcttttgagaagacaaatgcaacctattgcaaccaaaatggcgtcattcaggaagaaaatccaaaacttcggttacgatgttgacatcagttcggcagatgaactcattaaagcagtgttaaagattgaagatgatgacgtaagagtcggaattgaaattttactgttcaagactatgccaagagccagatatttcattgccggcaaggtcgatccagatcagtacggtcattatgctctgaacttacctatctatgctcatttcacagatccaatgagaagatatgctgatcatgtcgttcacagacaattaaaatctgttattcacgatgttccatatactgaagatatagaagcactaaagattacttctgagtactgtaatttcaaaaaagattgcgcctatcaggcccaagaacaagcaattcacttactcctatgtaaaacgatcaatgatatgggtaatactactggccagttgttgactgtggccactgtgttgcaagtttacgagtcttcgtttgacgtctttattccagaatttggtattgaaaaaagagttcacggtgatcaactgcctttgatcaaggccgaatttgacggcaccaatcgtgttttagaattacattggcaacctggtgtagatagcgcaactttcatcccagcggacgaaaagaatccaaaatcctacaggaactctatcaaaaacaaattcagttccacggccgcagaaatcgctaatattgaactcgataaagaagctgagtcagaaccactgatcagtgacccattaagtaaagaacttagcgacttgcatttaacggtaccaagtctaaggttaccatccgcggacaacaacgaacaaaatgccttggacaagttcattgctactacagaaactaggatcgaaaatgataactatattcaagaaatacatgaattacaaaagattcctattttgttgagagctgaagtgggaatggctttgccatgcttaaccgttcgtgcactaaatccgtttatgagaagagaataa

SEQ ID NO: 3803 - DNA, 1275 bp, Saccharomyces pastorianus
atgtctaaaaatagtaacatgaataacaatagatcgcaagatccaaacaacatgtttgtacaaaccacaggaggtgggaaaaatgctccgaagcaaatccatgttgcacatagacgttctcaaagtgaactgacgaatctaatgattgagcaattcactttgcaaaagcaactggaacaagtccaagcacaacagcaacaactgctggcccaacatcaacaattggcccaacagacaggacaatatctttcgggaaattcaggcccaggtaatcattttgctcctcaacctcctcacccacattacaactcaaatggtaattcacccaatatgagtgctggtggcaatagaagtagagcccattcgagaaacaattctggatattatcaaaactcctacgataacaataacaacaataacaacaacaataataactctggtcctaattcgcacagaaagactagttcacaatctagcatttacggtcattcgagaaggcattctttaggtctgaatgaggctaagaaggccgctgctgaagaacaggccaaaagaatatctgggggtgaagcaggtgtaactgtgaaaatagatcctgttcaatcagatactggttcaaataccactacagaacagtccgaattcaagttcccgccaccaccaacctcacaacagggccaccgccgtgcaacttcaaatctatcaccaccttctttcaagtttccgccaaactcccaaggtgacaatgacgacgaattcatagccacttcttccacacatcgtcgcacaaagacaagaaacaatgaatattcgccaggtatcaattctaactggaggactcaatcacagcaatcgcaacagcaactgtctccattccgtcacagaggttccaactccagggattataattcattaaacactctagagccccctgcgatctttcaacagggtcataagcaccgtgcttctaattcatctgttcatagtttcagctctcaaggcaatagcaacggaggcgggcgtaaatccctatttgcaccctatcttcctcaagcaaatattccggaactgatccaagaaggaagactagtagctggtattttaagagttaacaagaaaaacaggtcagatgcttgggtctctacagatggggctcttgatgccgacatttatatctgcggctccaaagatcgtaatagagctctcgaaggtgatttggttgccgtagagttattagtcgtcgatgacgtttgggaatctaaaaaggaaaagaag

SEQ ID NO: 3804 - DNA, 1758 bp, Saccharomyces pastorianus
atgaatacaacattatcaagcagcgattggtatagcacctcagtacgtttactagtggaagaatacgatgtcaagcagtttttgatcctaaccatcagtgaattaagaacaagtatacagaactacctctcaaatactccatggcagaacattttgaaagattatttgtacttcaccttctgctacaaactactaagcaagtttctctacctactaaaggtttatggaccattaacattagcgaaaagaacatatgaacgtacttccagatcaatattccgttggttgctggactcgccatttttgaagggaacggtggataaagaagtttcgaaaatcaagagatcaattgaagatgaacttatcagatccgactcacaacttatgaacttcccacaattaccatctgacgggatacctcaggatgaagttgttgaagaactaaacaaattgaatgacttgataccacacacccagtggaaggaaggtaaggtctctggtgctgtttaccatggtggtgatgatttgatccatttgcaaacgatcgcatacaaaaaatactgcgtcgccaatcagctacatccggatgtctttccagctgttcgtaaaatggagtccgaagtggtttcaatggttttgaaaatgtttaatgctcctgctgatacgggttgcggtacaacaacgtctggtggtacggagtccttacttttagcatgcttaagtgctaagatgcacgctttgcatcaccgtggtattactgagccggagattattgctcccataactgcgcatgctgggtttgacaaggctgcgtactactttagcatgaagctacgtcatgtcgatttagaccccacgacttatcaagtggacttgaaaaaagtaaaaaaattcatcaataagaacaccgttttactggtcggttcggccccaaactttcctcacggtattgctgatgatattgaaggcctagggaaaatagcgcaaaagcataagctacctttacacgtcgacagttgtttaggttcctttattgtttcattcatggaaaaggcaggttacaaaaatgtaccaagactcgatttcagagtcccaggtgttacatcaatatcatgtgacactcacaagtacgggtttgcaccaaagggttcatcagtcataatgtatagaaacagcgatttgagaatgcatcaatactacatcaatcctacgtggacaggtgggttatatggctctcctacattagcagggtctagaccaggcgccattgttgtaggctgttgggccactatggtcaacatgggggaaaatggttacatcgaatcgtgccaagaaatagtaggtgctgccatgaagtttaaaagatttatcttgaaaaacattccggaattggagatcatgggtgaccccaaatactcagtggtttcgttttcatctaagagcctgaacatacacgaactatccgataggctggccaagaaaggctggcacttcaatgccctacaaaaacccgtcgccctacatatggccttcacgagactaagtgtgcacgtggtagatgagatctgcgaagttctacgcactaccgtgcaggaactaaagagcgagtctgactccaaaccatcgccggatggaaccagtgctctgtacggtgtcgccgggagcgtcaagactgccggcgttgcagacaaactcattgttggattcttggacgcattatataagttgggccctgcagagaacgccgacgccaaataa

SEQ ID NO: 3805 - DNA, 462 bp, Saccharomyces pastorianus
atgactgaatcccaagattatttcaagaccctgcaattaatccatcgatttattaagtggcaatacaaggctgactcggtcaacattgccattcaggatggacccgaagctggtcagtccgtcccccatctacacacgcatgtcatcccacggtacaaaatgaacaatgttggtgacttgatatacgacaagctagatcgttgggatggcagtagcactttggccaattggcaggcaagaagagacgaatatttgggagtcggcgggagacaagcaaggaaagacaaggccacgcacaccagtggagatgagagtgaatctccgcaaggacccaaggtgttgaagccagacagccaacgggaagagagaacccttgatgaaatgaaaaaagaagtgcagggccttcaaagcgccctggaaggattcgtggctgcacgtcctgacctgagccaatggcaatag

SEQ ID NO: 3806 - DNA, 2088 bp, Saccharomyces pastorianus
atgtcgaaacaaaagaagcgtaattcccaaaacatggtagacccgaggttacagggtccattcaggaagtacctcccctataacatctttgaagagtgccacattggtcatctaactacacttgattatattttcgcgtttttagttgtcgttgccaatttcacattcgtatggaaatcacatccttcatcattttgggcccgtccatgggataatgatactgaacaggaactatttggttacattcggttttatctggacaaggccttctacattcacgaactaccaccgttcaccgtccagctatactccactattgagaggctagatatcatacaaaatctaagatgcgtttctttattttttaattcgtccactttggcttttcttttcctggtgttgaggagaattgattgctcttttattatttccacagtgggtttactgacactgtccaattgggggacttttaggaaagagggtaccattctttcatctgataatttggaatggtgtcttttttcaataatattatacacttctatcactatgtcaagaatgaagctgggcactgctaaatggttcgcacatttgattacgttatccatttctttaggattagcaatttcttctaaattcattggatttctcacatgggggttcattattctttctttggtgcgtcaattcgataaattgataagtgacgttgatatcacggcttttcaaattgttagattcattgtttttaacctattatttatttttattgtccctacttccatctttacgctaagttactggaacttactctcaaactttaacgtcgatgttcctgaatattcaaaatatatgaccacttccttcaaatcgtatctgagaggttcccaattgcagccaactcgattatattatggctcaaccattactttgcgccacttggattcaatggcggggtatcttacctctcatgaaattccctacccatctgatatacaggaaaatctagtctcattattgtttgaggaatttaatgccgataatgaatgggtagttgaacatccgacgttgaaattaaatttttctgaaatacatcgtattggtcaattgatacctttagagtttgatcatgatataaaactaagacacaaatctactgggaagctgttaagagcaagtaccgctaaaccgccgatcagcgagcaggattacgatcttcgaatctcatgcacgaaggactccgagtatgaaggaggaatggatgaaagatggaatgttctgttggtaaaagacagtactaatgataataacaacagtagcagtgatgataagtatgtcaagccacttcgatcagaggtccagttgcgcaataagggtcagagatgtgggctattgagccatgatctgagattacctgaatggggttactttgagcaagaggttctatgtatggaaaatccagttatgtccagaacctcttttctaatagattcagtaagactggcagttgatttcccaattccgacgatgaaatattatatgaacgagattaattcctcaacagaagacagccgcactttgtccttgacacaatttgttggcctgctcaaagagtacatcttcaaacagtacaagtacaattattacgttagatacggtaaaagcaaggcaaatttcgaagattctttggttgtggagaaatggccgatcacgttggacgctggatctccagtctggtttaagctcgcttggtatggttctatactagcgatgatcgttttcttgtgcgtgcaatgtaacagaattgtacattggaatccatggtcaactactgaaacagtcttttccatcaactgggatatctacaatgagtttggctgggagtgtactgttggatggtttttacattattatgtcttcactatgagtccacatttcaatttggaaagcaaattgtactttcaaagttttattttcagcgagttatgtcttctggaatcattgaatgttttggcaaagagtcataagaccatcttttccattatgatattattgcttattacatcaatagttctcatgtataaatag

SEQ ID NO: 3807 - DNA, 423 bp, Saccharomyces pastorianus
atgctcggtacccggggatcctctagagtcatgtctagatcaaatgacggagcattctgtgccactttaaattacatagataaaaatcatagttttgaaccgttggctgcaaatgaacctcaaatgtccgacaagcatgccacagtagcacctcccgaagagttcagcaataccatcgatgagctatccacagatataatcctgaaaacaaggcaaataaataaacttatcgattcgctgcctggtgtagacgtttcagctgaagagcaattgaagaagattaacatgctacagaaaaagttagttgaggtggaagatgaaaaaattgaggcaatcaagaagaaagaaacactcctacgtaacgttgattctttgattgaagactttgtagacggaattgcaaactcaaagaaaagtacataa

SEQ ID NO: 3808 - DNA, 903 bp, Saccharomyces pastorianus
atgccagccgtcaaggtcatcgaaaacgatgcctcttctaagaacgtagtcacgatgagaattgtcggacgcggtggagcaaacgtattgattgaatttggccatccaaattggttgtggcggtgctgtgttcgttggccacatctattatcagcaaataatgcctacactatcgataacatccattatatcaagaacaatgtagaacctcttttacatggtttgctttgtcctatggaactaattgatgtgagtacggatattttaaggcccattttagatacctttatttcagaattagatgatgaggtagtaaaagttattaagattaaaaatttggctagcaaggttgccactaatttaattcaaaatgatcaccttttgaaatcttattgctcacaaaattttcaaacaatccttctggaactaaaacccaaatggatatactacgatacaaattattgtaggaactgcacacataacgcattaaaaggtagaaaaaccgaatactgctacaaccaactgctaatgaactcactgcatttggaaacgatgctgatagattacgaaagataccccgttgagttcaaagtcacgatactcgagtacttgcgcaatgcaagtaacgttttcagagtcctttatgaattgcaaaagaaactttcagaaaatgcaattccgattaagaatttacggtcaattcgcgatataaaagacgagctcttactactcatgacactcagagatgtgacatgtttcattgagtggaataatgccggaaatacgttaagtgtacacatagtagatgtagatctaaaaccgaaaaaaaaatggactcattggacccaaactcaacgccgaatagaatccggtaaaaaagtacttcatacttcgaataaatag

SEQ ID NO: 3809 - DNA, 1248 bp, Saccharomyces pastorianus
atggttgttatcaaaaacacttttacagacaatattttgttatttggatcatctggtttggcaggagaaggtattttagagaatctgttggacattaacttttacattaagaatgtgtctgatttacaagataagcttgatagtttaacagaaataaaagaaaatgttgtgctagataaacatattttttgtattaatagaaaaagcgtcactgagaaaaaatcatttataaagaccatcgattatgtgaacatgaaatcaattatttggaaaggtggaagatactatttgagaactagaagagaggacgaaaaaaaaagagaaacgtgtaactctaatacattttgttacgatgatttcgaagagggaatctttagaaattccagggacaaagaagaaaagggcacattttcctttgcctataatcggaaacagtttggttatgctttacattatgcttgtggaaaagatgaaagttttaaaatcaagtacagttttaccgtaacgcaattggttattcctcaatctgaaagttggccaagactacttccacaaattttctcaggaacgcagatgttggaaaggttcgatttttacaacaaatattatgtatccgacagaagcttaccttccttggatgatatcggcaccatggtgagtgctttgggctctactacagctagagtgcggaaaagccaggtgccaagttcctttgtggattaccatttgtctttcaatttagcacaagagtttgtaaatacgacagataagaaactggtcgttataacttccttcaataatgattttcttagcagaacattggaatattttcgaattaaagcgaaattggagaacgatttagaagaggctttgccaaataaactaaaggagcttataattttgcggccaggtccaatgtgtgggcaacatgggaatcctgtacacgttcaaatggatatacaagagtgtccaactttttcagaaaggcttttctattatcctcgctatattctgaagtataagcagcaatgcatttctgaagcaagaaaagttggtttacgaacaaggctaagcgaagtaattgcttcgggtatttatagaatgccaggatctgcattattaggatattccgttccagtctcaaaagtttcgtatgttacagctttgatggcaattgggaaaaaaagcaaggaagcagggcctaaggtggaagttattaatagttatcagattgatatgattgcttaa

SEQ ID NO: 3810 - DNA, 921 bp, Saccharomyces pastorianus
atggacgacaaggatgattcgatggcgcaaacgcggtcaccttctcccgagtttaaattaaagtctacgccagcaacgtcaataccgtatgaaccaaagaaaagggctaaattggagaatgacgaaaatttacctgaacacgaatgggtgctgaagacgcagccaatggtccagcataggatgtttgattcagatgtagccgatttgttagataccgaaattttaacgtcaccttctaagaggaagcgaaaactaaatctagaggagatcactgcaggcgataagagtatgctggaggattcgattatccttgaaaatatttatagaatgtttggcataacattcttccccctcgtggatcctattgatttgaaaatgaaagaaggtagtgatgagattgttgttgatagagaaatgttggggatacggctagaggtcttcagtgaacggacttcaaaatttgaaaaacctcattacattcttttaaaaaaaagggtaaagtccaatagttggtttctattcaagcacactattccaagctttattgacgttcaaggaatattcaacgataccaatggaggacttgtaatatcctctgatgacgcatacttgtttgcaaagagggttttcgtgcaattaatagaaattcaaagaaggcaacaaagcttcaaggacttagaggccaaggaaattatccataatttggatttagatttacaatcttcgatggtttcattttttgttaaagacgtcaaagtagagttgttcctaaagcaaaatgaaatagtttcgtgttcaatactggacgaaattcatgatttcaaccataaaaataagaacaagtgggagcttttactattgggtccgttggatgacttggagttgaagttaaaccattcatttgcgacgatcttcaaatga

SEQ ID NO: 3811 - DNA, 1233 bp, Saccharomyces pastorianus
atgatgatagcctttagtggaagatatggctttggatatagtgaagctcaagacctctgctgccactgcactttcggagacggtaccatgaggaacgacttagtcgaaataacaaccatttgcccagatgtcgagaactctcagttccttgtgcaaagcagctgtccagacaccattccggagatactaaagtgtcaaagtgccactgaaaactgcagcagcatcatttaccagcagcgtagtctgcctagaatcaaaatcctgggtactggtgggacgattgcgtctaaggctgtagactcgtctcacactgctggctatcatgtggacttgactatccaagaccttctggatgctattccagacatatctaaaatttgtgaaatcgaatacgaacagctgtgcaatgtcgactcgaaaaacatagatcaagacgttctttacaagatctataaaggtgtctcggaatcactacaaacttttgacggtatagtcatcactcatgggacagatacgctatccgaaaccgcattttttattgagagcaccattgatgctggcgatgtccccattgtgttcgttggttcgatgcgtccttcgactagtgtttctgctgatgggcccatgaacctttaccaagcgatttgcattgcttccaacccaaaatcaaggggaagaagtgttcttgtttcgctgaatgatcaaatctcttctggttactacattaccaagacaaacgcaaacagtttggatactttcaatgtaagacaggggtatttggggaatttcgtcaacaatgaaatccactattattatccgcctgtgaagccccaaggttgccataaatttaaattgaggttaaatggtgaagacttcaaattaccagaagtttgcatcttgtatgctcaccaggcttttccctcgtctatagtcaagctggtagcagataaatatgatggtattgttctcgccaccatgggtgctggttcattgcccgacgaagttaatcaggcatgcatggagttgactttacccatcatatattccaagagatcgatggatggtatggttcctgttgctaatttgccaagaaacgattcaaagggccataatatcattgcatctggttatctgagccctgaaaaaagcagaattttgttgcaactgtgtttggtaggtaattatactcctgaagaaatcaaacatgttttcacgggcgtctatggtggttga

SEQ ID NO: 3812 - DNA, 1287 bp, Saccharomyces pastorianus
atgcgcatactggtttatataatggttccactttttaagtctatttactgtcgttgtcgcttgaaaattgtctgggctcaaacggaacggaaagacccaactaaacaagacaatcataattcaataatgagatatagctacacgattagtcaaagattagacatagtaacgaaggtcacgtccaaaaccatgttgcgaagatccattcataccacaaggattctcaaaaactccaatgctgctccacacatttggtcagacttctccaagagacctagctcactttccattcaatctcctaaagtgaaaaattatcttttccaagagaagccttatcttgaccctccatctatcaaaagaagaagcaatcgtatcaagtattcatctccagaacacatggatgaaatctttaagatgagttatgatttccttgaacaaagagctagtaagttttacgacttggtaaataagacaaagaatccctcgaagcgggacacacttctcacaaaagcggagattaataatcctgaagtgcagtacaacttccagtttaatgataaactggacaacatcaaatcaataattgattacgatgtaccagtatacaggcatctggggaaacaacattgggaatcgtacggtcagatgttattgatgcaaagattagaaactctagcagccattcccgatacgctgcccactctggtgccccgagcagaagtgaatatcaaatttcctttttcaactggtgttaataaatggatcgaacctggtgaatttttgtcctccaatgtcacatctatgtgtcctgtcttgaaggttcaagaatacgaccacgtggatgttgaaagacaactgtatacgatactggttgtcaatcctgatgtccccgatttaaacaacgattcgttcaagacggccctgtgctacggattggcaaatatcaagttgagttacaacgataatttgatagacccaagaaagtttaacagttctaatattcttgctgactatttgcctccagtgcctgaaaaaaatgctggaaaacaaagatttgtcgcttgggtattccgacaacctttgtctgaagacggccagaattctctcgaggttagccaagaggatattaatagagacgagtttgatattagacagtttaccaagaaatataatttggaccccatcggtgcacatatatggagaagtgaatgggatgtcaacgtcgccgttgttagagaaaaatatggcctccctcctggaagagttttcagcagggtcagaaggtga

SEQ ID NO: 3813 - DNA, 1584 bp, Saccharomyces pastorianus
atggtttccaatgggacgtcgtcagatacgcccagcaatttatctattatggaccttgaaaatgtttcatgtccgatttgccttaagaagttcgacaatttgcaagcgctaaataaacatttagatgttgagcatgagtttaatagtaatgagggttcgcttggatccaatgagagtagtacggtcaatggtaaagcaacgaaggtgaactctagtgcggataaagtgcaaaagttgaaaagaagccactgggagaaattgcaaaaagggataagccactgccaagcatgtggaagaactttgaataacgaaattggcgccattaattgtaaaaagtgcggcaaattgcattgtagaaggcatcttcccaatatgattaaactagacttgtcagcacggtatgaacccgagaaagggaaatggtataactgttgtcatgattgtttcgtgaataaacctggttataatgattacggtaaagcaatagacctcacacagaaatttttcaagctacgaaatatgaagaaggaagataagaacttgagattactacaacttgaaaaccggtttgtccggctggttaacgggttggtcacactctataagaagtataatggatctattatctataacctgaagatgaacaatgagatgtccaagctagaacgtacagttactccctggagagatgataggagtgtactatactgcaatatatgctccgaaccgttcggattattactacgaaagcaccattgccgattatgtggcatgattgtttgtgataatacgtatagaaattgctcaaaccaaatagatataggatacttggtatccgcagcatctgacttaccatttgactacgatacagagagggatagcttgtctgaaattcctgtgtctgtaagattatgctcgcattgtattagtatgttatttgtgggtagaaaattcagcaaggacgtagaaatgcccctaagtggaatatttgccaaatatgaaagcatgcaaaacatatctaaagttattgacagcctcttgcccacttttgaagattcgttaaacaatcttaaattagaaacgtttagagattctaaaagagtacctgacccaaagaatctgaacgagctcgctcgattaagacacaagctgctcaactcatttaatttgtataatacattaacaagacaactcatatgcatagaacctcgaaaccacgtggaaagacagctccaaaattcaatcaagactgcttcagctgcatatataaatgaaaaaattctacccttgaaatcgcttccagcgatcttaaatccagagggaccgaaaacccaaaaagatgaaccagaggtgaagaagttatcgcaattaatgatcgaaaacatgaccatcaaagaagtgaaggaattaagacaagaactgatggtccttaaggagcaaagctacctaattgaatccacgatccaggactacaagaagcagcgcagactggaagaaattgtcaccctcaacaagaacttggaagagctgcactcgaggatacatacggttcaatccaagctaggggataatggttttagttga

SEQ ID NO: 3814 - DNA, 270 bp, Saccharomyces pastorianus
atgaacgatgaagaagatgatgaggatgacgatatcgatatggaaatcaatgaaaacctaaacgtattattaagtcaaggaaataaaataaagaccacagatgcacaccggaatgaagaaagtacaaacgactatttctttaccgataaatacagacctttattatttgttgacttaatatccagtgatgaattagccatcattgaaataaatccattaagttctcattccaagcaaaaggcatttgttcaaccaaagttggtcttctaa

SEQ ID NO: 3815 - DNA, 1911 bp, Saccharomyces pastorianus
atgaccagtcagcaacagatgatagtgcacagatgcaggtttgtggattttacacctgccacaatcacttctctaacattttcacataaatcaaacataaataaattgactccatcggatttgagacttgccattggtaggtctaacggtaacatagaaatctggaatccaagaaacaactggttccaggaaatggttattgaaggtggcaaagacagatcaattgaaggcttatgctggagcaatgtcagtggtgagccattaagactcttttccattggtggttctactgtcgttacagaatgggacttggctacgggtttaccattaagaaattatgactgtaatgcaggcgtgatctggtctattgccataaatgaatcccaagataagctgtcagtgggctgcgataatgggactgtggtacttatagatatatctggggggccgggtgtcttggaacacgatactatcctaatgagacaagaagccagagtattgactttagcttggaagaaggatgacttcgttattggaggttgttctgatggtagaataaggatttggtcagctcaaaaaggtgaagaaaacatgggtcgtctattgcataccatgaaagtcgacaaagccaaaagagaatccactttagtttggtccgttatctatttgtcaaagactgatcaaattgcttctggtgattctaccggctccataaagttctgggatttccaatttgctacattgaaccagtcttttaaagcacatgatgcagacgtcttatgcctaactactgatattgataacaattacgtgtttagtgctggtgtggatagaaagatcttccaattttctcaaaatagcaacaaatctcaaaagaacaacagatgggtgaactcttccaacagattacttcacggtaatgatattagaaccatatgtgcataccaatctaaaggtgccgattttctggtctcaggaggtgttgaaaaaacgttagttatcaactcagtgacctctttctctaatgggaattataggaaaatgccgaccgtcgaaccttattccaagaatgttttaatcaacaagcaacaacgtttaattgtctcgtggaacgaatcgactgttaagatatggacaatgggagttgaatctaattcagagcagaattataaactagtgtgcaaactaaccctaaaggacgaacaaaatatctcaacttgtgctctatcgccagacgggcaagtgctacttgtgggaaggccttccacaaccaaaatttttcatttgcaaccaatgggtaccaaattaaaagtgacgaagctagataacgaactattgctgaaaactgcctcaaaattggcccaatttatcgataattccaaaattgtgatatgctcctgcgaagacgaagtattcgttgtggacttagaatctgaagaagatgaaaaaccacaagaaattgaacttttagaaatcacttccactaaaagtagcattaaagttccatatatcaatagaatcaaccatttggaagtaaatcaagatattgcagttatttctcgtgggtgtggggctgtagacatactaaacctaaagacactagaggcaaaatcattggttcgtttgaataactttatcaccgctgttcacattaacttacccagaaagtctgttgttgtaattactgcagaaaacaagatttatgaatttaacatgaacttaatttcagaatctgaaaacgaagacgatgaaagtctattaacccaatggtcaaagaataataccgaaaaccttccaaaagaatggaaatcattaaaagagaactgtgtgggtattttcacggatgtgaaaaatagtaataggttatgttttgggtgctacttgatcgacaagctgatccgccataagcat

SEQ ID NO: 3816 - DNA, 3624 bp, Saccharomyces pastorianus
atggctcatagcgccatctcacatgttccgaaaatttcagctttaagcaatgaaatacaacctgaagtctcacattccggtgaaaaaaactcaagttcaaatcaccatcctcatttccatcatcagcatgggaagcagcaacatcctttagcgcatcaacaagtgcacttcccaacttcagaaaatcaaaatcaaaatgatacagtgctcattcactctccttcgaccaagacagctcatcgtagttcatcatttttacgtcatttagattctttattatctccagtttcaggccctgcctctgatccacatatgcaggccaatgatgatgaagaggaagatgatgatgacgaattctcgccacattccaagacgtttctttcgccatcaactcaactcgtacctacaaatacatcgactacaccgctttccaattctttgacacccaacggtagaaacctgaatgcaaattcgaactccgaagctgaaaatgacaacgatagagacgataaatcgaatgtaggtaaagtgaaatttcaaccattgacagtacacgaacctgcaatttccacctttggtaaaggaaatttaactttagaggccgtggcgggttcttcggatatcgataatacaactcttgaattagacgaaaataataccaataataacaatagcaataatccaaatgcaagttccacaaatctgagccatatcagcaaaactaacgtgagcaataatactgcttccagagaactaagtaaaagttatcgtaatagcagttatattgatatggcaaggtttgccactatgcaatcgaaattatgtaaccacagagcaagaagtaagaccttacctgctaataaagcattggaaaatgccacgagcgatgaaaataatagcaaacgaaattcaaggtattcttcttattccaatgacatgacttttgaagattctgacgagaggaaatcgaggaacatgtccaaaagattcctaaacagaagatcattttcaccatcgaacttaggcaataaagtggtccctgggatcaatttgagaaattcatttaacaaaacgagaaatagtagctccgattttttcaatacgaatcagggacaacaaaggccaagaacaagtaccactggttcaggaaacattaatacagtagtggatctagattctggtaataacgattttaaattacagggtatcgaatatgcatcggaaaagaaaaatagtgaatttcacactcttttcaaagattccgatatcagtcctaacgaaaggttgattgttgatcatagttgtgctctgtctcgtgatattctattacaaggtagaatgtatatatctgatgctcatattggattttcttcgaatattttgggttgggttagtacagttttcataccattcaaggagatcgtccaaattgaaaaaaaaaccacagctggtatttttcccaacggtattgtaattgatactctgcatacaaagtacatattcgcctctttcatgtcaagagatgctacttttgacttaataacagacgtttggaatcaaatcattttaggtagaaaatatagaaatggtttcggaaataacgattatggtacgctaagtgattcaagtagtgcattctttgatgaatatgatgacaatgatgatgatggagatctagacgataatgatccagacatcaatagtacggatatgacatcaagcgatgacatggatcctgatatttttagtgaatcaaatgaccttcgtaagaacaaaaaaccagcaaacaatctattactaggtcccaataaacatgccccaacaacggccgattataaaccttccagtaatgaacaattagttgttgaggcaaatataaatgcgcctttagggaaagtcatcaatgtcttgtatggcgaagatgtatcttactttgaaagaattttaaaagctcaaaagaattttgaaatctcaccaattcctaacaactttcttactaaaaaagttcgtgattatgcatacacgaaacctctatcgaatagtattggtccaagtaaaacaaagtgtttaatcacagataatttggagcactatgatttggaagactatgttaaaatactaagcgttaccaagaatccggacgttccttcgggaaatatcttctcagtaaagacggtctttcttttctcttgggacaaaaacaatactaccaaattaacggtttataactctatcgattggactggtaaaagttggattaaaagcatgattgaaaagggaaccttcgatggtgtcatggatacgacaaaaacaatgatatccgaagctaataaaatcttaagcaatgaagactcaaacttgaattcaaaaaatcaatccagcaatacccctgaaccagaggaagaaactatcaatctgcccactgttggacctcccgttcatgacccgacagaaccagatttccaaaaaggaaaagatgatacagttattgaagaaaacatcaatattccagttcccttgggaacagtttattcactattgtatggtgatgatacttcttatattaaaaagattatcgaaaatcaaaataattttaatatttgtgaaattccaaaatttgtgaataaaacaagagagattacttacatcaaaaaattgaacaattcattcggcccgaagcaaactaaatgtatagttacagagaccatcgaacatatggatttgaacagtttttttatgataaagcaagtcgttagatcgcctgatgttccatatggtagttcattctccgtccatacaagattatttttttcgtggggtgagcgtaatacaacaaacatgacagtcgtgactaatgttgtttggacaggtaaatccatgttgaagggaaccattgaaaaggggtcgattgatggacaaaaaagctccactaagcaacttgtcgaagatcttaagaaaataatttccaatgccggttcaacaaagagaaaatccaaaaaaagaagtaagacaacgagtaagagaaaatcatcgtcatcatccactaccaaagttgataaaagtgaagataatgtcgaaaccacaaatagtagcccttccttttcttctatatcttccgtgctgcaacaaatagatataacatcaattcagggaattatgacagttgtctctttgattatatgttttatcttcttatttagattattatttcattcgaggaatagttccaatatccaaattattactccaggaacaattctaatcaatggaaatgagtacaattacgttccaaatttcaaaacactttaccacgtatacgaagataatattatgaaaaatgctcaccgtaagggctcgaatagtaataatatagtcactgatacagaaagtttaatttgggactggttgattgatcgtgggaatgggaccattcaaaatggtgtcttgtctgatcacatgaaggaaaaaataaacaataagaaaagcgatcctgaaaatggaattagtgaccataaaatacaacagttggttgaatccattaaggtcaccgaaattcaactgcaagaaatgaaagaattgctagccaaaactgataatatgtcagtagtagcccagttattataa

SEQ ID NO: 3817 - DNA, 519 bp, Saccharomyces pastorianus
atgaaggatgaacctccacgcaataaaaggtctttcagcgatggtcactttttcaagaaactgaaattgatgtcaaagaaaaagcaaccagtggtggaaagaagtaaaactactcgtacaagaaaagcatctgccaattccgcaacgaagtcgtcgctatcgctaaagaggaacaatcatggcaggaacgccattgccaagagaagagtattgaccgatataggatctagtgatgatgacgttattggtaactcagttacgaacccgtctgtccaggattctcataattgccattctgatgattctatcccgccgctgcctttagaactaccagatatcgtttctataagaagcagtaaaagtcatctcagtaataaaagtaacagaaacaagcatggtatagatttgacgttcatgcctcgaagatctctacaaaattccaaagctggtttgaaaaaactgaatacctcctcgcaaggttattttaatatcccggtaaccatagaccgagcaagttaa

SEQ ID NO: 3818 - DNA, 735 bp, Saccharomyces pastorianus
atgggtgctatgattcaatctctacaacaattgacaggtgataactatttcttctactatggtaccactattttcaaggctgttggtttgagtgattctttcgaaacttctattgttttgggtattgtcaactttgcctccacttttgttggtatctacgttgtcgataaatatggtcgtcgtacttgtctattgtggggtgctgcttccatgactgcttgtatggttgtttacgcctctgtcggtgttactagattgtggcctaacggtaaaagtcagccatcatctaagggggctggtaattgtatgattgtctttgcctgtttctatatcttctgtttcgccaccacctgggctcctattccttatgttgttgtttcagaaactttcccattgagaatcaaatccaaggccatgtctattgctaccgctgctaactggttctggggtttcttgattggtttcttcactccatttatcaccggtgccattaacttctactacggttacgttttcatgggctgtatggttttcgcctacttctacgttttcttctttgtgccagaaactaagggtttgactttggaagaagtcaatgatatgtacgctgaaggtgttctaccatggaagtctgcctcatgggttccaccatccagaagaggtgccaactacgacgctgaagaaatgactcacgatgacaagccattgtacaagagaatgttcagcaccaaataa

SEQ ID NO: 3819 - DNA, 1473 bp, Saccharomyces pastorianus
atgaagggttcagaaatggaaaggcaattggccacatttcaggtttttttgcatgatgagaataacataatgccaataatggaaaaggtggtgaagctgcatacgtttgatagcttgattgttttagtgaatgggcttactaagggaaaagactttaagtttattaagtcgtatattcaggccctacttcaaaagttggaacaagacagttattctgataaaggaggaactaaaaagaaaagcttacgctacgttaggttcaataatgctttactttattaccttttaaaaagtgggaacgttgaattgttcattaaaacttttcaagatgaattgaaatttattacggattcaggattacttaatcacattgacggaaatgagcacatactgaattttcctatacaccattatttgaacttgttacgaatatccaagagacaggaagaactctttaatgtgatttcctgtctacagagcagttcattgatgaagtataaattgttcaagaaatttttaatgggcgaattaattgcatcattccaagcctttcgcgatcctaagttagtttgtaaatatcttctctcatcttacagctcaaagccctccgctgaaattttgaatgaacttggtgtttggggatgggtttaccattcaaaatcaacgactctaactacatctgaactcaccaaagagttacagcacaatagcaaccttttgccaaaaacaatgagaatagggtctccggtatctattccagttttaacagaactatatataagtttgttatcatttaattctgtttcactggaaagggatcaattcaaggactgccttcttgatttatattacaagtacaaatcctttctttcgaaagaagctggcaagtacagatattggagaaatgataccggcattttaaatgtatttttgaactacattagatttcacgcgcgagaaccaagactggcttatgatgttcttctagacttttactcagagcccttcgcaaaaaaagtcagtctaacgacgaagatatgtcccttttcgatagtggcatacaaaaatcatgatatagcacaagctgaattatcagaactattacgagtgatgcacaaaaaccgagtacctttaacattcaagttttgttctgcgatggtcatgcattacacaaaattgagggacgaaaagggagcacgctcttggtacaataaaatactctatggaggctttgaaataaaacatatggctttggttcagataattaaggaccaaggctggccgtttccgaaaaatttcgacgaaaccttattggcgcagttgattgacaatagcagtattggagaacctgcggataatgacctgtttaccgaggaagaaatgtttgaagaaagtagcgaacatgattttaatgatgaagatgttgataaatgtactaatactataaaagaaacactaaagtgccttaattga

SEQ ID NO: 3820 - DNA, 1125 bp, Saccharomyces pastorianus
atgttggtttcagaagacaaaataaaggccgtaagccactttcgccctagttggctgcctccaaaagactccaaagagaggaaactacaagacaagcaaatctataaaaacattgacttagcatccatggaggagttacaaaaaagtaaagaacgtgatgatagatcaaagaaaaatgaagagaatagagttagatttcaacacctattggaccggggtattactcgtaactccacattgaatgaatcaaagaaaattgtttgggaaacacctttcacgtctactgtacgacttcaaatatacaatcagctcttacaaagtgacaatcgtataatatcagagtgctttatagagtcgtttgaggaaatgatgcaattactgaataaaatggatttccccaaggataaagaaaccgaactagaacaattggtggaacatggcatacaagagagggtgttttaccgaagcggaacgaacaagcaaattctttctgacctgatgttgttgttgcaaattaaatccatatcccagcaaggtttgattactggtgacgaattgttattctatcattttttgactgatgaatcctttggatcgttgaaggaaatttgggaaattgtcaacctaattcaaatgacatgtttcggtgaaatttgcaaagagaaatatgattcaagaatactcaaccctaggggaatcgttgcccatcttctacgtaaggatgaattcaaggacgaattcaacggcgactgcttaaatagcaacacatggtggaacatattgcaaagaatagaccatagactctttatgtgggtaatggacataattgtcgtccataatagtcagaactttgcgaactatcccgtaaaaatcgaagcgttcaaagacaaatcatgggaatattatagatctaagaaagtagttgttaactataagatcttagtttcattaatggttaatgttctaataaactatcatttcggatacgataatttgaaggacttatcggatttgaaggaccagcacttttgtattccactttatacagaggatagcatcgaagaggaaaaacttaacgatcttttgaccaagcggtggttacattactacaggaaattacgttag

SEQ ID NO: 3821 - DNA, 870 bp, Saccharomyces pastorianus
atgagtacaataactacatgcattccatcccgccaaaattctgtaacaacccctaaactatccagagtgaaaggagttcctggatcgactaatacaacaaatagtgtaactacgtcacaagtttcttttataagcgagaatgattctcccctcaaacagtgcatgagtaccacagctttccatgaacctaaactaatgccaattacaaaaacaccttatgcacactccaatagcacttcggcaatattaccatataagacaacccagctgactccttctcaacgttatcgtttgagaaaagagcaaaatgatcaatctttgcgtaaatgcattcaaaagaaagaaaaattttatgaagaccaggatgctaacttggaacttcaagagggtgacgttgatggctctttgatctggaacatcccaatggcttccttatcaaccagctcttttttgacgctgtctaaattcagcaataaggaaaaaagttttgattcaacaccaaccgatgaagaagtattggcacaaggaaacagccatacacataatcaacatatacagtcgcagcatcaaacttacggtactaaaaagcattcgttatattcgaaccacaagtttggaggatcttgtttggattacaaggagcttcctccgacatgtattcctgggatctctcctatctctgattcgcaatacgtccaggatactatgaaaaatctttcccaggcttatatacatagttccgaaaagatctctaaaaatattctctctggtcgttctaagtccgtacagtgtttaccattggagtataaagaagccagcaatcgaggtatggaagatctgatgttggtttcagaagacaaaataaagggc

SEQ ID NO: 3822 - DNA, 279 bp, Saccharomyces pastorianus
atgtttggcctaaaagaacacgaattgtctgagtgcgcctctttcgggcctacggaaaacgcaagaatcctgaaggaggaggttctatctggtaaataccacctcggtgataataatgcggtctacgactacattttgatgaacactgccgtattatactgtttaagtcaaggtcaccaggattggaaaaaggggatcattaaagcagaagaaagcatccagtctggtaatgcattacattcattggagcactttatagctagcgtaagctcattgtag

SEQ ID NO: 3823 - DNA, 738 bp, Saccharomyces pastorianus
  modified_base (725)..(725): a, c, g, t, unknown, or other
atgtctgaagcggcactgttatcgttcaccaagaagttgttggattcacctccaaagttgacttgtacagacttgcatgatgccatattaatcattcttgatcttttaaaaaaatgcgatacaaatagcgacgaaactctttccatttataccaaagtttccagttttctgacggcattgagattcacccagcttgaccataaagcagaatacattgccgaagctgccaaggctgtgttaaagcattctgacctcgtggatttaccattgcccacgaaaagcatattaagccctggcgcaggaccaataattttggatatcgtgggtaccggtggtgatggacaaaacacctttaacgtttccacctctgcagctatagttgcctctggtattccaggactaaaggtttgcaaacacggagggaaagcttctacatccaatagtggggctggtgatttaattggaactttgggatgtgatgtatctaaggttaactcctcaacggttcctggcttgtggcccgataatacatttttgtttcttctagccccgtttttccaccgcggaatgggtcacgcttccaaggtacgtaaactgctgggcattccaactattttcaacgtgttgggacctcttttacatccagtcagccatgtaaacaagagaatactgggcgtttactcaaaagagcttgcgcctgaatatgacctgcaggcatgcaagcntgcactgccgtcg

SEQ ID NO: 3824 - DNA, 1647 bp, Saccharomyces pastorianus
atgaatcaaaaagattcacaactgggttcgaaggaagaagaattgagagctgttaatgagaagttacacaccgatattaagatttcaagacagcaaactgcttcaagggataaacaaaattccaatttacaaactaaagtccaagatttggaaaatgatttatctctaatgaaaaaaacgcataacgattcaaaatcagtcgctaataatgaactagaatctaaagttaaaatgatcaaaaccttagaaagtgatttgaaacttgcacaggaaaagtgttcaaacatagaacgcgagctgaaagaaaaggaagacaaatatcggttttcgaagtcaaacctgggagacgaaaatattaaactgaacgaaaaagtttcaaatttaaccacagaaaactcacaacttaaaagtaaattaaatgatgaatctacggccgtcagtaatttaaaagaccattatgaaacacagttaagttcaatgaggaaagaagtagaagaatataagacaagcgcagaaaaatttgagtccgaggttgaagaattaagaatcagaattacggaaaactccgccaaagtatctgaaaaaagatcaatggaactaaaacaaaaggagaatcaaatcaatgagctcaacaacgatctgaaaggacaaagggacgaaataagctcactaaaaaatataattgaaaaatacaagaaagattttaaccaatcgaaagccgaacaaagcaatattcaacgcgacctaaatttacaaatattgaacctggaaagtaagctcattgaaagcgaggatcaattacgatcattaagagattctcaaagaacagagatagaaaattggaaaagaaaatacaacgatctctcccttgaaaacgatagactgttggctgaaaaaacatctgcttcagacaaagagcatgaagtgtccattttgaatagaaaactagatgaatcagacaaagaaaaatggagcttgcaggaatccaaagaaaagtataagcgcgaattacaaaagttaatcactgcaaatgaccggttacgaagagagaaagaagaattaaatgaaaacagcaacaacattcgtatcatggaagaaaaaatgacaagaataaaaaataactatttaggtgagattacctctttacaagaggaaaatagaagacttgaagaacgcctcatattaaatgagagacgcaaagatgacaattcaatcatgcaattaaacgacactgtaagttactataagctgaaatatcattcggaagtaagacataataatgatctaaaggtgatcaatgattatttgaacaaggtgttagccttgagtactcgccgtttaagatcagacacaaggaaaggagagcatagtttaaacattgcaatcccggaagacgacgaattagaccgtgactactataatagtcatatttatacaaggtatcatgactatgattacccactaagattccattcgcacagaagaggtccgtactttgagcgccgcttgaatttcaagactgttgctcttttggtgcttgcgtgcgtgagaatgaagaaaattgcattctataggaggtcagacgatgttagactaagaacactaagagacaaaattgagagtaataacggtcgcatatcttggtaa

SEQ ID NO: 3825 - DNA, 654 bp, Saccharomyces pastorianus
atggacgacacttcacatcctccaaatgggagcctgaagaatatggagtttacgcctgtaggatttatcaaatctaagcaaaactctacacaaacacaagtcgtatcgcccactaaggtgccaaactataatgacgatgacgaaaacgaaggcccggcgaggaaaatgcgaagaataagcattgatgataccattgactctaccaggttgtttagcgaagcttcgcaattcgatgtcagtttcccagaaatcaaggccaatataccgccgagttcaaggtcaggcaatatcgataaaaaccgtaaaagaaacctaattaatgatttgaaaaaggacgtaccaatgtcacagcctttaaaagagcaagaagttagagaacaccaattgaaaaaagaccggtttgagcgtgcgttagaaagtaaactactagggaaaagacacataacatacgctcaatccgatctttctaataaagagctatatattaatgaaattaaaacattgaggcatgaaattaaagaattaagaaaagaaagaaatgactctttgaacaactatgacaatctcgaacaagaaatggatgacttgaggaataaactacaacaagtagaacaagaacttgcgtctaaaacaacttgtggatccaaaaagtaa

SEQ ID NO: 3826 - DNA, 2961 bp, Saccharomyces pastorianus
atgtcctcacgctcagggtcagcagtatccagttctgtgcctgctagtgacaacaatacgagtgataggagcaaactggataaaacagatgatttaatcgaggaaagagacaggaagctaactgaactttactgtgtgtctcgcttgaatcagttgctagaattaacagacgaaagtaggctccggaaggaaatagatggcttcttgaagaaaaatgacatacgaaggggtacaagatttgacgacgcactgctgccgaagttcctgcagttagccgtgacttctaagacaaagaaaaaatccaaggaagcgagtctgatcaatatatctaaccagactccaactgactctaaaataggcaccgaactgcaggacagtgccgaaaagatagcagcgaatcccgaaaaccattatgtgccgaaccgcaataactcaatccgtgaaaatataatggattctttaacacctgttgataaaactggagatagatggaacaaaagaccgattgagtcacctataggtagtgaagaacaacggcctgaaaaaaggcaaaagacgcattctcaatccttagaatcttctaatggatcggagatggcttcactgcctatatcaccacgtccaccagtgcccagtgcgttgtcacattacgcttactatgagaacatagaataccctccggcggatcccactactatcgaacctacggagaaatttaaggatcccttaataaaaaccatcatgggaaaaaaggtagagacatctgatcatttcaacgaacataatattgacgcatcagagaccgttttcttgttgatgaacgattacatgccatcaaaaataccccaggctctgcctttagcagaattgaaatacatgtctcaaacgttgccacttataaatctgataccaagagctcacaagactttaaccactgatataataaacaatgccttaaacgaagccagaataacggtcgtgggttcaaggatagaggaattaagaagacttggattatggtctttgaggcaaccgaaaaggtttattgatccttggaaacaagacatttctcatcaaaacattcttctgaaagaagctaaatggatgcaagctgattttaaagaaggccaaaaatacaaaatggccatgtgtgccacaatggctcaggcagtaaatgattactggaattacggtgaaatatgttgtgtggggcgtaaaataataacaaaagacgaaggaattacaccatcgagtgatgagtgcatagtcgagtcttcgaataagctatcggaaatttcaacaaaggatgcgcaaatcagtacacctggtaacgatggcgctaacacttccacggatgctaacgatactggttgtaatgatcatgctgctgctgccgatgatgataatgatgatgataaggatgataataaaataagatctagcaacgatcttgatctccggcatagtggcccgattcaagtaggccacaatgaccgagtcgttccctcaattgacaccgaactgcttttgagaaaaccttcttcgtttaacgaggctgttgctactccacatgaagctgctgcattatcgttatcgatagggacagaagaaccaagaaacgctttagcttctcagttcaaactcacaatctttgtgaatgaattcaatgcctttgaaaaaacattggtgcaggatctacctgtatatagtggtattaatgatgaggtgcccaataaaaacgaacctttaccatttattcccatctctaaatcagtcgtgacattggatgacaatggtttttataagctacttgaacgtcagttgatcgacgatgaaccgtcaatatctcaattgagcaaaaggcgcggtatgttttacggtaatagaagaaatcattatttaaggccaccagcggtgccctctttacgctatcttcagaatagaacgcctaccatatggttatccgaggatgaccaggaactggttaaaaacattaacacctatggctacaactgggaattgattagcgcacatatgacacatcatcttacctgttcttatctgtccaatattgaacgtagaacaccatggcaatgttttgaacggtttgtacagttgaacgaacgatttaattttagcgatctcaaaggacctagagcacatggcgcccaacaatggctgatcgaagcacataaatttcaacaaagacagaatagaagaatctcacctttaggtgtaaatatggaatccatacaaaggggtcatagaagattacgttgggccagcatgtttgaggccattaggaaatgtatgaagaaaagagaaaatacaccacgtcccaatccaactcaaccaaggaaacctttagactgtaaaaacatgaaggtccctactccagcagaaatgtcgcttttaaaagctcaaagagacgaagcattgagaagagacattcaattgagaagaacggtaaaaaacagattacaacaaaggcaacaacaacaaagtctgcaagctcgtaattcatctagagctcaaagcccagttccttcaaatggtaacgcatcagcgaatttgcctagaagtggtcaagcatcaactcctaggcaaaatcagaaacagtatactgagcaagatattattgaaagctactcaagaaaattattggagcagaaacctgaacttactcctgacacagctttgaaagctgcaaaaaattactacagaactttgaaagagcaacaacaacagctgaagcagcaacaaatacaacagcaaaggatgcaatcacaggaagagtccaaccaagtacagccacagccacaatctcaatctcaaacagtgccccaaactcagaacgcatccccatcacaagccaccccttctggtcttttaaacatcaattctgccacaaaaataaaatcgccaacaccacaggagattttacaaagattccaaaagtaa

SEQ ID NO: 3827 - DNA, 282 bp, Saccharomyces pastorianus
atgagtacggatactgctgctgcacaagcccagaataaaatagattctacgaaaaagaagaatgaggaagtaaataagaagtctctggaagaagacgatgaatttgaagattttcctatcgatacatgggcaaatggtgaaacgataaaaagtaatacagttacacaaacaaacatatgggaagaaaactgggatgatgttgaagttgacgacgattttaccaatgaattaaaggccgaattagatagatacaaacgagaaaatgaacaaaaagctacataa

SEQ ID NO: 3828 - DNA, 645 bp, Saccharomyces pastorianus
atgccactctatttagcagtcgagattgttctaggtatctccgttctgaataaatgtagtggggtttatggtatcttagccttgtttacaggccatcctttagattttatgcaatgggttgcatatctttggtcggtgtttacactgattgtatttgtacaagggctctatctgattcataagccaaatttgctggttttctctcaaatatgcgtcctatataccgttgatactatctgtacttgctttttcaccctatggtttaccacacagtggttcactttggaagataaagttgatttgagttctattgctggtgatgctagcagtactgcatcccaagccaattacaacccaatagcaaccggcaagctaacagcacgtagtattgatataagtggacagagtgctagtgaaagctacgagtattcgatcacgatattaattacgttggtatcgttgatattcagattctactttaatttcattttggcatctttcgtccaagagttgctgcatcaccctaaatatttagtcgatagagatgatgtagaacaggacttgaagaataagcctatttggaaaaggctttgggccaagagtcaaaaaggctgttacaaactatgtaagaatttactagagtag

SEQ ID NO: 3829 - DNA, 636 bp, Saccharomyces pastorianus
atgaaaaatgggaaatggtattccgatagaggcattccataccgcagaggctatctactgtatggtccacccggatcaggtaagacgagcttcatccaagctttagctggtgagttggactacaacatttgcattctaaatctttccgaaaataacttaacggatgacagattaaatcatttgatgaacaatatgccagaaagaagtatactcctattggaagatattgatgcagcattcaataagagaagccaaagtggcgaagaggggttccattcgagtgtcacatttagtggtttattaaatgccttggatggtgtaacatcgtccgaagaaacgattacgttcatgactaccaaccacccagagaagctagatgcagccataatgagaccgggccgtattgactacaaagtgtatgttggtaatgcaacaccttaccaagtggagaaaatgtttatgaaattttaccccggcgaaacggagatatgcaagaagtttgtagagagtattacaacgttggatatcactgtaagcaccgcacaattgcaaggactattcgtcatgaataaggatgcacctgaagatgcagtgaaaatggttactagcttacgaaattctaatcgtattttttag

SEQ ID NO: 3830 - DNA, 516 bp, Saccharomyces pastorianus
atgtcggatacgccggttgatataccaaatgataagcaggctgtctcagagctgagcggtgccgttacttcctcagcgagtaaaactgattctaatacagtccggggtaaactttcacagctagttggcgatgctatgtcaagcaatccatatttcgctgcaggtggtgggctaatgattctcggtacgggattggctgtggcgaggtcaggtataataaaagccagcagagtggcgtatcgacaaatgattgttgatttagaaattcattctaaggacaaatcatatgcctggttccttacttggatggccaagcatcctcaaagggtgtctagacatttgtctgtgaggacaaactttatacaacatgacaatggatcagtcagcacaaaattttcgttggtcccaggtccaggtaatcattggattcgttataagggtgcctttatcttgatcaaaagagaaaggtctgctaagatgatagatatcgcaaatggatcaccattcgagacgtga

SEQ ID NO: 3831 - DNA, 261 bp, Saccharomyces pastorianus
atgtcaggcaaggctcccacagaaggtagtgtcaccacagagtttctttccgatatcatcggcaagacagtgaacgtcaagcttgcttcgggtttgctttatagtggaagattggaatccattgatgggttcatgaacgttgctctatcgagtgccactgaacactacgaaagcaatgaaaacaaactcctgaacaagtttaacaatgatgtctttttgagaggtacacaggtcatgtacatcagtgaactaaaaatataa

SEQ ID NO: 3832 - DNA, 321 bp, Saccharomyces pastorianus
atggctaacattacattcaaaaatggcgacttggccagaagagcagttgaaagattcaacggttctccaattgatggtggtagatctagattaagactaaacctaattgttgatccaaaccaacgtccatccaggagtttagctgacagaatcaaggctatgccccaaaagagtggaaatgctccaagacctgttaagagaggtccaaacagaaaggctgctatggtcaaaactcaaaacaagcaaaagagagaaagaccagccaaaaagagtctagaggatttggataaggaaatggctgactactttgaaaagaaatga

SEQ ID NO: 3833 - DNA, 432 bp, Saccharomyces pastorianus
atgcagaattctttctttttggttgagtgcttcaatttgttatatacttgtaaatcgttgaagacaaatagatatagaatctccctcattctatttgaatttttacgaatcagaaacaaaaatacctacatcagcaaaatgtccgctaacttagataagtccttagacgaaattattggctccagtagaccaggaggcaacagagcccgtgtcggtggtacccgtggcaacggcccaaaaagagtcggcaagcaagtcaacacccagcgcaggaacattccaaacagaaatggtcctatcagaaagaatgtgaggcctcctccaaacgctgtcgctagagttgccaagcttttagatacctctagagaggttaaggttaacgtcgaaggtttgccaagggacatcaagcaagatgctgtaagagtatgttaa

SEQ ID NO: 3834 - DNA, 762 bp, Saccharomyces pastorianus
atgacggaggccacacacaaacaagaagagaactgtccaatgactgatacatataacaccatatcgagattcatagatgaagagttgtccgccttcttgtccagtgatgactacctaatggatgatttcttaggtgagataccgaatgaggtaactaggctgctaaaggctgaagtaatcgaaaaaagaaaggatgccttaagtagaggcaaacaagacgtactcactaaagagatatacgataacgaatcggaattgaggatcagacaaacacaacaggtaatggatctgatcggcgatataccgaaatattcccttggaagtgagttaagaagcagagtcggcagtgagccgcaaagcacgtcgattgcaacattaattgaagacgtgttaaaactaccacagatggaagtggccaccgaaggagaactagaagcagagacggaaaatgacctcaagatccttaatgagtatagtaatttaagaagggatttgattttgagatgccaagctatccaaataggcgaaagcacactgtccgaaatcgtgacccaagtaagctcgatagactctttagtcaactctatcaaggaaaccacagacgatgacgatgttagcgaatatttcgccacttataatgggaaactagtggctgcattggaagagatgaaactactactggaggaggccatcaagacatttgacacttccccagaaaagatacagaaaataaaagacatcttggtcgatttaaagaagtaa

SEQ ID NO: 3835 - DNA, 642 bp, Saccharomyces pastorianus
atggaaccacgcacaataagggccctggttgtaggttgtgtattgatgtttttccaacaggccactggtttcaacgctttcatgtattacgcggcaataatattttctagatttaatatgaaaaaccctctattacctgcaattctaattgcttcgactaacttcatattcaccttttttgcaatgtacactatggactccttgggcagaagagctattttattgaggactatctggatcatgactgttgggttacttctttgcagtattggcttcgatcacgataaagttaatttgctattggcttcggtcgtaatttacgttgcggcatatgcttccgcaatgggtagtgtaccatggacttgtgtggagttccttcccttaaataggagatcttttggtgcctcttgtatagcgtgcacaaattggctgaccaacgcgctagtttcgatgacatatctgagcgctattgacgcaattggtaatgaacatactatgctaatctttgcatttttcacggtttgtgcttggttttttgtctacttttggtatccggaagtcaaaggtttgtcattagaagaggttggaaaggtctttgatgacggaattgacgtgcattatgtttttcgtacttaccattaa

SEQ ID NO: 3836 - DNA, 1044 bp, Saccharomyces pastorianus
atgtctacaggtgaaagtgaagacgtctattctgatctgtattccatcttctcccaagtaacgtccaatacagctaatgacatcgagcaactcccatatgctataacgtttaagacatctttaatcttcgttggtgctactgttggtgggttactgttcggctatgatacaggcgttatatcaggggttctcctgtctttaaagccgcaagatctttctttgacggtcttaaccgacgttcaaaaagagttaatagcctccagtacaagtgtcggatcatttttcggttccatgctggcgtttcccttagcagacaagtatggaagaagaatcacgctcgcgatttgttgttcgatcttcatcttggctgcaattgggatggctgctgcaagaacattatcgttccttatttgtggtaggctgctcgttggtatcgctgttggggtgtctgcgcaatgtgtccctttattcttaagtgaaatttcaccttccaaaattagaggttttatgttgactttgaacattattgccatcactggaggccagctgatatcttacataatcgcccttctcatcaaagacatggatcattcatggagatatttgttcgcattttccgccattcctgccattttgtttatttccatattggattttattcctgaatcacctcggtggtccatctctaagggtgattttctctatgctagggactctttgaaaatgttatatccgactgcatctacacatcatcttaatagcaagatcaagcaattgattattgaactggataagctacgaatatatgaagatgcgggtgagcccttacttgcgcaagcccaatcacttgttcggtacatgaatacgtcaacatcagagactattagcccgcccaatgtcaagagagtttcttcggctactgatagaaacagcaacgcaatttcttcctcatcagcgtttttaacagcattacgaagtccaatttcaaacggtgctacaacacctgctaaaaaaaaaaacataggatggaaccacgcacaataa

SEQ ID NO: 3837 - DNA, 1146 bp, Saccharomyces pastorianus
atgagtgatcccaacgcgactataccagaagacaatccagagggtattgaagctagtgagcaatatagggccatggttgctgaattacaagaaacattgaagccggacttggcgttggtggaagaaaagatcgttacgccatgccaggaattgttgaaaattattacttatattcgtaaaatggccaccaagagaaaccacaaaaaactagatttggataggcatctgaacacctatagcaagcaggagaagaagaaggaaccaactcccaaggacgaagagaggttgtataaagcacaagcccaggtggaagttgctcaacaagaatatgattactataacgagttgctaaagactcaattgccaatcttgtttagtttggaagccgagttcgtgaaaccgctatttgtttcgttctatttcatgcaattgaatatcttttacactttgtacaacaatcttcaagacatgaaaattccatatttcgatctaaacagtgatatcgtggagtcttttatcgccaagagaggtaacgtggaggagcaaacagattcgctaaccattacccatttcaagattggttactctaaagcgaaactggaaatgaccaaaagaaagtacggtgtaggagccactgaggactcgccagtaagcggcgcttccagtggaaccggatacggtgccggatatggtacagccacaccaacatcgccaacccccacgggatacggatatggcgctgcagcaccaggttatggagcccaaccagtcgcacagtacggtgccgctgccgttgcaggcgccgttgcaggcgccgtcccatcttatggtgctgtacaatcgccaccactcaccggaatggcattacaacaaccacaacagcagcaacagggtccaccacctgcctattccaaccctctaacgccacctgtaggcggtgcaacagccgcagctgtccccgccttagaaaccgtcaccgcgctatacgattaccaagcgcaagccacaggtgacctgactttcccggccggtgcagttatagagattgtccagcgtactccagacgcaaacgaatggtggacaggaagatacaatggccagcaaggtgtgttccccggaaactacgtccaactcaataaaaactag

SEQ ID NO: 3838 - DNA, 255 bp, Saccharomyces pastorianus
atgagtttcaaagggtttaccaaagccgtcactagggctcctcagtccttccgtcaaaagttcaagatgggtgagcagactgaggatcctgtgtatgaagatgcagaacgtcgtttccaagaactggaacaagaaactaaaaaattgagtgaggagtcgaagaggtattcgtctgcagtgaacgggatgctaacgcatcaaattggatttgctaagtccatggaggaaatttcaaacctatcagtggtaaaatga

SEQ ID NO: 3839 - DNA, 2004 bp, Saccharomyces pastorianus
atgttaaaaagcaaaaactatgtttacgttaaattaacctgttcggattccagtaataagccatctcaactatacggaattcctcgtacgttaagcagaaaggaaaaaatggcaagagaaacgaatttaataaagatcattggtgaagataactttcaaaaattgcggtcttccaaatgtctcttggttggtgctggaggcatagggtccgaactattgaaagacttgatcctgatggaattcggtgagatacatattgtggatctggacactattgacttgtctaacttgaataggcagtttctcttcagacaaaaagatatcaagcagcccaaatccaccacggctgtgaaggcggtccaacatttcaacaactctaaactggtgccttatcaaggaaacgttatggacacttccacttttcccctacattggtttgagcaattcgacattatcttcaatgcccttgataacctggctgcaaggcgttacgttaataaaatgtcccaatttttgtcgctccctttactagagtctgggacggctgggtttgatggctatatgcagccaattattcctgggcagacagaatgttttgaatgtaccaagaaagaaactccaaagactttccccgtgtgtaccatcagatcgacaccatcccaaccaatccattgtattgtttgggcaaaaaactttctatttaaccagctgtttgcctcagatgcttctgaaaacgaagaaggcaataaggattggggtacggacgacgctgaggaaatcaaacgtatcaaacaagaaactaatgaactacatgaactacagaaaattatcatctccaaagatgaatcccgtgtccctgagatccttcacaaattgtttattcaagacataaacaaattattagctattgaaaatctatggaaaacaagaactaaaccaacgccgttgtccgattctcagataagtgggtcttccaagataaataaatttgattcgaactctgttggaacaatacacgaacagatcaaccacttcattaaaatcactcaaaagctaatgaatcgttatgctacggagcagagccatattgattttgacaaagacgatgctgatacattggaattcgttgtaacagcagcaaatataagatctcacattttcaacataccaatgaagtctgtatttgacattaagcaaattgcaggtaacatcatcccggccatagcaacgacaaatgctatcattgccggtttatcatcattaatttcattgcgtgttctaaaccttctgaaatatgcaccagttagcaaattcactgacttgaatatgacttttaccgccaaggcaagcaatttgtctcaaaatcggtatttgtcaaatcctaaattagcaccaccaaactgtaattgtcctgtgtgttccagagtaagtagaggggttattaaattgtcacctgatcagctgaagaaaataaaattgtctgatctgatcagcttaatacgtgacaaatacgattatccggaggatatctcactactggatgcaagtgatcaaagactattggccgattatgactttgaagatttgaatggtcgcactttgtctgaagttaatctaggcaacggatctataatattattttccgacgaagaaggtgacacaatggttcgtaaatccattgagctatacttcgatgtaaatgatgcatttcctcatgatacgtgtaagttaccagatatacggatcccactagtcaaatcaagcgaaacttcaacaaatggtgacgaggacgaagataatgacgtagctaccactacggataaacaggaagatggtggtatcgtaatactagatgaagatgaaggtgaaattgaattggcgaccgacccgttagatgactcgaagaaaaggtcggctaatcttgaaggttttggtgaacccagcagcaaaaggaaaaagttgacaaatgaatctgctgattctgatattattgaactagactga

SEQ ID NO: 3840 - DNA, 777 bp, Saccharomyces pastorianus
atggaaaagaaattggaggccacgaagaaagaacataaactgtacaaggataaatatgccgatgccattgatgaacgggcccgatctcaaagagaagttaacgaactattgcaaaggcaaagtgcgtggtcttcgactgatttagaaagattcacacaactatacaaaaacgacgcgttaaatgctaaacaagagcaagagctgaagaataaggtgaaggaaattgaaagcaaggaagaacaactaaacgacgacctgtatagagcaattttgacaaggtaccacgaggaacagatatggtcggataaaattagaagaacttccacctggggtaccttcatactgatgggtatgaatatattcttatttgttgtgttgcaattgctactagaaccttggaaacgaaaaaggttagtaggttcctttgaagacaaagtcaaaagtgctctcaacgactattctacagagcagaacttgaaaatagataaactatcatctgaaagaacattccaacatacagatcaagacgaaattgaaaattctatcattgaagagcccctcgagcaagtcttggtatgcaagactgacacacccgagactaaaacgaggataaaatctttcagcgatatctggaaacaaataaagtcattctttagcacactaaggaacatcgaatttaaaagtctcgatgctcctcttgtcgtcaacacattagaattctacctatactcgatttccttagtgagtatgacgatattaatatccggggtaatatga

SEQ ID NO: 3841 - DNA, 474 bp, Saccharomyces pastorianus
atgttgagatgccatgggacgacaagaagtatgcccttagtgttcagcatcaaccggatggtgttgaggccgccgtttgttaggcttttccattacagttcacattacctgatccagtctggcagaaatccttataatgacaacaccaacaacaatgaaatgcggttaaacgacaacaccgtttggaaaaggaatatagaacctcagtggcagcacttgaaaacgaaattgaatgaattgtactccaggttcaaattatatcgaggccaactgtcctatcaggtcaataaggccaagaaatctatacaagaggtaaataagaaactatctgagcaagaggacgaaatcaacgatagccgtttaaactataataaagatgaattgactagtgggaaaattgagggtctaccctccgaaagagaactgcacagaaagaaagactctagaggatccccggtaccagctcgattgtaa

SEQ ID NO: 3842 - DNA, 105 bp, Saccharomyces pastorianus
atgattatttctctcgcgtccttggtgaacatcaagtcttggtccagtatttcagatatcatcttttgtacggtcgctaagggcaataattcgtctccatgttag

SEQ ID NO: 3843 - DNA, 390 bp, Saccharomyces pastorianus
atgatatctgaaatactggaccaagacttgatgttcaccaaggacgcgagagaaataatcattaattccgggatagagtttattatgattctgtcctcgatggcttccgaaatggcggataacgaggccaagaaaacaatagcgcccgagcacgtgatcaaggccctggaagaactggaatatgatgagtttataccatttttagaggagattctgctgaacttcaagggctcccaaaaggttaaagagactagggactcgaaattcaagaagtcgggtctttcggaagaggagttgctacgacaacaagaggagttgtttagacaatcgaggtcgagactacatcagaatagcgtgtcggatccggtcaaatcggaggattcttcatga

SEQ ID NO: 3844 - DNA, 1023 bp, Saccharomyces pastorianus
atgactattactaaaatacccatatggttagactgtgatcctggtcacgacgatgctatggccattctgctgggttgttttcacccagcttttgagcttctaggtattagcacatgttttggtaatgcaccacctgaaaatacagattataatgctcgctctcttttaactgccatgggcaaagcccatgccatcccagtttacaaaggcgcacaaaggccttggagaagagagcctcattatgctcctgacattcacggtatatcaggtttagacggcacctcgttattgcctaaaccaacttttgaagccagaactgataaaacatatattgaagccatcgaagaagcagtattggccaacgatggagaaatatcatttgtttctaccggtgcgctaacttcattagctacggttctaagagacaaaccccacttaaaaaaatctatcaaatacatcagtattatgggtggtggacttcatggtctagggaattgtaatccaaatctttctgctgaatttaacgtgtggattgatcccgacgcagctaatgccatattccatgaccccgaagtaaagaacaaatgtatagtggtacctctaaatttaacccacaaagccatcgctacccatgaggtcaatgaagaaatctccaacgaaggggacaactccaatttgcgaagattgtttttcgaactctttcaatttttcgctcacacttacaaggacacgcaaggttttgaattaggcccacctgtccatgatccagtggccttggtgccactcttggaattttataagtgggatccatcatctttaatcagatttgattacaagagaatggatatatcttgtattgacgatatactcaatgaagactcgggaaaaatcattatcgaaaaagagtatccaagcgatggtaatttcggtacaatcattggtctagatttgaacattcaatacttttgggaccagattttcacggcattaaataaagcagacaaaatgtcaacaattgaataa

SEQ ID NO: 3845 - DNA, 795 bp, Saccharomyces pastorianus
atgccacgattgacggttggagctaaaaatgtgctctatcctttgcaaaagacatttgtgacaggcagtcgcaagcaagagcaggtaggaataaggtcgctagcctcagtggtggatggcacgtcgaagaaagtggatgctgcccgcggcggcaaggaagaagacatgaaagtgagcgagagaatctatgagtggacaagaacaggattggagcaaggcagggaacatttcaaagtaggtggtactaaggtctacttacccaaggccagaataatcctgctaagacccaacgcgaagcacaccccgtaccaggccaagttcatcgtcccgaagtcgttcaacaagctggacctaagggactacctgtaccacatctacggcctgagagcaatgaacatcacaacgcagctgctgcacgggaagttcaaccgcatgaacctgcagacgacccggttcagagagccgcagatcaagaagatgacaatcgagatggaggagccgttcatctggcccgaggaacctcacgcaggcgagagcccattctgggacagcacaacgcccgacaacctggaaaagtaccgtgaggaaagactcaactgcctcgggtctgacaccaacaagccgggcaccgccttcggcgggatcatagggccctacaagcgggtggcccagccttttgtgccgcggttctggaagagagagatggacaacaagcgtgagcggtacgatgcagagctccagcgcgcaaacaagctgatagctctagatcaatacgtgaacaaggaattgcgttaa

SEQ ID NO: 3846 - DNA, 2121 bp, Saccharomyces pastorianus
atgaaaaaagaaggcaaattacaaaaaggccaccagaaccctaaggatgttgaaaatagtgcaggaagctctccggattctgctaccacagaaaaaaaactattagatgatagttctgagggttccgaaacttcttcagataatgccggattgggtctttccaaatcagaagcaattttccactggcgtgatttgtgctatgttgtccctgtgaagggcggcgaaagacgtattttgaacaacgttgatggctgggtgaaaccaggtactttgactgccctaatgggtgcttcaggtgctggtaaaacaactttattagattgtttggccgaaagagtcactatgggtgtcataacaggtaacatcttcgtcgatggtcgtttgcgtgatgaatcgttcccaagatcgattggttattgtcaacagcaggatttacatttgaaaacagctacagtaagagagtctctaaaattttccgcttacttgcgccaaccttcctcggtatccattgaagagaaagacaaatacgtggaagaagttattaagattttggaaatggaaaaatattcagacgctgtcgttggtgttgcaggtgaaggtctaaatgttgaacaaagaaaaagattgactattggtgttgaattagctgccagacctaaattactggtgttcttagatgaaccaacatcaggccttgattcccaaactgcttgggatacttgtcaattaatgagaaaattggccactcatggtcaagctattttgtgtaccatccatcaaccctccgctatcttaatgcaacagtttgacagattactattcttgcaaaagggtggtcagactgtttattttggtgatttaggggacggctgtaaaactatgattgattactttgaaagccatggtgctcataaatgtccacctgaggcaaaccctgctgaatggatgttagaaattgttggtgcggcccccggtactcatgccactcaagattacaatgaagtatggagaaattcagacgaatacaaggctatccaagacgaattggactggatggaaaagaacttaccaggaaaatcaaaagaaccgaccgctgaagaacataagccttatgcggcaccattaggttatcaattcaaaatggttaccattcgtctatttcaacaatactggagatcacctgattatctatggtccaaattcaccctgactattttcaatcaagtcttcattgggtttacttttttcaagtctgatagaagtttacaggggttgcaaaatcaaatgttatcaacattcatgtacaccgttattttcaatcctatgctacaacaatatctgccatcttttgttcagcaaagagacttgtatgaagcgagagaacgtccatcaagaactttttcgtgggtcgcgttcttcgtatcccaaatcattgttgaaattccatggaatattttagcaggtacacttgcctattgtatttactattacgcggttggattttattcgaatgcttcaaccgctggccaacttcacgagagaggtgccttgttttggttgttttctattgccttttacgtgtacattggttctatgggtttgttagtgatttccttcaatgaagttgctgaaacagcagctcatatggggtctcttatgttcacaatggcattgtcgttctgtggtgttatggctactcctagtgctatgccaagattttggatctttatgtatagagtgtctccgctgacctatctgatcgatgcattattagccattggtgtggctaatgttgacgttaaatgttccaaatatgaaatggttaaatttactccaccatccggaagcacctgtggcgaatatatggctggatatatcaaaatggctggaacaggttatttgggcgacccgtctgcaacagatcaatgtagtttctgttccgtatctaccactaacgttttcttagcttccgtcagctctcattattatagaagatggagaaattatggtatttttatttgttacattgttttcgattatgccgccgcaacatttttatactggttagcaagagtccctaagaatagcggtaaaattactgagaagcctaacaaaaaatga

SEQ ID NO: 3847 - DNA, 2448 bp, Saccharomyces pastorianus
atgtcatcggatatcaaagacgtggaggaccaggcctcgagcacaagctccgctgcccagtccatcgcgcagcacccgtaccgcggcttcgacaacgaagctgctgaaagggtgcatgagctggcaaggacgcttacctcacacagcatgctgcactccgccgcctccaacaacgccgaccaaaatagctcttccatcactgacaacacccgcaacgcggactcgcggtccatcttctctacggacatgatgggcgtaaacccggtgtttaccaacccggacaccccgggctacaatgccaaactagacccgaacagcgatcagttctccagtacggcctgggtgcagaatatggccaacatatcctcctcggacccggagttttacaagccgtacactctggggtgtgtgtggaagaacctgagtgcctccggggactctgcagatgtgtcgtaccagtctacgttcgtgaacatcgtgccgaagctgctcacgaaagcattcaggttgctgaagcccaggaaggaggaggcaacgttccagatcttgaagcccatggacgggtgcctcaacccgggcgagttgctagtcgttctcggaaggcccgggtctggttgtaccacactgctaaagtccatctcttctaattcgcacgggtttaagatcgcgaaggactccacggtctcttacgacgggctgtccagttcggacatcaaaaagcactaccgtggggaagtcgtgtacaatgccgaatcggacatccatttgccccacttgacggtttaccaaacgctgtttaccgtggcaagattgaaaaccccgcagaatcgtataaagggcgtggatagagaatcgtatgcgaatcacgtgacggatgttgccatggcaacctacggtctttcgcacacaagagacaccaaggtcggtaacgatttggttagaggtgtttccggtggtgaaagaaagcgtgtgtccattgccgaggtcgcgatctgcggatctcggttccagtgctgggataacgccaccagggggttggattctgctactgccctggagtttatccgtgctttgaaaacacaggctgacatcggtaagagtgccgccaccgtggccatctaccaatgttcccaggactcgtacgatctctttgacaaggtttgtgtcttggacgacgggtaccaactttattttgggtcctccaaggaggcaaagaaatatttccaagatatggggtacgtttgtcctccaaggcagacgactgcagatttcttgacctctattacaagccctactgaaagaatcatcaataaagaattcatccaaaagggcatcaacgtgcctcaaacggcaaaagatatggccgaatactggctgcaatcagaatcctacaagaagctgatcaaagaaatagacgccgctctggccgaaaacacagacgaagcacgtgtcatcatccaggatgcccatcgcgccaaacaggcaaagagagcccacccttcctctccctatgtggtcaactacggcatgcaagtcaagtacttattggaaagaaatttctggagaataaaacaaagtatcagtattactctgtggcaggtcatcggtaattccgtcatggcattcatcctaggttctatgttttacaaagttatgaagaaaaacgacacgtccactttctatttccgtggtgctgcaatgtttttcgccatcttgtttaatgccttttcttgtcttttggaaatttttagtctttatgagacaagacccatcaccgagaagcatagaacttattctttgtaccatccgagcgcggacgcatttgcgtcagttttgtccgaaatgccccccaaattgatcactgctgtttgcttcaacatcatcttctatttcctggttgatttcaagagaaatggaggtgtgtttttcttttattttttgatcaatattctgtccacgttcactttgtctcatctgtttagatgtgttggttcattgaccaagactttgcaagaggccatggtgcccgcttcgatgttattgttggcccttgccatgtacacggggtttgccatccccagaaccaagattctgggttggtctatttggatctggtatataaacccgttggcctacttgtttgagtccctgatgatcaatgaatttcatgaccgtaagttcccctgtgctcagtatatccctgccggtcccggttaccaagacgttacaggtactcaacacgtttgttctgctgttggtgcttatccaggtaatgattatgttttgggtgatgatttcttgaaggaaagttacgactatgaacataaacacaaatggcgtgggtttggtattggtatggcttacgttattttcttcttcttcgtttatttattcctttgtgagtacaatgaaggtgctaagcaaaagggtgaaatggtgtgtttttaa

SEQ ID NO: 3848 - DNA, 276 bp, Saccharomyces pastorianus
atgttagatagaatactatattccgctataaacttttgggacgtcgtgatttttgatagaaagacatcaaagctattaccaagatcaaacagaagaattctgtataatggttcgttaaccaggtcaatcactacaactaaggcttcagtggtcaatttggaaatcattccgatcgaaaaaggccagtacgagttcggcgtttgcatttctaagtccaacaaccaggacgggatcattcaattcgattccgaaagagtggttttgtccgtcatttag

SEQ ID NO: 3849 - DNA, 1311 bp, Saccharomyces pastorianus
atgacctattcgggaccatatagcgtcaaagccaaaacaatgagattaataacgctgcctttgatgataaaaaaaccaacataccaaagaatatatgaagtaacgtcattaaagatatctgttttacaactaccttctcaacagttcaatattataaaaagctccaaaaaatcaaaccattccgaagaagatgttgagaacaatagatgcatatacagtaaggtgaggattaaaatcctaccagaacaaccacaactagagttgctgagcacttctaagatgacaaagaattcttggatgatgttggatggtacgaaaactggtttccatgtaacggtgagaaacaaatcactgagctgtgaaataaatcatatcagaatcataccaataaataatattgaacaactattgaagtctgattattggaaaaagatgccacctgatgatttatatattatggaaaaacagctggattggctgtctaaatcttgcatacgaattgttaaaacgccgaaggttattaaaccaaatgaaatcattacttttgacttagagttagatactacagctgtaccgtttaattttactggatttgacctgttgattgaatatggcgtaaatgctgctgacaaatcctgtatttatttgaaaaagctatcaataccctatgaggtaacattaagaagaactattgaggtaccaagtatggacattatcccattgaatgagttctttagttcagaggttgaaaatgtggattggattacgtgcataatgaaccaaacacacaataacactgacctccaacctagagattttatattgctattattagacttcaggaattcctggatagacggtattaaattgaatgttcaattcgaggatttcaccagtaatgagtatcacgtagaagccaaccatacctcaagaattattgttcctataagaaaaattgattacaaaaagcatagttttgaaactatgccaataccgaggatatatcaagggagacaattcattcagagtggaatgaacgaggaacagactatagaaatgagacagaaattttggtgccgtgaacacattatttcaaggctcaaatgtaattggaaactaactacagatcaatctgtaacaggctcggtagattttaataaattcatagaaaagttggaccataagatggtgtccacgatatacactgggaaattgtttttcggagtacaactattgattgataatccagaagttaaagttggtgaaagaaccaacttaaagatattggctgatccaactagcacatgttag

SEQ ID NO: 3850 - DNA, 1980 bp, Saccharomyces pastorianus
atgaacattctcaagcatttcccaagttatgttggcccgtctaaaattcgaactttggtaataccggttggccactggaagcgaaacgagttcaatgatgcggtacaaagcctgtccgaattcagcgaaattcacttatccgacgtgactcccattgacagtccgattttcacaccgcaagggtttccacacggtcggctatttttcgagttcttaaccatagatcatgacaatgccttggaactgtttctctatgatttcgagccatttagaaaaacgtttgtcatcattggcctagtgaacgattccagtgacccttctaccaatttgaactttatgaaggaaaaatacccaactttgatttcaccaaatttaatatacacttcggcttcgctcactacagagtttatacaaggcatagatgctatcgaaaatgcattcacatccacaccggatatgaaaaaaagtttagagacgattatgtgcgacatagcaagaaactttctgatcgctttgaacaactattactcttcatacaagcatgtcactttgagatcaccgggtgcgatcgcggggaactcggtactgaaaacaacgctgataagacagaatagctacacatcttcgctgtccaccgcatccatgggggctgcgcaatcgtccgtctctagttcatcgaagacaaacgcagctgctactgcttccaaaagattatcttctttcgaaatgaccaccaacagtctaaagagatccgcttctttgaagctagctaccacgctttccagttctgaaaatagagcccaacagaagtcactaggccgacaactgaaaatattggggaatttccaattgatagcgggacgatacatcgatgcgcttaacagctttactgaagcgattacaactttgtacaaagtacgcgactacctgtggctgggttctgctctcgatggtatttccatttgctttttacttctgtcttacctcgatatggcatatcagattccacaaattgtaaacctgatctgccctgtggaaaagctcaacactgaagctggttcaacaagtgtctctcccgtagactctaataccaagacatccgccactacaacaactgcaacaagcacaccaagaaacagcatatcgatagctgctatgcaatctcctagaaattcaatgatttctttgtctgctccaacacttaatatcgatgttgagaacgtcaacctcccgttattgattaaatccatctccgataaggtcttctactacttcgatttaagcttaatgcataatagtgagtatgctccgcaggtggtttattgtgagtccttgctaaagactttgacctttatgacctcgtgctataaaagttctgaattttcgaaagacgttttggatttcattgttaaaaagcatagcgtagctgtgttagatattcctaggaattcgatatttccaagatttgaaatctatttttacacaaataagctttttgaattacaattgaaggaaatgcaagttgaagcgcaagtaaatatctacgcaacaatggctgaagtctatcgtatcttaggatatgaaagaaagcagctgtttgtattgcggttgttaatggtggcccttttggcgactacgaataaaatcgcttggcactctgactacaggtcgttactcgataagattgttgaactattcagtattgacgaaagacgacctgaaaacaatgtaaatgacgcatctcaattcacttggttgattttacaaaaaaaaattttacaactctgcatcaaagtttcgcgaaagattgatgatttcgagtatgtcgccaaatttacctccatactggttaccagatatacgcatttattaagccgccctgaacaagaaacacttttaaaggactatatcgagccttcgattatgaacgagtctattacacgttactgggatccttttctcttgagggaaatgttttaa

SEQ ID NO: 3851 - DNA, 861 bp, Saccharomyces pastorianus
atgccttggaaacaacacgccaacaacaaacaggttgtccctgagtatgccgaaagcagttccaattatgttggtagacagttaccgaatattctaggcaagacacctttaaatgcatctggagtcggcaattcattacatttaatctctccaaatgtcagtttatcatctccaacgcctagaaatgcaactacaaatacaaattcaagtacttttagtacacctccggtactaaggatgagctctctggaccccggtggatctagagccgcaagccaagcaacgataaggccttctatgagtacaacatatcctgtcacctctaccactaatcgattaaaccagcccgaagaatctttagtctactcgtcacgtgagcaatacagagatatgcctcttcttcctgatatacctccgactttcagcaacgcacgtccaaatgctaaccagtttgccagttcatcggtatgtggtgctaccgtctttccaaacagcatgctgaatcagagaactaactctgtaccaatggcagatctaaacacaagaaatgacgtacgacagatctcgatgcccatacttccaaccctgccccccaacatttcaactcgagccaactctaacaagttggcgcctcccttaatagccaataatagcatcatttcacgttccagtcctcccattggtgcaagtgcaccgctacagaggtctaagcccatagtgaatccattcattccaagaaggccatatgttactgtactgccacaaaaaagacagctttctaatgcatctgcaacatcaaatgggcccataatgggaacatggaaaacacaggattatgaaaaaaaatccagcaacggttag

SEQ ID NO: 3852 - DNA, 1428 bp, Saccharomyces pastorianus
atgatacatctagaggactactgggatgatgagacccctgggcctgatagagaaccatccaacgagttgagaaatgaggtggaggagaccatcacgcaaatggagctgctcaaggtgtccgagctgaaggacatttgcaggtctgtatccttccccgtttctggtagaaaggccatcttgcaggatcttattaggaacttcctgcaaaacgccattgtagtgggtaagtcagatccttatagagtccaagccgttaaattcttgatagaacggatcaggaaaaatgagcccttacctgtttacaaagacctttggaatgccctaaggaagggcaccccagtgagtgccattactgtccgttccatggacggaacttccaccgcgcagcagcaatcatctgcagttataagacagtctcccacgcatcgacggacaacttccagtacagcttctacgtctcgtgcgccacctgcgaaccctcaggttactccttcggcttcttccccggtaccgacaatccatttcaaggaatcgccattctacaagatacagagactaattcccgaattggtaatgaaagtcgaaattactggtggtagaggtatgtgttctgcgaaattcaaactgtgcaaggcggactatgatttattgacaagcccggatagtaaatacaaactatatttgttttccgggatgataaatccagtgggctctcgaggtaacgaacccattcagttcccgttccccaacgaattgagattcaataatattcaaatcaaagataacataagaggcttcaagagtaagccaggtacggccaagcccgcagatttgactcctcatcttaagccctacacccagcaaaataatatagagctaatttacgcctttaccaccagagaatacaaattattcggttatatcgtggaaatgatcactccagaacaacttttagagaaggttttgcaaaatccgaagatcattaagcaagccacattgctttatttaaaaaaaacattcaaagaagatgaggaaatgggccttacgaccacatccacaattatgagtttgcaatgcccaatctcatacaccagaatgaaatacccttcaaaatcgatcaattgcaagcacttgcaatgctttgatggattatggtttctccattctcaactacaaatcccaacttggcaatgccccgtatgtcaaatcgacatagctttggaaaacttggcaatttctgaatttgtcgatgacattttgcgaagttgtgaggacaacgttgaacaggtggaactaacctccgatggcaaatggacggccattctagaagatgacgatgaggacgatagtgacggcgatggcggcgatagaaacgataccaactcgaagaaagacacttccgtgtctaaccatccttcagttcttcac

SEQ ID NO: 3853 - DNA, 342 bp, Saccharomyces pastorianus
atgctttgggtgagcactttttctgccttttccaacttgacattgttcaagttggccaaatattcaaagttatcgttgggctccaaggattccacttctactgtagttgagtcatcgtatatttcagtaacggcgcccttcttcaaaatgggcttcacgtcgttgccttctttgtcgccatcgacttcttcttcatcggaatcaaacccgtgccaggaatcgtcagactctaccttggcaccgtcaacatcacccttttttgcatcttctatctcggcctccaagttcaaactttctttaaacgtctttaactgctcttccattatctctttacgttcctga

SEQ ID NO: 3854 - DNA, 2586 bp, Saccharomyces pastorianus
atgccatacgctcatccacatgcagtgaaagaatcaatgaacggaatcgatgagaacataaagaatgacgaagatgtggctttcgagtacgaaattcaaaagacaccacagagcgtacttacgtggaaacgatacctccagtattgggaaaataacgggagaacagatgatcagattaggtggctatatgaaagattttgctcccaattttcaactgatacaagtatatgggaagaatatatacgatgggaatcgactagaaaagtaatcggagcctcacgtattttatcgctattccaaagatgtttaaaagagtgtgttcaagattgcgataagatatgtctgtcctatttggagttagcgatagaacaatgtgatttgacgacaataagggacgctatgaatttatctttaataagagtagataccaagatgcattcaaaagtttgggaacctgttttgcgattcatcacagaaaagtttttacttttaacacagttagattcgacgcaagaggaagatgaagaaaatgttgatgaagctgaattaataaatatacttttgacaaaaggtttcacaaaaataggctttatcagtgaagaaatagtggaaagtaaaagtataggtgatgtttggtcggcccaaattttagaaagatatctaagagtgacgccccagcaaaaacaacatgaagtcctgatgactctcgcgaaaacaagagataattctaccgtcaattcagtgtacaaaaaatatttaataaaagatagagatagtggcaagtattttcccaatccaaaattaacattttcgctaaatttcaactatttggtcaccctggaaaaactgggtttagatgagcaatacgaggaattcatgaatcagatgaaagttttatatgctgaaaactgggtctttttgactttgtcccttgccagacattacacttctcgtggtaggcttgaccaatgtgaagatttgctgcaaaaaagtttacaggaaacaatgaagtatactgactttgatcgtgtttacagtttctacctcctttttgagcaacaatgctctcaaattattttagaagagttaaaagacaatagccccaagtcctttaatcgagaagaatgggttgcaaaattacaacgccacatggcgacatttgaatctttagtaaattcacatgatatatacttgaatgatctagcattaaggcaagaccctcatgtggttgagacgtggatgaaaagagtggctttacaagaaacacctgcggcgaaatgtaatgtatatgcagaggccgtattgaagattgatcctctcaaagtaaacacgcccggttcttttggtaaactatggcgcctatatggagatctgtattgggataagaaggccactagtacagcaagggagttatgggcacaggctctgaaagtaccatttcctttcgttcaagatctggaagaaatttatttaaactgggctgagaaagaattagacaacgaaggaattgagagaacgatttgcatacttgaagatgcattaaaaataccgaaaattcccgatatcttaattgaaaagtttaatagcgggcgcaggagagtgcctgcccaaactgtaatattcaactcgctgcgcatctggtccaaatacattgattacctggaggcctattgtccaaaaggcgctacttcatccagcaaacagttcaataagacaaaagcagcatataacaatgttgttgatctgaggttgattactccagcaatggtggaaaattttgcaatgtttttacaaagtcatcaagaggtagtagatagctttcaggtatatgaaaaaacgatccccctgttcccacctgaaatccagtactacttatggattgagtacttggaagtagcaacctcccctcaattatcatctttaagtcctgaacacatcagatttttgttcgaagaagcgctgaatagtttatgttcgcatggcatagactgtaagacgatttttattgcgtacagtacttttgaagaaaggcaaagcagcttggtcaggaagagtattgaagtgttgcatcgaggtgctgtctcggatgctgtcagtatgaatacgcatcttgaaagtagactacaactgtggaaaatgtgtatctcgaaggccgtatctactatgggtccatcagtagccagagacttgtatcaagagtgtataaaggtcttgccgaactctaaggcagttgagtacgtgataaacttttcagaccttgaggcctctttgggagaaattgtacgagctagagaaattctggtttatggtgcagagcttctacctccatccagaaatacagaattatggaaccgatttgagattttcgagttgaaacacggcgacaaagaaacttacaaagatatgttaaagctgaaaaagctactggattctggcatggtaattgattcggaaagtgttagccaggcgaaaggtaacatcaacttcgtagcagctgcaaccacacatggaccaaattcgcgcggtacagttgaacaaggtaattcacaaccggttaacccagacgaaatagaactagatatatga

SEQ ID NO: 3855 - DNA, 2457 bp, Saccharomyces pastorianus
atggggaacaacccttccactcaggatccatcgcattcggccaagaaggaccatggttaccatctgcatgaagccttcaataaagatcgccaaggtagcataacttctcagctgtttaataatagaaaaagtattcataagaggcatgccagtcatgctaacaacgataatgccgctatccctcctagaatgcaattacttgcgtctcatccctcaacatcagattgtgatgatagtaccgataaggctgtttgtgtcgctagtgagccttcccttttattcaaaaaggattactcagtgaccaatgcagcagatgataacgagactacgttagccaatttgtctttaaatgatcgtcatgacgtaaatgctccggaagaacaagttaaatcaccatcctttttaagtcctggtccatcaatggccactgtaaagcaaactaagaactatccggacgatttgtcgaccgtgaacaataccatagttgatgaaacaattggggacgggcgaaaaggccatcctcatcatgagaggcatcgctcgagtatcattgcattgaagaaaactcttttggaaaattcggctactgattccccctctccgacaagatcatcatccgtacactctacatcgctaccacctctaagcaaagccggttctatcgatattcctattaagcaaacgtattcaaaaaaaccgtctgtccatgcataccagtatcagtaccttgatcctgacccgatattgtctgacgactcacaacttgacaaagaatcaaaaagtgataacatagatgctgaggcaggtgtactgcaaagtgaggatatggtcttaaatcaatctctattacaaaacgctctgaaaaaagacatgcaacgtctctcgagagtaaactcctctaactcaacgtatactatcgacagtacgacccaaaataataataaaaatagcaacaatagtagtaatagtgagaataatattggtaacaaggaaaattcaagcgattctaatgatgaatttgctgcacccatatctgccaccgcaaaaatgatgatgaaattgtatggtgacaaaactttgatggaaagagatttgaataaacatcaaaacaagtcattgaaaaaattgcagaataaaaaattaagatctgcttcaaattcaagaagatcatcgtttgcttctttgcattctttacaaccaagaaaaagtgtcctaacgaatagcttgaatctgcaacctttgcatccacttcatccaattattaacgacgatgacagccaatattccgtaccacagcatagggaaattcttcataattttaattcaatgtcaagcatgtcttcaatatcatcaacaaattcctctgaaagcaccttggtgattttaaaatggaaaaatgatagtaacatgcctgcaacaacagaagtctctataataagtcacgatattgcatctgctcttaaggaacagcgtgaggtcaatttggatgaggatgcaagtttagactcggaaaagcaattaaatccaaggatccgcatgatttatgatgttgtgcgtaaagaatggtttattccagagctttttttacctcccggcatttatagactacaattttccattaatggcatattgactcattcgaactttctacctacagctacaaattcagaaggtaaatttgtcaactggtttgaggttttgcctggttaccacacaatcgaaccatttagagatgaagcagacacggaatctcaggcgagttcgacaatagatgttgaagctcccataaggccggagcctaagcgattatcatcttcttctcgtaaatcttcatattattcggcaaagggtgttgaaaggccaagcacgccgttctcagattacagaggtctaagtaggtcgaactcggcaaatctgcgggattcgtttgttcgtttgaaggcaagcagtttggatttgatggcgcagataaagcctgaaattttggaatattcaaatgaaataccaagtttatttactataggtaatggttccgcaaagcctctacaagaaggtaagccatctgaggaccttccaagttttacgcataaggttattgactgcaatcaagatgatttgtttgccactttacaacaaggcggtaatattgacgcagaaacagcagaaactgtatttttaagtcgataccccatccctgacttgccaatatacttaaactcatcatatttaaacaaaattttaaatcagggcaatccaaattcagagtcaggtgataaggatgaaggcgcgataaaccatattatccctcacgtgaatttaaaccatttattgacaagcagcattagggatgaaatcatcagtgtggcttgtaccacaagatatgagggaaagtttattacccaagtaatttacgccccttgttattataaaacaccgaaagctcatggcaacaagtaa

SEQ ID NO: 3856 - DNA, 792 bp, Saccharomyces pastorianus
atgcccaacagccttcgcgaatctgaaaacaattcaaacaacccaatgatggaaattattagtcatattgaaaagacaggccattcattcgatgttatatacatttcttccgagatcttaatagaaaagtacacctctattcttgaggaccccattaatgagttattgcagttcttaaatgagtcattcaaagttctaaatttcaagaaattaaagtttttgcaatttaaaatattagagaggctaattatcgaaaaagaaacgaaactttcgagtctcactgagattgaaaaccaactgcagaagattaatgaaagtttaacgcggtcgactatattgacagatgaaaattacaaagatacaaaggctgctgacctgacatttgttaaaaaggacgtaagatcgctatcgaagtcaagttcaaattcaagctccagtggacaccaaaacgaaattcatataggcgcaagtaaactaaactatgaaacgtctacgccaacaatgaatctcaataaattagaaatcaaacaattgactgaacaagaaagatctaaacagatcaaacagttgaaccaagatttatccaaattgaaagattgtctatcaatctgtatatcagacatgctagaaattaacaattcgtcatacaacagcttaatgcatacatataaccatattaatttgaccattggaaagatcttgaaacttttcgcagctagcttcaaagcatggatcaaagaatgtctgaagaattggaaactggcaaagttacaaatcgacgaggccctataa

SEQ ID NO: 3857 - DNA, 129 bp, Saccharomyces pastorianus
atggacagacaatccttcaacttagttaaatcctgtgtcagttgtttaatctgtttagatctctcttgttctgttagttgtttgatttcaagtttgttcaaattcattgtgggtgtagatgttttgtag

SEQ ID NO: 3858 - DNA, 228 bp, Saccharomyces pastorianus
atgaggataataagagtagtatacccagtatttacaacttatattcacaaatacgtgtatatgtataaatgtgttatttatggtgcaacgccgggcgctaatgctcattataatgattggtcgatttgcgacttggctagtttccaattctctagacattctctgatccatgctttgaaattggttgtgaaaaattttaagatcttggcgatggtcaagtggatgtga

SEQ ID NO: 3859 - DNA, 711 bp, Saccharomyces pastorianus
atgaagttttttgtcacctcagactctgatgctcaagcgcaaatagttgaaagtcaaatctcaaaatttatgaagacacttccagatgacaaatgcttgctcagtggaccaaagacatctgcgtatcctcttatcaagtccgaaggtaaacccactttgatcaagtttccatttcaggtacattatacttcccaagctctatcgggtgttgcatacacacacaaagatggtgcagcattgcaagtcatgtcaaacatgctgacattcaaacatttgcaccgagaagtgagagagaagggtggtgcttacggtgggggtgcctcttatagcgcattggcaggtatttttagcttctattcctacagagatcctcagcctttgaatagcctggagactttcaaaaatagtggacaatatgtacttgatgatgccaaatggggtacgacagaccttgatgaggctaaattgacaatatttcagcaagttgacgcgcctacaagtcccaaaggagaaggtgtgacttattttatgtcgggtgttacggatgacatgaaacaagcaagaagagagcaacttttggacgtttctctcctagatgttcatagagtcaccgaaaaatacttgttaaacaaagaaggagtaagcactgtaatcgggcccggaattgagggcaagaccgtcttgccaaagtgggaagtcaaagaattgtaa

SEQ ID NO: 3860 - DNA, 1611 bp, Saccharomyces pastorianus
atgttgcgtttccagcggtttgcgtcttcatacgcacaagcgcaggcggttagaaagtacccagtgggtggtatactacatggctatgaagtaagaaggatattgcccgtcccagagctaagactgactgcagtagatctggtgcactcgcaaacaggtgccgaacatcttcacatcgacagagatgataagaataatgtctttagcatcgccttcaaaactaacccaccagatgctactggtgtgccccatatcttggagcatacgacgttgtgtggatctgtgaagtatcctgtgagggaccctttcttcaaaatgctgaataagtctttggcgaatttcatgaatgctatgacaggtcccgattatacatttttccccttttctactaccaatcctcaagattttattaatttaagaggggtttatttagattctacattgaatccactgctgaagcaagaagattttgatcaagagggttggagattagagcataacagcatcacggacccggaaagtgagattgttttcaaaggcgtggtttataatgaaatgaaaggtcaaatatccaatgcgaattactatttttggagtaagttccaacaggccatttatccctctttgaacaattctggtggggatcctatgaaaataacaaacttgaaatacaatgatctcttagacttccatcatagaaactaccatccctccaacgcaaagacctttacatacggtaatttaccattggtggacacactgaagtatttaaaccagcaattttccgggtatggaaagagggcacgcaagaataagttgcttttacctatcgaactaaacaaagacataaatatcaaattaccgggccaagtagatactatgctaccaccggagaaacaaataaagtcctcgatgacatggatttgtggtgctccacaaaatacgtatgagactttcttgttaaaagtattggggaatctattaatggacggtcactcttctgtgatgtaccaaaaactaatagaatcaggaatcggtttggaattctcagtaaattcaggagttgaaccaactacagcagtgaattttttaactgtaggtgtccagggggtgaacgacactcaactgttaaaaaataccgtagatcgaattttccaagaacttttagaagcagattgcccatttgaccgtaaacgcatcgatgccataattcagcaattagagctttctaagaaggatcaaaaggctgattttggtcttcagttactatattccgtgctacctggctggactaatggaatcgatccattcgagaacttattatttgatgaaattttgcaaagattcagaaatgacttgaaaactaagggtgatactttattccaggatttaatacgcaaatatgttactaataagccatgctttacgttttctattcaaggttctgaagacttttccaaatctttggaagatgaagaacaagcacggctaaaaaaaaaaaccgatacactagatgatcaagacaaaaagaacattttcaaacgcggtatactattacaagagaagcaaatgaaaaagaggacttatcatgtttaccgaccttacaaataa

SEQ ID NO: 3861 - DNA, 219 bp, Saccharomyces pastorianus
atggtggtagaagatggttatgaattctttaatgatagaagcctagtcacagtgttttccgccccaaactattgtggggagttcgataattggggggccgtcatgaccgttagtgaaggtctcctgtgctcttttgagttgttggatccattggatagcaccgcgttgaaacaagtcatgaagaagggcagacaagagcgtaaattagctaatcgttaa

SEQ ID NO: 3862 - DNA, 1149 bp, Saccharomyces pastorianus
atgattcaaatggagcctaagtccccgattctaaagaaccgcagaagtacccaatctacgagctcctttacgtattatgaaaatgcgttgaccgatgacgataatgaagacgacagcgaagaccctacgatggctaaagtgactcgtatcagcaccggttcatccgccgataaaaactataagcataccctctcgagacgccacaactctttgcaaccagaaaaagcgaagtctggctcttcgtcctcttcgtccagattgcgcagaagatctgacaatacgttaccttcaaactattcttcaaacatggagcccaatgggaacgctagcagttattctttgaacagatcgaactcgcatgcatcttccacccatagcaggaaatcgtcattcgggtcgacggggaatacagcttacagtacaccattgaattcaccagctctgaaaaagatgagctctaggaacaacgacaacagtaacgaagatgatgatgacgagtactcatcacccatccccaatctaaacatagacaagccttcgtcgtcgtcttcatcgtcgtctgcatcaagaagagaatatctaagtgcttatccaacactcgtacacagagactcatcatcctcacttagtccgcggggcaagggacaacggacgtcttcttcatctggatctagtcagagaatatatgtctcaccaccatctcctacggatgaacttgtgggtgaaagttttatagatggtgacgatgaatccaagacaaataccttgcttgaaatgaaaaggaaaaaaccgattcgtcccattgatatagatgaaatcattcaaaaactactggatgccggttatgctgcaaagagaaccaagaatgtttgcttgaaaaactctgaaattattcaaatttgtcataaagctcgtgaaatatttcttgctcaacctgcgcttttagaactgtccccctctgtgaagatagtgggtgacgttcacggtcaatatgccgatcttttgcgactcttcaccaagtgtggattcccgccaatggcaaactacttatttctgggcgattacgtggaccgtggtaagcagtcctggaaaccatcttgctattgttatgctataagatcaagtatcccgaaaattttttcctcttga

SEQ ID NO: 3863 - DNA, 1224 bp, Saccharomyces pastorianus
atgaaagttggaatgagtattctaggaatgtatataacgcaagaggtcagaaaggaagtacagatgtgcaaaaggattggtggagccaatcaaggcttaaggaggatgattattcgtgtgggtgtggatgtggattatatggtgggcgtgctgatgctggccgtggtggtagtgttttgggtaggtgcctcgtgcttgaccaacgaattactggagacgaatgcgtataataagcccttttttatcacatatctgaatatctcgtcatttgcgctttatttggtgcctgacctgtggaaaagaattcggtcgaaaaggaaggccttgcaggatcagagggatcaaatactacctgtttatacgcatgaatccttgcctgaatttttacccttggtgactgctgcttcctcatctttgtcttccccttcaacggaggacaaagcgaccaaggatactataaggctgagtctgctattctgtgtcttgtggttcgtagcaaatttggcaggtaattccgctttatcgtacacaacagtggcatcgtcgaccattctttcgtccacgtcttcatttttcactttatttcttgctgtgagtttgcaactagaaagtttctcgaaaaagaaattatcaggattgtttgtgtctttgtttggtatcatcctgattgtggtgcaatcttctaaagaaagagattctgttagtgcgtcttcctttttcataggcaacacactagcactacttggatcgttcggttatagtgtttatacgacacttttgaaatatgaggtatcatccaagggccttcaactggacatcaagttattcttgggttacgtcggtatcttcacgtttctgttgttttggccaatcttaatcattttggatctatcgcactgggaaacttttgagttgccaaataattctcacactttttttctggtcttgttaaattgtatcattattttcgttagtgattatttttggtgcaaagcggttattctgacatctcctttggtagttaccattggtttaactttcactattccattggctatgcttgctgattacctttggagaaacgcatcctttacctcttggtatatcgttggtgtttttttcatatttgtttcattttttttggttcacgatcaagaagagtctacaactgaaaataaccattctaccattgaaaaacaacaaaattcacgtcatacagcttga

SEQ ID NO: 3864 - DNA, 957 bp, Saccharomyces pastorianus
atgagtgaaatcggtaagcttgttgaatacagctgtctaatttttttaccgtcaccatatgcggaacaattgaaggaaaccattttgccagatttaaacgcagcgtttgataactctgataccgagggttttgtaaagacaattaactcatacaatgaacttattcgccaagtacctaggtcaagtataatcaatcatttagcgacaattgataagattcctcgttcatttatacatgattttttgcatattgtgtacacaagaagtattcatccacaggcgaaaaagttaagacactacaaggcgtttagtaattacgtttatggtgaacttctgcccaatttcttatctgatgtataccaacaatgcgggttgagaaaaggtgatactttcatggatctaggttcgggggtaggaaattgcgtagtacaagccgctttagaatacggatgcgaattaagctttggttgtgagatcatggaagatgcgagcgatttgactctattacaacatcaagaactaaagaaaaggtgcaagttgtttgggatgcatttaaacaacgtggagttttcattgaagagaagttttgtgaataatgaacgcgttagtgagataattcctctatgcgatgttattctcgtgaataactttttatttgatgaagaattgaataaagaagttgagaaaatattacaagcagcaaaggtcgggtgtaagatcataagtctaaaaaatttaagaagtttggcttatcagatcgatttttacaacattgaaaatattttcaatagattaaaggtacaaaagtatgatctggaagaagatagtgtttcatggacacatagtggtggggagtattatatatctaccgtgatggccgacgttgatgaaagtttgtttagccctaatgccagaggtagaaggaacaaaggaaccccagtgaagtatagtcgatga

SEQ ID NO: 3865 - DNA, 816 bp, Saccharomyces pastorianus
atgagtggccaggaaagcatatctaatggtaattccgactcatttgttatgtcgtcttccaacttaggctctcaggaatcttcaatatccccaggtgacctgatcaaagacagcaatgatcaagtaccgccaacttcacgctcgtcgaaaaactcatttctctccaagcaagtacaggagctactagaaggggctaataagtatgatccgaaatacgggctctccttacctagagggtttttaagagataggaaccgcaaatccaaggacactggattggtgcctcttgttgaaaaggttatacctcccatgcacaaaaaaaccagtgttagaagcatgaggaaaaaatcatctgcaactatgaagaaggatgtaaagaaagtagatactgtaagaaagaaaataagaaataaagtatcaaaaagaaatgatgagcatcttgtaattacaaaacaagaggtaaacgcttctcaaagaaagaatctctcaagaaaaaaagtttttattgagggcaaggaaaaggaagaaaataaacaaaagaaaatctcttcaacatttgtgaattggaatggtccctatttacagttaaagtacccattttttgatataaactatttgaggtcacacaatagttattccggaacccccataccatctgtcactctaaagactaattctccacagtcaacaagtctactttcggaacatgatattcgttcagcaacaaccgttaaactgcaaagcgttttgtttgctaattatatggaagagtacaagattgacttgacaagacggctgttatttatgatccaatga

SEQ ID NO: 3866 - DNA, 207 bp, Saccharomyces pastorianus
atggtttccagcaactgcgtgctgtcggagtgtgggcagttcaagaggttgaccgcgaacttgtcccaaacggtatcaccgtcacatttcttgaacttgactagtgctccgctcctaatggcacagcggtgctgtgaatgcgccagagggaacggatgttggaaaatcacaccgtgtatgtcttggtctacgtctcttatttcatag

SEQ ID NO: 3867 - DNA, 1821 bp, Saccharomyces pastorianus
atgccgctagcatccataccggacatttttataacaccaaatcctgtagtcacgatatcagaaaaggaacaagatgttttagatttgattgcagaacaagtggttacagattataatatcttgggtaatctcggcattccagagatctcatacaaaggtgtgagagattgtcaggaaggtctggtaaaatcaacgatgttacaattattttctagttttgatagattgaatgggaatgatacaattaccaaattttacaatatgaagcagccatatgtttttgtaaaaaagcatcacgaactaatcaaagttaagcacgattctcagcccttcataaaatttctaaattttcgtccaccaaatggcataaagaactttaaatttctattattgagttcgtctttcaaagaagattgtttatcattttcaccgactttatcacagacgtatatcaaccaagaattagggttttgtgagttgcttaaactaaccaatgaagatccgcccgggttaatatatttgaaatcatttgataagaataaattactattactagctgcgcaaatcgtctcatattgctccaataataaaaactcaattaaaaacgtaccgccaatagtgatcatattacccttagataaagccacactaagtgagctagtagacaaggcgaacctttttcaagtgattcggaacgaagtgtgtgccaagatgcctaacatcgagttatttttgaaagtagttcccatggactttatcaaaaacgcattagtgacggtggatcagtacgtcaatgtagccatttctatatataatatgctgccgccaaaatccattaagttcactcatattgcacatacactaccagaaaaggtgaatttcagaaccatgcagcaacaacagcaacaacagcagcaacagcaacaacaacagcaacaacagcagcaacaacagcagcagatacagaacagtagcacagggtcatcatcggtaatctattacgactcgtacatccatctagcatactcacgtagcgtggataaagaatgggtttttgctgctctttccgatagtaatggacaaggcagcatgaccaagacatggtatgtggggaactccagaggaaagttcgacgatgcgtgcaatcagatatggaacatggctttgaatttagcgtccaaaaaatacggcaaaatatgcctaattttgacaagattgaacggaatactcccagacgacgaactaatgaactggagaaggctatccggcagaaacatacacctggcggtggtgtgcgtggatgacaattccaagatctcgttcatagacgaggacaaactttaccctagtttcaagcccatctacaaagacgccaagttcgggggacatatggagatgtccaggctagatgactatgaaataagagacgtagaccaagacatacacggtgtgattttccaacatccgttccctctggcgcattcacagcaccgctgtgccattaggagcggagcactagtcaagttcaagaaatgtgacggtgataccgtttgggacaagttcgcggtcaacctcttgaactgcccacactccgacagcacgcagttgctggaaaccatcctggaagagttccgtaacctggccgccttggacgtatggtacggcctctctgatggcacggatggtcatattccatggcacatcctagcagtgaaaaagatgatgaacacgcttatccacaccagggttaagatcgctaacaccgccactatcacaaacaacaccgccagcctatcatctgccacgatcccggagaattag

SEQ ID NO: 3868 - DNA, 2262 bp, Saccharomyces pastorianus
atgagttctgacgcttccacgtatagacttgaggacgttctatccagcttttacagactagagaaggttacgaagatcaactatcaccagtatattcctaaaacgcagaatgaccaatggtctattcaaatagaatttctgttgcggaaacagaatcccaagaatctggtggcattgctttcaagagatttgtggtgttttagcataaatgatgatcctataccgacgcctcccatggtagaaaataagccggtaaacccagataaagtaggatcttttactgctgattattctaaaccaaacttgccgccccattatgccctatttttgaaggcgttacgaagaacaatctgcattagtttagcactaggctctcacaataagctaatacaatttggaaatgcctgtatatcgttgaacggagacccgagtcatcttatacagttagaaccccacctttttgttaatggtgaccttgcagtatccctatgtgctaagaacatgggtttactgcccatcaaagaggaaaatctagaagaatcatttcttcgaaagcacgcactctatctagcaccatcaggaataaggatgcatatagcgcctgcatccaagcaaggatatttgattcaaccgccaaagcataccggacttctcctgacgacattgagcgtatctcatggtatcaacttgcagaataaaaaaaacctgaaatgggtcgccgtcattcctgacttggggcatcttaatggtcatacacccactatagcctcatacctgaatccaccagtcgaaggtaagaaaatagtatggccattaagcttaatatatgctcaaccggtaatagatgtcgaaggttctacatctagtgatccttcagaatttcacagtttacaagatgcactggatgccattgatgactttatacagctaaaacaaacagctgcttatagaactccaggaagctcaggcgtattgagcagtaatatagcgggcaccaacccgttgagctcagaaggcgcatacacagaacagttccaacactataaaaacaattcgatcaactcacagcccgtttcctacccttctgtccaagaaactagcaaaacatcaccaaaagatatttctcccggtttcacgggtattgataaagtgatgctttcgccgagtgatcaatttgccccggctttcttgaacacgcctaataataatatcaataataatgagttgttcaatgatagaaaacagaccatagtgtccaatgaattagaaaatagtccgctgaagtccgagctggaggtaagtggcagatcattagaaaagataaacaatcccataagcaagacgggaagtgtggaagcaactactaataaagagagccttgtggaacaacaagaacaagttgaaaacctagcgagtgagaaaagtgattctatagtcgataaggaactgttcggtgaagacgaggatgaggatctatttggtgatagtaataaatcaaattctacaaatgagtccaacaaaagtatatccgacgaaattacagaagatatgttcgagatgtcggacgaggaagagagcattaatgggaaagacacaaacaacaataatagtagcatacataccggtcttggcaaggacatgccatttttcacgtctgagaaagccaatattcgtacaatgagtggaacaacaaaaaaatctaatgggaaaagaaaatatctggatattccgatagatgagatgactctacctacaagtccattatacatggatcctggtgcaccacttcccgtagaaacacctcgtgataggcgtagaagtgtttttgcaccattaaatttcaaccctataatagaaaataatgttgataataaatacaaatctggagggaaattttcatttagtcctttacaaaaagaggaagcattgaacttcgacgtttctatggcagacctatccagctctgaagaagaagaggatgaagaggaagagaatggtagcagtgatgaggacctcaaatcattgaatgtacgcgacgacatgaaactttctgacaacgttagcactagtaataatatccatgagccgcaatatatcaattattcgtccattccaagtttgcaagattctatcatgaaacaagacaatttcagttcaggaaacgaaggcagcaacgccggcaacaaggagggatttaattgtatttggaagatcccctcaaaacgatataccgcagacggagtctcccttgaagactgttga

SEQ ID NO: 3869 - DNA, 2052 bp, Saccharomyces pastorianus
atgccctataaaatactccggatgaaaaattcgctcgagacacgtaaatcagaagggatattactggcggatgaaagaaatagattaaggataggagagctgtatcgttacaagttttcggtgaataaaaatgagctcaaagaacaagggatagatgtatcgcaactattcgtgagaattaaaaacgaagaaagtcccctgctccggccagtgtatttgaccgggccgtattccttttacgttgatattagaccgcataattacaatgagaaccgcaggtttcgagggacagaggctattccgtttattgaaaacttgaaaccagacgaaaggtttaaagtaaagatattactgaatcgtaattccagagttggtagtagttctatttattcgtggactatagacattgtttcgcaattagcggtgaccacgatcccgaggttggaattcacttttagaataggaacgacaaggaaagtggtcaagaaaactaacggtccgtttaaaagtgttgaaggtgttgctttggagatatgggacactaaaactctttgggatttgccaccaaaatatccagaaaagcccgtacatctggttatagtgacacatgggatattcgccaatattgggtgcgatatgttatatatgaaggataaacttgaagaaatgacgttccccatggacgagtctattaatccaaatataattgttcgaggttgtatggataacgtgggcaaatctagtcatggtatacattgcttaggtgtaagagttggaaagtatgttcttgaaattgttgatgagttgaacaagaagtacagagtaaataaaatatcattcattgggcactccctggggggtccaacccaatctatggcaatccgctacataaccgtgaaaagaccagatttttttgacccagtgaaaggtgtcaaacccgttaattttattacgctagcgagtcccttcatcggtgtcattggtgattttcccttctatttgtctgttccacttgatatgggcgcccttgggttgacaggaagagacctaaatttgaaatatacacccttaacatccagagatgggttatataccgatgatgaagcatattcggaacgttcaaaatatatactagaaatccttccacaagcaccagctaaaaaaatatttgaagcctttaagagaagaacagtctatgccaatatcatggatgatggtattgttcccttaagaaccgctgcccttttgtatttagactggcgaggtatacataaagttcaaaaaattaggaaagagaataaaaagtcttcaaagtccaagggatacgaatcctcggtgacaccagagagtaaagaagtatcgccattatctaacgaaaatggccataatgttggggagattcctgcagaaagtcctaataagaaggcaaccttacaatggaccctaccacaggctgtcatacatggaggcaggataaataaatatacaagaggtcaaactaatgaggctgtctcggattcggatagtgaacaaggagtaaccactaatgatcaaaaattcgagcctccaaaagaagctaataccttattatccgcgttatcggtactgacagcgtctataccagatcaagaatatattaaaaaccctgccgtaaggaaagatgaaattgttcatgacaaactttatcatccagaagaattgcctcccttacattacgagaataggcccatagttaaaaagcttatatatcctaatgagagtatcaataggattcaagagcgtattgccagggaatggcaggaaacgatgacttggaggaaggtcttggtgcagatcaaaccagattcacataataatattatagtgagaagacgatttgtcaatctgtatggttacgttgccgtcgaacacatggttgagcaccatttcggtaccaaagtttgtagcgagcttgttgatgatccaaacgaaccaaaagatgaaccagaccagcctcgacagtcggaccagtcaaatgggcgcaacaagcctagcaaatcggaaaagtattga

SEQ ID NO: 3870 - DNA, 336 bp, Saccharomyces pastorianus
atggatttccaaaccaacaagagactttgtgatgaaatcgccactatccaatccaagagattgagaaacaagattgctggttacactacccatttgatgaagagaatccaaaagggtccagttagaggtatctctttcaaattgcaagaagaagaaagagaaagaaaggatcaatacgtcccagaagtctctgctttggacttgtctcgttctaacggtgttttgaacgtcgacaaccaaacttctgacttggttaaatctttgggtttgaaattgccattatctgtcatcaatgtttccgctcaaagagacagacgttacaaaaagagaacttaa

SEQ ID NO: 3871 - DNA, 624 bp, Saccharomyces pastorianus
atggattacagaaaattgcaagccattgataaaaaaagaagcaaagaagctaaagaattgtacaaccgaatcaaaccatttgctcgcgttatggctgcacaggattttgaagaatttagcaaggatatactggaagagctacaatgcaggacaaggatacagcaattacaagaatggagaagcaatggtttaacgacgttagaagcaggccttaaatacgatcgagataagcaagcaagaattagcacgtacgagaaatttggctcttctacgatggcatcattaaatgagggcagtagtcgttacagatcaaattccgcgcatagatcgaatgcagaatattctcagaattatagcgaaaatggtggcaggaagaaaaacatgactataagtgatattcagcatgcatctgactatgcattgttgtccaatgacgagcagcaactgtgtatacagctcaaaattttaccaaagccataccttgtaatcaaagaagtcgtgttcagggagttactaaagactggcggcaacctaagcaaaagcgcatgtagggaactactgaatatagatgcaattaaagcaaatagaatatacgatttttttcaaagtcaaaactggatgtaa

SEQ ID NO: 3872 - DNA, 1203 bp, Saccharomyces pastorianus
  modified_base (1180)..(1181): a, c, g, t, unknown, or other
atgtctaacaaattccattgtgatgtttgttcagctgattgcacgaacagagtaagagtgtcatgtgctatctgcccggaatacgacttatgtgtaccctgctattcacaaggctcatatacaggaaaccatcgcccttaccacgattatagaataatagaaaccaattcatatcctattctttgtcctgagtggggtgcagatgaagaactgcaattgatcaagggagcgcagactttagggctcggtaactggcaagatatcgctgagcatataggtagcagggacaaggaagaagttaaagagcattacctgaagtattatctggaaagcagttactatcctatacctgatattactcaaaacatacacgtaccgcaagacgaatttttagaacaacgaagacatagaattgaatcattcagggaaagaccgttagaaccccctaggaagcctatggcatcagttccgagctgtcacgaagttcaaggtttcatgcctggtagattggagtttgaaacagagtttgagaacgaagcagagggaccagtcaaagatatggtttttgaacccgatgatcagcctttggatattgaactaaagtttgccatcttggacatatataattctagattgtcaacaagagcagaaaagaaaaggttattgtttgatagccatttgatggattacagaaaattgcaagccattgataaaaaaagaagcaaagaagctaaagaattgtacaaccgaatcaaaccatttgctcgcgttatggctgcacaggattttgaagaatttagcaaggatatactggaagagctacaatgcaggacaaggatacagcaattacaagaatggagaagcaatggtttaacgacgttagaagcaggccttaaatacgatcgagataagcaagcaagaattagcacgtacgagaaatttggctcttctacgatggcatcattaaatgagggcagtagtcgttacagatcaaattccgcgcatagatcgaatgcagaatattctcagaattatagcgaaaatggtggcaggaagaaaaacatgactataagtgatattcagcatgcatctgactatgcattgttgtccaatgacgagcagcaactgtgtatacagctcaaaattttaccaaagccataccttgtaatcaaagaagtcnngtgttcagggaaaagttactaa

SEQ ID NO: 3873 - DNA, 435 bp, Saccharomyces pastorianus
atgaatttggtttcccacctaaatttggcttttttatacagtttgttgaacactaacgttgacggtaacatcaagatcgtctacgccttgactaccatcaagggtgttggccgtcgttactccaacttggtctgtaagaaggccgatgttgatttacaaaagagagctggtgaattgacccaagaagaattggaaagaattgtccaaatcatgcaaaacccaactcactacaaaatcccagcttggttcttgaaccgtcaaaacgacattactgacggtaaggactaccacactttggctaacaacgtcgaatctaagttgagagacgatttggaaagattaaagaagatcagagctcaccgtggtatcagacacttctggggtttacgtgttagaggtcagcacaccaagaccactggtagaagaagaacttaa

SEQ ID NO: 3874 - DNA, 249 bp, Saccharomyces pastorianus
gcatgctgcaggtcgactctagaggatcccgctagatttttgtttgtcgctccaccatcgatcgacgatttgagaaagagactggagggcagaggtactgaaaccgaagaatccatctccaagagattaagcgccgctgaagctgaattagcatacgccaaaactggcgctcatgaaaaaatcatcgttaacgaggacttggacagggcctacaaggaattgaaggacttcatcttcgctgaaaactaa

SEQ ID NO: 3875 - DNA, 171 bp, Saccharomyces pastorianus
atgtcccgtcctattgttatttccggtccaagcggtacaggtaaatctaccttattgaagaaactatttgctgagtacccaaaatccttcggatttagtgtttcgtccactaccagagctccaagagccggtgaggtcaacggaaaagactacaactttgttggactctag

SEQ ID NO: 3876 - DNA, 225 bp, Saccharomyces pastorianus
atgatgcataaggcccatgaagagaacatttcttcagtaacagggcttatatcaacatcgggatcacctgttatgggatcatcgacatccggtagatcaggggaaggaagaagttcatcatcgtcatcagaatcaacggccctcttagcggtggtcagcagcaccttgaatgctatatttagcaacaccttagataacatatttccatataatatagtgtgctaa

SEQ ID NO: 3877 - DNA, 810 bp, Saccharomyces pastorianus
atgaatatcgaatgtgaaccgggctatgagcttagaagttctgttttagaaacgtacggtattgttcccttctcgaagtattgcgttaaggatgaaagtaaagaaaaggaagttgacgagttggtttggaaagtaagtgaatacctaagaaagaagaatggacaagtggactgtgggaaaggagagaacctatttgaaagtggtgaaacagagaataacctgtatgatatattttctaattcaagaccgtcatgggaaaatcagaaagaatttaatgaacactggaaaaatgtagttgatatactaaaaaacaacgaagaaattgtttggttgccgttggactttgaaatggacaaagaaggtcgtctgcaatcgaaggatgctacttatgtttttcgttcaacttccaaaaggcgcgtcaaactgcaatgccatttgggagcggatattcaggaggggctaaagaagtacggtggttctgtattgatcgccctgagtgttttttttttcatcaagaaagtgcaatcaacgcttaatgattatgtccagggagaacaggtgattgaaaaattggtaaaagaggccattgatcagttaaaaaatgtcaaaaacgacgaagaagaggaatcatttttaacaacagtccaactgagaactatactattgagcggtgtacccaaaatgaaagaacaaaatagcctatgggctcaaactaaagacaagattattaaagaacagtctgaaaatattgaattataccttctagaagaaaatggggaaatcatgacatgttgggaatggaaggattga

SEQ ID NO: 3878 - DNA, 735 bp, Saccharomyces pastorianus
atggagcacacaagccttgatccgaaaactttgaaagtaagccaactaagaagaatactggtggaaaatgacgttacattttcagcgaatgctaggaagcccgccttagtgaaactatttgaagaaaatgttagagagcgtttggaatcttcttctggaactccaaagggtaaagacagtgtcaggaaagctgtgaagtcagaaatgaagaatgcagatcgcaaaaagtccttgaagaataaaaagcaagaatcaagctctgatgcgagtaaaaatgttgaaaccaacaaaaggaagagggaggaaagcagtaaagatgattcaaacccaccacgggtgaaagaagagaaatcttctaaaaagaaaagaaagaagagggctaataaggtcactaaaccgttagagcctctttccaaacctaagctagaaagtgaagaacctttagtaactttatcctccgaaatggaagtccgggaggaacacaaaggaacccctctaggtgaaaatccagtagccgagaagtttgcaaggccagaattacctaatttgaaagtgtcgaacgaatttttagtgcaactaaacaaagagttggcaagtgcgaccaccgagagctatgaccactccataaaatcagctgatctgtcatctattagagcggaaagagaagaacattttaatatttcaactgaaacagagccaaaaagcgaaggtgatccgatatggcaataccgatag

SEQ ID NO: 3879 - DNA, 621 bp, Saccharomyces pastorianus
atgatatacaaactagatcatgggattgatgtggtgaagactgaagagaagctacgtacttacgaagagttgaacaagcagctgatcatgaataatttggagagaagcaaaaccgagatggaaagttttgagcaaagacaaaaatttgaaaaggaaatgaagttgaaaaaacgactgttggaaaggcaaatcgaggaggaggaaaggatgaacaaggagtgggccaagaaggaaattgtcaacaggctgagtacgtccacacaggacgttaacgaaacgatcgagggcgtcaagaatacggtcaagttgaaaaaatcttccgccagaaggaaactggaagaactgaacagggtgctcaagaacaacccgtacttcaattcaaacatgaacgtgcagaactcgagactcaaagacgccgtaccattcacgccgtttaacggtgatagagacatacacccaaggttcaacttgaaggggtcagtgtacaacgacccgttcatcaaggacctcgagcacaggaaggagtttgttgcgtccgggttcaacactaattacgcgtacgaaagggttttgacggaggcattcatgggtcttggatgtgttatatccgaagaactttaa

SEQ ID NO: 3880 - DNA, 387 bp, Saccharomyces pastorianus
atgcttatggatgagtatgaggaaaacaaggacatgtgtccgatctgtaaaacagatcgatacctgtcgccagatgtgaagtttctagtgaatcctgagtgctaccacaggatctgtgagtcatgcgtggaccgaatatttagtctgggtcctgcccagtgtccgtataaagggtgtgacaagatccttagaaagaataaattcaagactcagatattcgatgatgtggaggtcgagaaagaggtcgacatcaggaaaagagtgttcaatgtatttaacaaaaccatggacgattttaatggagaccttgctgaatttaaaaagtatttggaagaggtggaagacattatatacaaactagatcgacagctgatccgcctaagccat

SEQ ID NO: 3881 - DNA, 2625 bp, Saccharomyces pastorianus
atggtgctacgagatcatgattcagagttgcggaactcctacaagcacgtaaggctctttgttcggcccgaccaactggaaggtacagcggacgtgacggggaagctggacgaggacagggccaacaatgacgataagcgcagcttggcgtccatactggactccagctcttcgctgaaaaagaaggggaggagcaccggatacataccatgtgtgtccttcaacaccgtgcccaggtctaaggtttcttcacccctggatgaagacaagagagattttccaggcgtacaagtccctgcagactacacgatggaggaatactacgatgacgagagtggctacgcctccgataacaacactgactatttttccgggaagagctacactggcggctcttccagtcgggagagcagtagttccagccccggcaggtacagttcgccgccacctgcctccatgaagaacatcaaaataggcaagatgttcaagatttcagaaaacgggaggatcgtgagggaggactaccccaccaggcccacggatatcaacgatgcgctcgtgatcaatagagcgtatgcgaattggcgacaactctgggctaagaagaaagaacagatcgatcatcggatagagcaaaaaaacgaatttttcaattacccaacaatacttttcaccccaagcaagaaaaagccctcgaaaggtggtggtgctaatgcaatcaaattcaatcctcccctcgaggatgggtttacgcccttgaccaaatctcaaaagaggaaagagcgtgtgctgagcgaaaatgttgggttccccaatactcctcgaacaattctttgccttattagcggtaggaagcacacctgggtagccctggactgggcgctacggaccctggtccagaatacggaccacattgtggtgttggctaacctgcctcgcctaacaagacacgaccttgggaacggtgactcgatgagtgagcgcaagagaatgctgatgatgatggacgacagcagaagcattgagtctgccacgaggtctaggtccaggtcgagatccaggtccatgtgcacacgaagagcaatgtctctgggcccgcaggactccgataacaagttgaaacaccaaagttttatggaatggacctccggttatacagaaaatgaaatagaacataaacttcaggacttgtttgactacattacactcgtgattcctaaagaccgttccgtcaaagtcaccgtagaaattctgattgggaagaccaagaaaacgctgttggaggccattaacatctacctaccggacttcttcgtgtccagcactttgagatggcaaagaacggatagtcttgttcgttggaagtcaaaccttttgacggataagctgtgcaccaacttcccgattcccacttttattgttccggcgaagagaatggcagaactggaattggatttacaaaggcagtttgcagatccagaggtagtaaaaaataaggacaagaccatttcgaaacctagcttgcttcattccaagtcagcagatgcgagtatcccgactacttcaaattttaaacaggctacaagcaacgactattctatagactcggtgggtgataccgctgatagtagtggtgctgatagtaaccgaaaagggacctcaaatgatgagcctgatgtatccaataatgacgatgttttatccgtgaagtccctaacttctaatgtttcagtaaaggaaaaactacgtgccatggccagaaatcgtagggaaagtatgacgcagcgattgggtgacgctgaccatgattcttctatacctccgggacaaaggcacctgaaaaaattagacatcatcttggaatcttcgctcaagttttcgttagaagtcgaaactattactgatgacactggaagtgaagatgcagacgctaatgggccacaagccatcgactcagggtttgaagaattgaaaagggtcatcactggtggtgctccgcccaaacacgtcgccacccaaaagagatccatgcttgacgttttagacggtcccagtacgcctgggtccaaatccaaatcaagatcaaggtctaaatcgagaacaagagagaaatcgaaaccaaattcccccattgccacggatatataccccgatacaaacgcttctagatctcgttcctcgcaaatcaagttcgcatccactgtaaaagacgcggatggccacgctgcgttaggaagtttcaagtctaagctctcaccggataacacaggcgactcgcaacatcatcatcatcaccatcgcgacgcggatcaagtggtcatgccggcgttcccagaattggccccttcgaagtcgtacagtgtaagttcaagtaacaaggaaccgtctttgaggaaagtgagtagtggatctacgctaagaaaagtaaaatccaatgattcaagctccgctaaacaacggaggaagacgcctgtgaattcaacttacttgagccctaattctggcggtggtggcttattctcgtttttcaaaggtaaatcgagatcatcttcgcctttgagaagtcagagtgagggcaaagaggcatccaagcgtagcggattatttggatttagaaaactatga

SEQ ID NO: 3882 - DNA, 1029 bp, Saccharomyces pastorianus
atggccgaaagccgcggacggaatctctacggatgcaggccggggccctatacgtggcacataaagggaaggctagaagctatgacccattgcacaagcgagaatgcatcgctggattggggcctgagtcggccgtattgtgatgctgctgcttttcttgccctgccctgccttgccctgccctgtcttgccctgtacgtcttctcagcgcccggaatgctctgttcgtttataattactcgcgcttacgacaaagtgcacacctttatttgcagggactatataaaggtggaggtttatatcggcgaggcaggccgtgttcggatctcgagcatcacacaagcgcacgcaagcatgtgggattccttaatcgtgagcatcaacgagacgcacaaactgggcctgcaggactgcctggccgtttttggccacgtcccgatcaccaaggccgtcaagcacgtgaaactgatggatatcgacacgcagacgtccacgttcacgctgaggtttcttcacacggagaccggccagcacatcgagaagatcgtgtacttcatcgacaacgactcgggcaacgacacccgcaccgctgccgggatcaagcagattttcgacagaatgttccgcatcgctgcagagaagagacacctttccccagtccaggtggccaccgtcgagtacccctgcaccctggtcgactggcttatcctcgtgggcgtcacgctaccagcgctgtgctacctgcatcgcccggcactacactgcatcttcagcctggtcccgaacccggtgggcgctaccttggagacgtggctggacagcgaccgcgtgctgctactgatcatccttgctgagttcgtaacccatgccctggagacggtcttcttcatcgttcccagactcaagtactaccgtgtgcccggtgagttcgtacccgagtggctccttctgggccttctggagggctacggccccgccaggcgcctcgacgcacaggctcgcgctcttggcgaagggtctgttgcctag

SEQ ID NO: 3883 - DNA, 1416 bp, Saccharomyces pastorianus
atgatgacggataccctggtagagaagataatcaagatggcattgccgccttcttccaagacggcggttgacaccattcaaaatcgtatggttgctggtaaagagaggcccaagctgtctgtacaaatcatgagtagaaatttcattcagatgaattcaagattaggggtaccttttatgattatggatgaaatcataaagattttgaactggactaacccagcgtacacgatatccataatgtgcttgtacacctttattatcctgagacccttccaaatgctctcgtgcattccaattttctatttattatttggtgtgatggtcccgcaatacctttatattcataaaccaaacccaacaccgtatttggataataaccccacacccgcacagggtcctcccttgcggaagcccgaagttcccaaaccagttcctgaactgagccaagagtttgttttgaatctaacagacttacaaaaccacatgctattatatgtgaaattttacgactttacgctgttcttcttgcaaaagtttgcattctttaccaatgaggcaatctcgtcgttctattttgtcgtgctgctaataattgctacggtaaattttctttacatggacaagttaatcatgcttgttccgattagacctgttttaatactctttggttggtgtttttttattgcctcaaatccatccaatcgagagtatctactaactaaattaaactcagaggatacacgattgaaaaccttgactttgacgtcaaatgtagaatctaaaattctggaacatttgaagctcattgagggtagggagcaccgattggtaattgtttttgagatccagaaatatctgcctgcctataaagagtggcgcccggttggattttctgatgacgactatgctcttttctctgatctaagaatttaccaaaagcctattgaagagaactcagtgaagtctcaagatcatataaagccaccaaaagattgggagtgggactcgaattctcactgggtgcttgatttggaccctaaggagtgggtggaagacgaattcattcagtatgtagagatagactcagagacaaaatgggtatatgacctgaatcttgatggacagagaggttcatatagaaggagaatgtggacaaatagttgcgttagacaaaaattggattctaatatctcagcgagtctcggcgaagaggagatcgtcaaccccttaagagaagaaacatacaggcaaggcgttcatggcgtaaccaaaggctcaatgagcggcggtttaactcatgcaagcgatgatgatgatacagatgggaccattcctgacctgggtcgtgctgacgctgacgcgtcttatccatcaattgaagaactcacagatacccttaattccaccatatag

SEQ ID NO: 3884 - DNA, 708 bp, Saccharomyces pastorianus
atgcctttcaagcagtggaaccattccctgaagaggaaaatggttcctccagcgctaaacctttccagcataccatcatcctcacaaatgcaggcatccaaaagtgctccaccaaacgtaacaagatttccgcaccagcaaatcaaccctagagttagatatatgggtagaatagctgctgcaatccaggagtgtccatctccaataatagcgaatccgtacgtggtggctccgcatccatatgctgggctgtcatcggtaccttactatccatatattccaaccccaacgcatacccacccatacccatgcgaaggttactatccttcactctaccctacccccatgcatgataataccatgacatcctccaacaaccaaggaaagaggagaaaacacacaaggaggtcatcgaatttaaatgatttgacttcgaggaaaaagaacttcatttctaagcaacgtaccggggataacgtcaatagtgaaggtgatagagagacagaaagccccgttgcgaaacaggtactgggcgaagacgtggcacttaacgacgatatgcaccattgtaacgctaatgagagggtcattgcgggagaaatcaatctgcatgacgatgtctttaaattcgaagttcataatgataaagacgaatacatgaagacatgtgaaagaatctggaatgaatggcaaaacttgaaaaagtga

SEQ ID NO: 3885 - DNA, 207 bp, Saccharomyces pastorianus
atgaacaagcaggtagaagggggcccgcagcgagagcaaaggacaactattcaggcgccaagtgagagctctgagccaaatccctgcaaggtaaagcaactaggaatgatgctggtatctccagggctggacgaagatagattgagcgagagaatgatcttgaagatcagaaatcaaaggatatcgaaaaagaccaaaaactactga

SEQ ID NO: 3886 - DNA, 2433 bp, Saccharomyces pastorianus
atgagctttgaagacagtgatgatgatgacgacttagggtctggaaccgagtttattatgcaatcaagatcgagaaggtctaatgctggtaataaattgcaaaagttactacagcaggaattaaaagatatagaatcaaccaaaagacagctctcgtcgtacaacaacggcgaagatgatgatgaggacgaaatcggattattatttcaggaagatgaagacgatcaagattttgaaattgtagagaaagacgacaacgaagagggagaagaagaggaggaggatgaggatgaggcggaaagcataacgaagggacccaccaagacttcaagtgatcaagccgccgatgatttaatgttcagtagtagtgaatcagagggttctaataatgacgaggatgatgatgacgcggaggaaagagaaatacgaaaacaagagctactgtcaagaaagaaaagaaacaagaaactacaaaagggacccgtaatagtcaaaaagcagaaatccaaagttgaacctgcacgagaacaagctacaaaaggacaaacaccacgaagatcacaccataaccatgaacaattgaatgctgaaaccttattgtcaaacacaagaagaacttctaagagatcttctgtcatggaaaatacaatgaaagtttatgagaaattgtctaaagctgaaaaaaagaggaaagtcatacaagaaagaattagaaaacacaaagaacaagaagccaagtatattttaactcaggcggaaaggctaagaattgctaaagaaactgaaaagctaaatattctgtcgttagacaagttcaaagaacaggaaatctggaaaaaagaaaatcgactagctttacaaaaaagacaaaaactaaaatttcaaccaaatgaaaccatacttcagttcttatccactgcgtggttaatgacgccactgatggaattagacgatcgcaaatattggcaagaacaattgagtaagcgtgacaaaaagaagaagaaatatccaagaaaacccaagaaaaccctcggctccaaccagccagatgcaccagatgctaagaaaggggtaagtgaagtatcggtaaaggaggaagacaataccaaccgtgctgtagagaaatcttcgaatgacaaacaaacaacgaccacgggaggcgaaatcccttctactaacgaaaaggttgttgaagaaacgctaacagaggcacccataccaacagcgccatctgaagaaccaacaacaagctcaacaccagaaataacactagatgcaaccacaggcaagcaagccacaaatgatgtgaccactaacaacctgccagaagaagacatagtggacactgtggatataatcacaagcgccaacgacacacagactaaagatacaacgatggacgacttaacgaataccttaagaaataaagagacgggtcctacagattcatcccgtgatgacaaaacagcatttcaaaacgaaaatgaattgcttacatctccacaacggcacggtactcccactgaagacgctgagttgacctctaaggattttaacgctgaaaatgagattttgctcagtgtcaaacacgaaaataccaagaattcgtctgttagcccctcacatgatagtgattctggaagcaacactttaaagcaagttacattcacggattctccccaggtggccatcattgacactgaggagtcaccttcaaaaacaaataccactaacatggatagctcgtccaccgaaaatcccttaccaacgccagtatacgaaggtccagaacagttgacttccagaaattttgtcacaatttatgatttccccaatacgccaccgaacttgaaggattttgatacaaacttatttggttctcagtggtctcatatgaacgccacatccacaacgcagagatcacaggatatacagaccatttttcactctattttaccctcaccatctcagttatcagtaccgtcctcctctaatgtgggcatatcgcatgatttatcagcgctagccaattttccatcttttggtgaatacgataaaaaaatcattcatgaaataaacacagagacaaataaggatttggagattaagatcaaaacgcagcctccaactggtgtcttcttggccaatggtataagaaaaaaatgtctgatcacaaataaagaatgtcagtacttcgatccaagaactggtgtgccatattctgatgtggaagcttataagattattcaacaaattcaggatcccatccctaaggaagaggaaacaacagataccaaacgcgatgaaaccataaacgatgatactgccgaagctgctgatcatgcaagatttaaatggtttggattcaagaatggtggtatttatcttgatttaaatcaaaggcccgccaagggtgttcctaaggggttttga

SEQ ID NO: 3887 - DNA, 687 bp, Saccharomyces pastorianus
atgaacagaatattcggatacgggaacaaaaagagccatgaccagctcttgcaagagtccaaccaatccatgaatcaggctcagcaatcgttatcgaacaggatatctcagttagatactcaaattgcccagctgaacttccaactgcaaaatatccagaaaagtctacagagatcaaataacaagcaaccttcgttgcggaaacaggctctgaagatcctgaacaaacgtaaacagttggaaaatatgaaagattcactggattcgcaatcttggtccatgacgcaggcccagatgaccaatgataacttgcaaaacaccatgatcacgataaacgctctcaagcaaaccaacaacgccatgaaggctcaatacggcaagatagacatagacaagttacaagacatgcaagatgaaatgctggacctaatagaacaaggcgatgaactgcaagaagtcctggcaatgaacaacaacggcgagctcgatgacatcagcgatgcagaactggatgcagagctggatgctctggctcaagaagacttcactttgcaaaccaccgaaagttcattgggtaatgatatgcctaactacttgctaggcgctaacgcaccaccaaatttcatcgatgaagagccaaacatggatgctgaaaataaagataaagctttagaaagcgcccagtaa

SEQ ID NO: 3888 - DNA, 123 bp, Saccharomyces pastorianus
atgaacagaatattcggatacgggaaccaaaagagccatgaccagctcttgcaagagtccaatcaatccatgaatcaggctcagcaatcgttatcgaacaggatatctcagttagatactcaa

SEQ ID NO: 3889 - DNA, 567 bp, Saccharomyces pastorianus
atggacgatgccagtcgtgagaacgaaggtgatctgatttgcgctgctgaaaacgtcagcaccgagcaaatggccttccttgtacgtcactcttcgggctatgtgtgtgctcccatgaccaatgtcattgctgataaattggaccttccattactaagaacgggcatgaagttcgagtccaacgacgacgacaggcacgggaccgcgtacacgataaccgtagatgtcgcccaggacaccactacaggtatctctgctcacgacagatcgacgacgtgcagggccctggccaaccctggctccacgcccaagtcattcttgaagccgggccacatctgccccttgagagccgctgacggtggtgtcctacagagaagaggccacactgaggccggtgtggacttgtgtaaactaagcgggctaagtccagtcgccgtcatcggagaactggtcaacgacgacgaccagggcaccatgatgagactaaacgattgtcaagaattcggcaagaaacacggcattcctttgatttctatcgaagagctggcccaatatctgaagaagtaa

SEQ ID NO: 3890 - DNA, 93 bp, Saccharomyces pastorianus
atgatgagactaaacgattgtcaagaattcggcaagaaacacggcattcctttgatttctatcgaagagctggcccaatatctgaagaagtaa

SEQ ID NO: 3891 - DNA, 1092 bp, Saccharomyces pastorianus
atgcaatgggccatggtaagcgagagcgtgcaactcgacagcggctgcgagcgcgtcgcacaggaatacgacccggccaaggggatcctggtcgttgcgtacgtgcggttaccgcccgcagcgcggcggtacgccagcgacgagacggtgtggtctgtggtgaacgtcgtgaagtgcgacagcgccaacggccgcaacggccagttggtggaccttgtggagtttcgcggcacacgggtgatgagcgctacgattctgcgccgcgagcaccacgagagccaggtggtatccattctgctgactacctttacgggcaagactacgctgtacgagctcagactgaagcagaagtacgaggctcccgccgcgtacgtcgtgcagcggaacatgatcagcagacactacttccagcatccagtggtggccgtgctcgagacgagcagcgtacggggccaagagagagtgttggtggcggcggacgacggcaccgttgcggagctgagctgtctggacctgtccgtgctgcgggcgccccggcggctccggcctgtgcctctgtcgcggctgctggcgctggatgacgagagtagtgcgtatttgcagcggctgaagcggctggcaaagttcgacgaggtgggcgtggccagtgtggcgtacacgcgcgaggacccacagcacgtgtgggtgggcgcggaggatggcggcatctacaaggtcgtgtgggaccagccgggaccgctgtgcctggcgctggacaacaacgggttccaacccgcggattgccactctgcaagggtcactgggatggcgttctgccaggacgatgctcggcggctaatgctgttgctgtcatgttcaacggactggaccgtgcggctgtgggacgtgcgggccggggaagcagctgcgggcgcgccgctgcagttgggcgcgcccgtacttcgtgtgcgctggcttggcgttggcggcattgtcgacggtggtggtcgctcgctacgattcacggtgtggtgtgcggacgggcgtcacgtggtcgcggagtgggcgtttgattcggagtcctccctttacacggcggtggttatctcctaa

SEQ ID NO: 3892 - DNA, 192 bp, Saccharomyces pastorianus
atggagcgactgaaggaactagaggagaaaagaaggcaattgaaggaattgcgtgaaaggcggaaacatgccagcgtgctgagcagcgagacggtgttggcggcgagcggccggcggccagcaacgccaacgccaacgccaacgccaaccatggtgagcgtttctgtgcagactgacatggaagaggctgga

SEQ ID NO: 3893 - DNA, 444 bp, Saccharomyces pastorianus
ccctccgtagatcgtatcggtggcgtcaaggtgagctggttgactggtagaagatcatgtcgatgctacgtggtgcttcttccgtcggtggtggtgccttctccggtaaggattactccaagggtcgatcgttctgctgcttatgccgctagatgggttgctaaatctttagttgccgctggtttgtgtaagagagttcaagttcaattttcttatgctatcggtatcgctgaaccattgtccttgcatgtggacacctatggtacagctactaaatctgatgatgaaatcattgctatcattaagaagaatttcgacttgagaccaggtgtcttagtgaaagaattggatttggctagaccaatttacttgccaactgcttcttatggtcatttcaccaaccaagaatattcctgggaaaagccaaagaaattggacatttaa

SEQ ID NO: 3894 - DNA, 993 bp, Saccharomyces pastorianus
atgtctaaaagcaaaacctttttatttacttctgagtccgtcggtgaaggtcacccagacaagatttgtgaccaagtctccgatgctgtcttggatgcttgtttggaacaagatccatactctaaggtcgcttgtgaaactgctgccaagactggtatgattatggtttttggtgaaattaccactaaggctaagttggattaccaacaaattgtcagagacaccatcaagaagattggttacgatgattctgccaagggtttcgattacaagacttgtaatgttttggttgctattgaacagcaatctccagatattgctcaaggtttacattatgaacagaacttggaggatttaggtgccggtgaccaaggtatcatgtttggttacgctactgatgaaactccagaaggtttaccattgaccattctattggcccacaaattgaatatggctatggctgacgctagaagagacggttccattccatggttgagaccagacacaaagacccaggtcacagttgaatacgaagacgacaatggtagatgggttccaaagagaatagataccgttgttatctctgctcaacatgctgatgaaatttccaccgctgatttgagaactcaactacaaacagacatcgtcgaaaaggtcattcctaaagacatgttagacgaaaacacgaagtacttcatccaaccctccggtagattcgttatcggtggccctcaaggtgatgctggtttgactggtagaaagatcattgtcgatgcctacggtggtgcttcttccgtcggtggtggtgccttctccggtaaggattactccaaggtcgatcgttctgctgcttatgccgctagatgggttgctaaatctttagttgccgctggtttgtgtaagagagttcaagttcaattttcttatgctatcggtatcgctgaaccttgtccttgcatgtggaccctatggtacagtataaatctgatatga

SEQ ID NO: 3895 - DNA, 486 bp, Saccharomyces pastorianus
atgcacactagtctattgtgcttgatgttgataataagcatcaatgctgccgtaacgggtgccttaaaattgattatagggaatctgaggcccgattttgttgatagatgtatgcctgaccttcaaaaaataagcgattcagactcttctgtttttgggttggatatttgcaaacaaacaaacaaatgggttctctacgaagggttgaaaagcacgccgagtggacattcaagttttatagtatctaccatgggctttacgtatctttggcaaaaggcgtttaccacccgcaccacaagaagttacatttggtgcccactactggcgctagtagttatggtctcaagagttgttgaccacagacatcactggtacgatgttgtgtctggcgctgtactagcatttatagtaatttatggttgctggaaatggacattcgtcaatgcggcgaaaagagacattcttccttcaccagtgagtttgtag

SEQ ID NO: 3896 - DNA, 342 bp, Saccharomyces pastorianus
atggtcaggatggatgagaaacataaggaatacttcaggctgtactactttcagtatatgataacgggcctctgtacgatattattcctctattcagagatatctttggttcctagaggccaaaatatccaattcagtcttgatgaccccactatctcaaagcgctatgtgactaacgaactagtgggcccattgggctgcttgattttgagtgtcgggcttagtaatttagttgttttttggagctgtatgttcgacaaggatcaattaaaaaagaataagtacgtggctcagggagaggccagacggcatctcaaaggatttccacttcatgcacactag

SEQ ID NO: 3897 - DNA, 1830 bp, Saccharomyces pastorianus
atgaagaacaatcatccaaatatgtttcgattattgatattagtattggcactggcaagatttataaaggccactgaaggaggtagaacacatgttatagaatttaacgtggctagcaagtatacacctgataaaagaagaatcatctctataaacggccacaatggtacatttggaccggaaattcgggttaaagctggagatacgcttaatctgaaattggtcaattggatatgttcagaacaagaagctggccaagaggatgctatctggagacattactgttctaccgctttacatttccacggggttgtacccctgcggaacgaatatgatgggattcctgacttaacacagcctaccattggctacggggagagttactggtataactttaccatcgataaatcaacttgtggtactttttggtaccattcacattcatcggtgcaatacggcgatggattgaggggcgcgatgataattgaatgcgacgaatatgatagccatgtagtgaaggctgtaagttctgtaaataaagctgggccattacctaatggtatgctcgagatgaacaggcagataaaccgtaaagaatttgcaaaacatgaagtgcaagaagaaattataactatgagtgattggtacacggattggaatctgaacattttaaaaaatagagttatgtcgcttagtggaggcacggatcccaaactcagtggctcgctaataaatgggaaatcttctaacaatgaagccatcaaattgggggtagatgccaagtatttgttattgaggatcataaactctggaatgtccggtactcaagttttccatcttgatgaacaccaattgataatattagaaactgacggtattctgattaatccgtttgttgtagaaacgttgactttggcggttggacaaagatatacaattttagtgagactaaaggaagacttgaatcccattcgtatggttaacggttgtaataagatgatgggctatgtaaccaaacagtggtggttttacagggatagcgctcatctggatccgtcacagagctccggtgacgtttccatcaagaatttgcccggttttaccaaaacagaattatatcgcgatttggaaccaacagaacaagagagtaaaaagttgggtttcgagtctgaatctagtgggttttttgattttgactatgaatattacaaagacgaagagacgaaacaaaagtatggaactggtatgtacaaagtaaacggtcgaacctttaatgaatatattgaagagccggtaaacttacccgaaatcaacgagacatatgacgtgataatcaattctattgaccatatgagacatccatggcatatgcatggtcatcatttccaagtaatttctctcggatctgggggtgaggggccgcttcacaaacaagtgcaagaaggtaaggcatgggaccagtaccagaacgacttgcgtcattgggcccaaacaggaaaggcaccgatggtaagagatagcatcaacatcgccggaaactcttacgcggtgttaagaattaagacagaactgccaggtaaatggcttttacattgtcacgtagactggcatatgatgaagggtctcggcattgtctttgaagtgccagaattgacgggtgatggtgccaaactcgcaaccacacttccattgtcattcccaaccaaggaaccgagcccctctgctgttgttcaacacatgccagatcacccaaacaagaccaaggtaattgccgtttatatcctaattatgtgtgcagttgatggcgccttttactggctgctcatgtaa

SEQ ID NO: 3898 - DNA, 570 bp, Saccharomyces pastorianus
atgcgatatctcgggccccttcgcaaaaggggcccgccgcactttcttcatggatctttcgtatataaaggtccagagcgccaagtaaagctgctctccctccatcggctcacaaattccaactaccatcctgtattaatggaaactaatttttctttcgactcaaatttaatcgttattgtcattatcacgttgtttgccaccagaattatcgctaaaagatttttatctaccccaaaaatggtatctcaagaaacaattgcacacgtaaaggacttgattggccaaaaggaggtcttcgttgcggcgaagacatactgtccttactgtaaagccacattgtccaccttgttccaggaattgaacgttcctaaatccaaagccgttgttttggagttggacgaaatgagcaatggttcagaaatccaggatgctctcgaagaaatttccggccaaagaactgtaccaaacgtttacatcaatggtaagcacatcggtggaaacagcgatttggaagctttgaagaaaaacggtaaattggctgaattattgaaaccggttttcgaataa

SEQ ID NO: 3899 - DNA, 1269 bp, Saccharomyces pastorianus
atgggcttgtgcagcaagagcaagcgcaagtgcaagggtaagagcaagtgtaagtgtaagtgcaaccgcctcagcgagagaaaagatacagcgagcgccgttatgtttaggatagccaaaaatttggtcagaacctttgagcagagcgtgcaggataccctggcgttctcgcaggattcgggcagcctggatgcgttcttccagtccatacctccaaacctgctgtctgcgcagctggcgccgcccgcagaggccatggcagagggtggtaagcacaccaacatgaatgagacccttgccgggttgcgcatcgtctgggtggacgaggtgcagtgccaagtgcagtcctttttcgactatatagtgggcttcaatgatgatccggtgcccgtggtcagtaaccagcacgggttttcctatccggattaccagcagatcacgtccatgttcaacgggcactgcggccggaccgtgaaggttaacgtgtggtctgcgaaggggggcacgttcagagacgagtatctcagcgtggcgtccaaggacagcgatcatttggacgacgtgtctttgaaccacgacgaaaggaagtcttccagcggagaggcgcatcagttccaagcgctcgggttcaaagtccaatggactcctctgatagcgtccactttcacctaccacatcttgaacgtaaacattcctgagggacccgcccagttagcagggctcgtcccggacgaagactacatcatcggctgtcaggacggcctgttggccacggggggtgagacgctcttgcaagatattgtcaggtctagagcgaaccacgacctggtcctgtacgtttacaacaaggtctccgactgtgtgaggcccgtctccgtgcacataggccccgacggaaggctgggttgcaatgttggttacgggttcctccacaggatccccaccgtcaagcaacaacaacaacaacaacaacaacaacaacaacaacaacagcaacacccacagcaagtacagccaatacagccagtgcagcagcagcagcaggacggcgatgcggtcccttttccaacagaatcagaatccgctttcgtcccatctgcattcaccgccccaccggttgtcaagaagaaagcaaagaataagaaggctactcagccattggtcatggacgactacttcaatgaaggtagagacaagtcatctgctccaaaaccaacagagtctgagttgcccgctccaccgccgcaaagacaaccctcatctgattaa

SEQ ID NO: 3900 - DNA, 1410 bp, Saccharomyces pastorianus
atgttgaattgtttaaatacaatcttaggatttttaatcttagttttgcagttgattaacccttcaacagcaaaaaactttaataatgacctgaatattttagatcacaacattgtattggtaaatacaaatgcaaccgttcctaaaaaggaaaaaactaactttgaaacgattaacccaacaaaggatacaaaaatagatgatgcttgtaagaagagcttctattatatcgaaaatgctgccaatctaattgacttgcaagctaaatgttggaaggtcatgggaaacatcgagatttcaagcaactttagtggttcaatggttgatttaggtctaataaaagagatcgaaggtgatctgatcgttaagaataataaacatgtttttaggattcaaggttacaacttagaatctttaagaaaactagagctagaaagtttaaccgcttttgtgtccttggacctacccgttttgaaagaagtcagtactattgactggaaagttttgccaattttaagtagtgttgtcatcaacggaaatatcaaaaaggtaaaaagcatagtaatatctgacacagcactgacgtctattgattacttcaataatgtcaacgaagtagatattttcaatattaacaacaacagattcttagaatctttgtttaccaaactagaaagtgttactaaacaactaactgttcactctaatgctagagagctggaacttgatttgagtagtttacacacagttgaaaacatgacagttaaagacgtctcaaagattaatgtcgctaagcttgcatcagtcaacagttccctggagttcatcgagaatcaattttcaagcttggaactcccacttttgaccaaggttcaaggaactttgggtctaatagataataaaaacttgaaaaaggtaaacttctcaaatgtcaccgacattcaaggggggctgatgattgccaataacaccgagttgattaaaattgatttcttccccaagcttagacagattggtggcgctatctattttgaaggtagctttcaaaaaatagatttcccagaattaaagttggtgaaaggcagcgcctacattaagagttcatctgatgaattaaattgtgaagaatttactactccaaaacatggccgttcaatcataagaggtggtaaaattgaatgcacttctggtatgaaaagaaaaatgttaagcgttgacgaagatgggaacgtgttaggcaaacaggaatcgagcagtgaaccaggaaaaaaggaaaagggaaaaaacaacactaagagccaaggcggttcaaaaaagatggagaatagtgctccaaaagatatctttgttgatatattcaagacctcggtttacactgtattaacaatattatttgcaattgttttctga

SEQ ID NO: 3901 - DNA, 1455 bp, Saccharomyces pastorianus
atgtcaattaaagcaagaacccctccatcaaaactgtactccattcaatcatgtattggtagaggtaacttcggtgatgtttataaagcaatggatagaaccactcaggaaattgtggcaatcaaagtagttaacctagagcattctgatgaagacatcgaactgttggcacaagaaatatttttccttgcggagttaaaatctccacttattaccaactatattactacaatgttggaggatgtctctatgtggattgttatggaatattgtggtggtggatcatgttcagatttgttgaagcgaaattatgtcaatgggttaccagaagaaaaagtttcgttcattattcatcaagtcactttgggtttgaaatatctacatgaacaaaggaaaattcatcgcgatattaaagcggctaatatcttactaaacgaagaaggcatggttaagttgggagattttggagtaagtggccacatccgttccaccatgaaaagggatacctttgttggaacaccttactggatggctccagaagttgtttgttgcgaagttgatgggtataatgaaaaggctgacatatggtccctaggaattaccacctatgaactacttaaaggcttgccgccattatctaaatacgatccgatgaaagttatgactaacctaccaaagaggaaacctccaaaacttcaaggttctttctcggatgcagcaaaggagtttgttgctggatgtcttgttaaagctcccgctgataggccatctgcatatgacttgttatcgtttgaatttattagaaacgttaccataacgaatttgaaaagtgatgttgaattgattaaacaaaagaaggttcaagagagatatacaaaaattccgaaataccctcttcagaatcgtctatataaaaatagtaacaccttgagggggaaagacttttggaattttgaatccaccaggataactgccatacaaacttctaagagtgaactatcccccattacacaggattctccagtttcatccctgaatatggagagcccttacttacatgggcaaactgtgacacccatcacaaacccaaactcttcgtcatttagaaaatgcaataaacctgtctttgagctggattcaggaatggatatagattcaggttgtccacatttacaaacagaaatcgaaatgataacgccttctaatcataacaaaaagcataagaaaaacgatattcaagcgttaaagatagaaaagtttgattatttggagaatattgtgtctcatattctcaatagaatgtacgatcgtgcgcgtgatgatgaaacaagaaaatacgtagacgaaatgctaaagcaattcatcaaaacagaagcaaacgttcccggttttaatgaggtgtttattgaagaaatatcgctcaggattgaagcaataaggaaaggtttcgtttaa

SEQ ID NO: 3902 - DNA, 129 bp, Saccharomyces pastorianus
atggttttagtcaaggacaaagagacactagaaaaactcaccgaagagccttccctggccgacagatcattattcgaatgtgactttcccagtacggccggccagaaaccgactgaatacgactactag

SEQ ID NO: 3903 - DNA, 618 bp, Saccharomyces pastorianus
atgaaatcttccccttccttagcttctaagccgagggctagaaagggtgatgataagagaatcgataacccttttgccaatccagataaagaactagttgtgataaacgatgtaaatgatgacggagagtataagctacttttgaataagttctcggtagtccctggacatattcttctagtgacaaatgggtttaaagatcggctttcagctttgacaccggttgatttaatgactgcttacaaagtactctgttcgctcgatagcgatgaagatagcgacacttctgagaacagacatttggctttttataactgtgggcctcatagcggtttctcccaaaatcacaaacatatacaaattatgcaagtgcccaagaggtttatcccttttcagggcaccttgtgtaatggcaaggaccattttttgcccacttttaactcagagccgctacaagacgatatagttttctttgcgcattttgttttgccaattccagaatcatctaatatggtcgacgaggatcttttagccatgtgttatatctctttggtgcaaagagcacttacgtttttccaagattggaaggatgaagctccgggtctgagtaagtcgtaa

SEQ ID NO: 3904 - DNA, 129 bp, Saccharomyces pastorianus
atggagggtgaggacttaaagcagaaagctcacgacacgtttgctgcagccgaaaagaacagacactggaaactaactaatacagaaccaaagaatttaatggatccgctaaaggcaattcaatactaa

SEQ ID NO: 3905 - DNA, 144 bp, Saccharomyces pastorianus
atgaacactttgagctacgctattaatttctggtcccaaggatcaaaacaggcgttcttcctcaaacacgaaggctacctgggtgctatgggtgctttcttaagcacatcttgtcatccagccactgatacgactgatacgtaa

SEQ ID NO: 3906 - DNA, 954 bp, Saccharomyces pastorianus
atgccgcggattactcaagagatatcgtacaactgtgactatgccgacaacactttcaaacttgccatcgatataggtggtactttagccaaagtggtcttctctcctataggcagtaacaggttgatgttttacaccattgaaaccgagaagattgacaagtttatggagcttttacattttataatcaagaaatacaacaatgggagccactcaatgactcatataattgccactggtgggggcgcctttaagttttacgatttgttaaataaaaactttcctcagatcaaaggcatatcaagatttgaagagatggaaggcttgattcagggtttggatttctttattcatgaaatccccgacgaagtttttacctataacgatcaagatggcgaaataataatacccaccagtaccggttccacgaactcaaagcccatatatccctatcttttagtcaatattggttccggggtttctatattaaaggttacccatccaaacaacttcagtagaataggtggctcttccttgggagggggaactctctggggtcttttatcattaatcaccggtgctcaaagttatgacgaaatgcttaattgggctcaagaaggtgataattctagcattgatatgttagtaggagatatttatggaactggctatagtaagattggcttaaagtcctctgctattgcaagttcctttggtaaagttttccagaatagaattgcttccaacaaatctttgcctaataacgataacgagtcgtgttgctcacatgagtcgatcgagaagaataacgggcaaatgcttaaaaaccccgacatatgtaaaagccttctatttgcaatttcaaacaacattggacaaatagcctatttgcaagctaaagttcacaatgtacaaaatatatacttcggtggatcttatgctagaggtcattga

SEQ ID NO: 3907 - DNA, 330 bp, Saccharomyces pastorianus
atgttctaccttcaatttacgagcaattgcgtaaacctgatagtaagtacaagttattggccgtttgtgttgctggttggttcccgttatctgaccggtaaggacatgaatggtaagccattcgaaattgaggaccccatggcaccaatcctacaaaaagccgccgttaaaggtggttccgatcctcacgaattgttaagtatcgattgcctctttggtcctgagctacgtgataacaaggagtttgttgctcaattaacacactcacttaaggccgtttacaataagggaccaattgccgccgtgaaagaagttcttgaccaagtgtaa

SEQ ID NO: 3908 - DNA, 1278 bp, Saccharomyces pastorianus
atgactaaaacaggagaaacaacagctaccagcttgaatgctaaaaccctcaagagtttccaatcgactctaccggtaccaacttaccccagagaaggtgtcaaacaaggtatcgtccatctaggtgttggtgcattccaccgttcccatttggctgtctttatgcagcgtctaatgcaggaacacaacgtcaaggactggtccatctgtggggttggtttaatgaaagcggacgctcttatgcgtgatgccatggacgcccaagactgcctttacacgcttgtggagcgcggtatcaaggacaccaacgcctacattgttggttccattacggcctacatgtacgcaccagatgaaccaaaggctgtcattgcaaaaatggcccatcctgacacacacatcgtgtctcttaccgtcacagagaacggttactatcacaatgaggccacacactcgttgatggccgatgatgccgcaattatcaacgatttgaatcacccagaaagaccggacactatttacggatatctgtatgaagctttgttgctacgttacaaggcaggtggtcatcctttcactatcatgtcgtgtgataacatgccacagaacggtatcacactcaaggccatgcttgttgagtttgccaaattgaaggatccaaaatttgccgcttggatcgctgacaaggtgactgctcctaacagtatggttgaccgtgtgacaccacgttgcactgacgtcgagcgtaaatttgttgccgacacatatggaattcaagataaatgtcctgtcgtagccgagcctttcatccagtgggtgcttgaagacaacttctctgacggccgtcctccttgggaactcgttggtgtgcaggttgtcaaagacgtggagtcttatgaattgatgaagctacgtttacttaacggtggtcactcggccatgggatatctgggatacctagctggctacacctatatccatgaggttgtgaacgaccctactatcaataagtatatccgtgtcctaatgcacgaggaagtgattccattgttgcctaaagtaccaggtgtcgattttgaagaatacactgcttcagtgttggaaagattttccaatccagccattcaggatactgtctcccgtatttgtttgatgggttcgggtaaaatgcccaagtatgttctaccttcaatttacgagcaattgcgtaaacctgatagtaagtacaagttattggccgtttgtgttgctggttggttcccgttatctgaccggtaa

SEQ ID NO: 3909 - DNA, 1722 bp, Saccharomyces pastorianus
atgtctagcacacaatcatctgttgaaaacagttccgatattcggaatattcccgctgttgacgttcatgtcgcaacgcctgtagaaaaagaatggtctgatgactttgataatgatgaagtccttcacggagggcaattagaaccaccaaagagaggatttttgggatacctgactatctatttactttgtattcctatctctttcggagggtttttacctggctgggatagtggtatcactgccggtttcattaacatggacaattttaaaatgaacttcggatcttacaagcacagtaccggagagtactatttgagtaacgtgcgtatgggtcttttggttgcaatgttcagtatagggtgcgctataggtggccttatgtttgcgcgtctggctgatactttaggcagaagactagcaattgtgatagtggtgttggtgtatattgtaggtgcaatcatccaaatcagttcaagccacaaatggtaccagtattttgtcggtaaaatcatatacggtttaggcgctggtggctgctccgtgttgtgtccaatgcttctgtctgaaatagctcccaaggatctgagaggtggacttatttcattgtaccaattgaacatgacctttgggattttcctaggttactgtagcgtttacggaacacgtaaatacgacaataccgcacaatggagaatacctattgggttatgctttttatgggccctaattatcatcattggtatgttaatggttccagagtcaccaagatatctaatcgaatccgaaagacacgaggaggcacgtacttccattgccaagataaacaaggtttcaccagaagatccatgggtatatggtgaagcggaagaaattatcgcaggtgtgcttgctcaaagggcacaaggggaggcctcgtggaaggagcttttttcagtgaaaaccaaagttttccaacgtttggttaccgggatacttgtgcaaacgttcttgcaacttactggtgaaaactactttttcttctacggaactaccattttcaagtctgttggacttacagatgggttcgaaacctcaatcgttctgggtacagtgaatttcttctctactatcctcgctgttatggttgtagacaaaattggtcgtcgtaaatgtctcctattcggagcagccgggatgatggcctgtatggtcatatttgcaagtattggggtgaaatgtctttacccccatggcgatgacggtccctcttccaagggagcaggtaatgctatgatcgtttttacctgtttcttcatattttgttttgctacaacatgggcacctgtcgcttatatcgttgttgccgagtcgttcccctcaaagcttaaatctagagctatgtcgatttcaactgcgttcaactggttatggcagtttttgattggtttctttacaccatttatcactggatctatcaatttctattacggttacgtgttcgtgggatgcttggtcgctatgtttttctacatcttctttttcttgccagaaacaattgggttgtctttggaggaaattcagcaattgtatgaagaaggtgtaaaaccatggaagtctgcatcttgggttccaccctcaagaaggggtgacacctcagaagaagcccaggttgaaaagaaagactggaagaagtttttcaagttctcgaaggggtctttcaacttgcactcttcaccttag

SEQ ID NO: 3910 - DNA, 486 bp, Saccharomyces pastorianus
atggcaagtaaagaatctaaaaagatgacgaatgatcgaatcgtagttaaggccattgagccaagagacgaagaagattggaacaaactgtgggtagagtatcaaggtttccaaaaaatcgttatgcctttggagatagccaggactactttcgcaaggttcttggacccccaagtcaagctttggggggcaattgccatcgacaccgagactggcaataccattggtttcacacattacttgagccacttgaccgcgtggcaagttgaggaggttatctacatgaatgacttatatgtcaccgagaacgccaggatcaaaggtgtagggaggaagcttatagagtttgtatataagcatgcggatgagctcggcacgtcttcagtatactgggtgacggaccacttcaaccaccgcgcccaattgttgtacaccaaagtagcttacaagacggaaaaagtcgtttacaagagagttgaacactga

SEQ ID NO: 3911 - DNA, 1863 bp, Saccharomyces pastorianus
atgcagagctacttccaagggtttgtgcccattcataccatattttactctgtgttccatcccacagaagggtctaagatcaagtacgagtttcccccgaataacctgaaaagtcatggtatcaatttcaacacaatcaaaaattacatcataccgaagccgatactatgccacaagctgatcactttcaagtacggtacgtataggatcgtatgctatcccgtgaccatcaactccccgatatacgctaggaattttttcagttttaactttgtattcgtgttcccatatgattgtgagacgtctccatacgagccagctatcactagactgggcaaaatgttcaaggtcctggaagagcagaatcaactgctgtccaagtcagaaagagatcctgtttttttcgacttaaaggcaatggaaaactcctcattaacgccctctacagctggtcctccggcgacgtcgaaccctagcagcaacactacaccaacgcatcccacctctgacaaggacgcgaaggatctaagaggcaacaggttcaatggcgaaaagtacaatgacataatcaaaaatttgggacttccggagtccacattttccatacaagatttgctgatgagaatctttcaggacctaaataactactccgaatgcctcataccaatagacgatggtaatgcagtagacataaagattttccctctattgagaccgcctacaacctgtgtttcattggaagacgtgcccctgtcgtctgtaaacttgaagaaaatcatcgatgttaactgggatccaaccatgatgggcatagtcccatatatcgatggtctaaacagcattgcgaaaatctcaaaactcagtcacagtgatccaagtctggtaatcgaatgtatacggcatctcatatactataaatgtgtcacattgtcagatattttccagttttcaaacatatacgccccttcttcattgattagaaattttttaaccgatccattaatggccactgactgtcagtcctatgtcacgtttccggaaatttctaaactatcaaatctacccttgaacaagaattttgactccgttgatcaagatttaacgtcattttctgtgcgaaggaaatctaagtcctctagtgtaccttcaaacgtgaactcccgaactacctcatttagttcgatcagtaaagtttctcaaaattcgtcgttgaattcctctttttcatcagtttctaaagattggaggcattcacagacctcctgctcgagcacaaacatgcatggtatcaacaaccgaaatcaatttttaccgacaagatcgtgcttgtttgacctgtatatatctctctcgcagggccaaacgttaaaatcgtggtatgagttgaaatttacaacttttaaagaaaacaacattgatataagaaggtttataacctttggcttagaaagaagtatcatatacagatgctactccttccctataatgctacatgtcggcttacgtgatacaaaggaaatgacacctattactacaaaagaatcttcaaatgaggataagttactcaagaaaacagattataatcattccttatccgtcactggttctaaaagcacgacgcaaaccaataatcagaaatcggaaagaccatcaaaagtttcatttgatatgcagagagcgaattctttggcaactggtaaatataagatacccaaactcagtgacgaggaaaaaaaaatacttgaaaattcagtaagaagtgctgagaattttgataagatatgcgtcttattaggcaaatctaaacaagaagtggagaactatttaagcgaaatgggagagttcagggtgatcaatagctaa

SEQ ID NO: 3912 - DNA, 3012 bp, Saccharomyces pastorianus
atgccagcggaaaatcaaaatactattcaagagaggagctccaataacatcagtaacaacgttaatactcagattggatgccatggtgttcctaatgaagagttgaacatcacggtggtagtgaggtgcaggggaagaaatgaaagggaaattggtatgaaaagctccgtagtggtgaatgtccccgatatcacgggttccgaagaagtttccatcaatactacgggggacacaggcattacagctcaaatgaacgccaagagatatacagtcgacaaagtttttggccccagcgcttcccaagatctgattttcgatgaagtggcaggccctttattccaagatttcatcaaaggttacaattgtaccgtattagtatacggtatgacatccacgggtaaaacttacaccatgacaggtgacgaaaaactatataacggtgaattgagcgatgctgcgggaattataccgagagttcttttgaagttgtttgacacgctggagttacaacaaaatgactatgtggtaaaatgctcatttatcgaactgtacaatgaagaattaaaggacctactagataacaacagcaataactccagcaataatgctttcgaaggtccttttatgaaaaagttgaggatttttgattcaagtactgccaataacaccaccagcaacagcgctagcagttccagaagtaattccagaaatagttctccacgcgcattgaatgatttgacacctaaagctgctctactaaggaaaagattaagaacaaaatcactgcccaatactatcaagcaacaacatcagcaacaacatcagcaacaaacgataaattctagaaacaactcctcctctaattccggttctacgaataataacattcctggtaacaccaacacaaataatagccaaagaagctcgatggctccaaatgaccaatcgaatggcatatacattcaaaatttgcaagagtttcacataactaatgccatggaaggtttgaacctattgcaaagaggtttgaaacataggcaggtggcttccaccaaaatgaatgacttttcgagtagatcgcataccattttcacaattactttgtataagaagcaccaggatgaattattcaggatatcaaaaatgaatctggtggatttagcaggttcagaaaatattaaccgatctggagcactgaaccaacgtgccaaagaagctggttcaattaaccaaagcctgcttacgctgggaagagtgatcaatgcacttgctgacaaaagcggtcatatcccattccgtgaatcaaaattgacacgtttgctccaagactcacttggtggtaatacaaagactgcattaatcgctacaatatcgcccgcaaaggtgacctccgaagaaacttgcagtacactggagtatgcatcaaaggctaaaaacatcaagaacaaaccacaactgggtgctttcataatgaaagatattctagttaaaaacattactatggaactcgctaaaattaagtccgatcttctttctacgaaatctaaagaaggaatatatatgagccaggaccattacaagaatctgaatagtgatttagaaagctacaaaaatgaagtacaagaatgcaaaagagatatcgaaagtctatcatccaaaaattcattgctattaaaagataaattgaagtctaaagacacaattcaatctcaaaattcccaaatggaatcattaaaggtcacgatcaatcaattaaaggcccagctagataaacaacataaaacagaactagagatatctggcttcaataataaactacagaagctaactgaaataatgcaattagccctacaagattataaaagaagagaactcgaccttaataagaaatttgaaacgcacattagcaaagagatcaaaactttaaaaacaactttgttttcacaattaagtggtatggaacagaaaaatatctcccaagaaactaatatccagcctaatcttgatataatcaaaaatgaagttctgactttaatggaaaccatgcaagaaaaggcagagttaatgtacaaagactgcgtgaagaaaatcctaaatgagtctccaaagtttttcaatgtcatcgtagaaaaaattgacataataagggttgattttcagagattttataataatatagcggaggatctttctgacataagtgaagaaaataacaatctaaaacagtatttgaaaaaccatttcttcaaaaataatcaccaagaactactaaatcatcatatagactccacttatgaaaatatcgaaaagaaaacaagtgagttcgtcgaaaatttcaaaaatactctaaatgaccacctagaggaaaataagaaattaataatgcaaaacctaacgaacgcgactagtgccgttattaatcaagagatggatttattcgaaccaaagagagttaaatgggaaaattcgttcgatctgataaataagtgcgactccatgaataacgaattctataataacatggccaccacattatctcaaattaaaagtacagttgacacatcgtcaaattcaatgaataaatctatttctgtcatgaaagggcaagtggaagaatccgagaatgctgtatctcttctaaaaaacaacaagaaattcaatgatcaatttaaacaattagttgacaagcacacaatattaaaggacaatatcgagaattcaatcacgtcaactcactctcatataacaaatgtagacgacatttacgatacaattgaaaacataatgaagaactatggtaataaggaaaacgctgccaaaaatgagatgatcgataacatcctaaaggaaataccaagcctaagtaagagaataccgttaagactctcaaacacaaatgggaattcagcgcaaaatatactatccccaaaaaaacatgcaattgatgacgaaaatccatctaacaaaattacagacggagaagaagccaggaaaatactaaagacagaatag

SEQ ID NO: 3913 - DNA, 1731 bp, Saccharomyces pastorianus
atgatttcagcagtgagaccaaagtgcaaggaatcagggcacaattcgcagcgctttgagatgaagatcgattacgaccaattgcgcaaactctatgaggatacgtgctgcaccaagaacctgcagtacagctacggcacggccgggttccggaccctggccaaggatctggacacggtgatgttcaccacgggcatcttggccgtgctcaggtcgctgaagctccagggccaatacgtgggggtcatgatcacggcatcgcacaacccgtaccaggacaacggggtcaagatcgtggaaccggacggatcgatgctgctggccgcttgggagccgtatgctatgcagttggccaatgccgcctcgttcgctaccacttttgacgagttctacgccgagttggtcaaattggtcgagcacgagaagatcgatttggatactagtgccgtcgcgccgcacgtcgtggtcggcagggactccagggaaagcagtccctttttgctgcgttgcttgacgtccaccatggccagcgtcttccacgcgcaggtcgtggacctgggctgtgtcaccacgccccagttgcactatgttaccaacttgtccaacagacgccagcgcgaggacggccatgcgacagtggccacggaacaagactactattcgttcttcgtcgaagccttcaacgagctcttcaccacgtaccaaatcgagaaaaggctctctgtccccaaactgtttgttgacacggccaatggtattggtggcccacaattgaagaaactgctggcctccaaagactgggctgtaccatcggacgaaatcgaaattgtcaatgacaaatccgatgttccagaattgctgaatttcgagtgcggtgcagattatgtaaagaccaaccagagattgcccaagggtctttctccatcatcccctgactcgctgtattgctccttcgacggtgacgctgacagggtcgtgttttattatgtcgaccctgaatcaaagttccatctgttggacggtgacaagatatccacgttgtttgcgaaattcttgtcccaacaactggaactggccaatttgacagattctctgaagattggcgtggtgcaaaccgcatacgcgaacgggagctccaccacctacatcgaagacgcgctacattgtcccgtgtcgtgtaccaagacaggcgtcaagcatctgcatcacgaggctgcaactcagtatgatatcggtatttatttcgaggctaatggacatggtacgatcattttcagcgagaagtttcatcaaaccatcgagtcccagttgtccaagtcacaaggtaatttgttggctttaaacactttaaattgttttgctaaactgattaaccagaccgtgggtgatgctatatcggacatgttggcggtccttgccaccttgtccattttacaaatggcaccaacggactgggatagagagtatacggatttacccaacaagttggtcaagtgcattgttcctgatagatcgattttccaaacgactgatcaagaaagaaagctgcaaaaccctgctgggttgcaaactaagatagactccgtcatagctaagtacccaatgggtagaagttttgtcagagccagtggtactgaagatgcggtgagagtttacgcagaatgtgaggatccaaccaagttagaccaattctgcaatgaaatcgtagaatacgttaaatcgtctgtctaa

SEQ ID NO: 3914 - DNA, 174 bp, Saccharomyces pastorianus
atgtcttcaccgaccttctttggagatagacctaaaggaccgatctttggagccaaagcagcggaagcaccaacttcaccaccaacggctcttaggtataagtatttaacttcattaggatcaaactttggaggcatttttgtatatcctttgttcttgttgtcaactttctag

SEQ ID NO: 3915 - DNA, 138 bp, Saccharomyces pastorianus
atgatgtcatccaattggatgttaccactgtgcttgacgttcttgtccttctttctgtctcttggtggttccttcaaggcggtgatgaccaaagaggaagcagatgggacaacagaggcggcagcttgtctgttttga

SEQ ID NO: 3916 - DNA, 630 bp, Saccharomyces pastorianus
atggataatgaaatggaccaattacagaccactaaacaattcctgaattatcttttgaaagaagctaatatcaccaagtcattatgcttgatagaggtcttccaatttgggattttaaagtcatttcatgtaatcgacaataaaaacgacacccccttgaagttttctgacgaaaggttaatccatgagttgagattcaaaccgtttaattcgataggtgttccagagttgccagaacatgaagcctttcagaagtctttgaaagattttactatcgatcgagaggaatcttcatttgatacgagattgaaggccctttcatcctttatagaagaagaggtgcaaaatgtcaacaagtctattgatgagataatctcatgcatcaaggcgggagataacaacggtgtgttagtgacggggacaagattggttcaagagttatccgttgagtactattccaaattaaagcttacttctaaggctatcacaatcaactcgaaagttattatgagtaccttgaaaaaggacactgatcacaaggattacaaggtggaattagtacatgcaactaaaggttggaattactaccctatacaaactttaagggtaaaggaaaaccgccgcaaatga

SEQ ID NO: 3917 - DNA, 1542 bp, Saccharomyces pastorianus
atggaagtagataggatattgggttccctgagcataaccgatgatttcgatcaattggttgacgtgacatgctttttcgatgaattgtgctctaaattaaagccggaaactattgtaaaggaccctcggttcgatttatttgaaggcacgcactctttggaagctgataactccaagctggactccagcctaatagaattaactgacgaagaactagaattcgatttgaatgtcgcgcatgaatcaccattgtcaagtgtgacagctatagcggatagattgcttagatgtgttatctcatggttaaacgagtatcaaaccttacccacaactgtattgagttgtagatatacggaatgcttgttatcatcactgataaagggaacaagttcgggtccattttggaatacaggggacgctctgtatgatgaagtacttgggagctgtgtgcttggggtttgttacttggccaaatttgtacacaggctattaagcgctggcattgtttttgaagaggaggatttgaatttcaacagcatggggttgaacgctttcaataatctgccagatcaagatgttgtcattaaaagtctcataaacagcctccaactattggagacatactcggacgaaagcttacacttggttatgttgaagcatacattaaagatcacactttgcttagtccatttagaagaccatttgacaaactattccacagaaacaatgcatttggatgagttaatcgaaaacgctaattccgtcaatagcatacttccccaattacagttgtctccaccaagtggttcattctctacatatatacagaaacacagatctaatcaatttcccccaagacaaatcacggaaccgcccacagattacggcggtttcattattctggcagaagatatcaaaacagtgcttcttgttaacgaagctaagtctgcgttagaaacttatcaatttgctaatatctttaataagttgaaacaaagacatgttattgcaaggatcttgttcccgttaattttcatcagagacgacagaaccattttgggtaaattttccttcactgacttttaccctttacatattaaagaattttcagcgcaaaccccttctgaaccttcatccgccctaggcggcgaactcattcaagaaagttccaatatccttttggaatggtaccaaaattcctcccaaaacacgtgtagatatagacaggggttcaaccgtcaactaatactatgggattctcttcaagcccagtttgaaagcgtcagttcaaaaattcattgtttctggacgtatttcatgaaattatcaatcatgatcgagttttccctaaaggggtttgacttggaaatttataagccttttgaagcctattctatgttttggtatgtctactacttaagtagccatttggtggacttactaaatgagtgtcagaaagaaatcgagtcaaatattagtgcgatccactctatgaacaaaaaaataaagaaattaaaagcagggggaagaaggaccaattaa

SEQ ID NO: 3918 - DNA, 375 bp, Saccharomyces pastorianus
atggtcaaactaacttcaatcgctgctggtgtcgccgctatcgctgctggcgtcgccgctgcccctgccaccactacattagctccatctgacgaaagagttaacttagttgaattgggtgtctacgtttctgatatcagagctcatatggcccagtattacgcttttcaagccgcccaccctactgatacgtacccaattgaagttgctgaagctgttttcaactacggcgatttcactaccatgttgaccggcatttcacccgaccaagtcactagaatgattaccggtgttccatggtactccaccagattgagaccagccatctccagtgctttatccagcgacggtatctacaccgctattccaaactag

SEQ ID NO: 3919 - DNA, 471 bp, Saccharomyces pastorianus
atgagtggtggcagggaaagtagtagtaacaacaacaacgacagcagtgatgagcggttgctgtttctgaggggcgtgggcgagcgcaacgagatcgggactgcttcccggtttaagccggcacactacaagaagcccgccaggaggcacaagtccgccaggcagctggtatcggacgagaacaagcggatcaacgctttgctgagcaaggccaacaagacgacggacgtcttgccggccgccaagcggcttgtgcccagggcgacgtacttcagcgtggaagcgccgccctccatcaggcccgccaagaagtactgcgacgtgacgggtctgaagggcgtttacaagtctcccacgaacaacatccggtaccacaatgcggagatctaccagttgatcgtgaagccgatggcccccggcgtggaccaggagtacctgaagctgagaggcgccaacttcgtcttgaaatag

SEQ ID NO: 3920 - DNA, 1275 bp, Saccharomyces pastorianus
atgatcgatggtggttcctctggttccagaattcacgtatacgaatttgacacatgtacttctccacctacattaatcaatgaaacgtttgaaatgttacaacctggcttatcctcgtttgacaacgattctgccggtgccgctaaatcgctagatccattattgaccgtggccatgtctgctgttcctgtcaaggcaagaagctgtactccagttagtttgaaagctactgcagggctaagacttttaggtgaagccaaatccgcaaagattttgaaggctgtaagggatcatttggagaaggattatcctttcccggttgtagaaggtgacggtatttctatcatgggcggtgacgaagaaggtgtctttgcttggattaccacaaattatctcttgggtaacattggtaccggtggttctaaattgcctactagcgccgtctttgacttgggtggtggctctacacaaatcgtatttgagcctactttcccaccaaatgaaaaaatggttgagggcgaacataagtttgatttaaattttggtggtgaaacgtatacgctttaccaattctctcatctaggttacggtttgaaccaggtcagaaataagatcaattccgttcttgtagaaagcgccttgaaggaaggtagcatcttggaaggtgatgttacgacgactcataatttatcatctccatgcctgccacctaaagtcaacgccctcaaggaaaaagttaaattaaagtcaggcgaaacctatatcattgactttatgggacccgaggtaccgagtggtccgcaatgtagatttttggccgacacaattttgaataaagatgctgaatgtaagaagccaccatgctcttttaacggtgctcaccaaccttctttggttcgtactttcaaagaaacaaatgatctctacattttctcttacttttacgatagaacccaccccttaggaatgccgctatcatttagtttaaatgaattaatggagttggcaagaacggtatgtaatggcgaagaagtctggaagagtgttttcactgggatcgagggatccttggatgaactgaaaagcgacccacacttctgtatggatttgaacttccaagtatctttactacacacaggttacgatatcccattaaatagggaattaaagactgccaagaaattagccaataacgaaattggttggtgtttaggtgcgtcattaccgctgttagaatctgacaattgggtatgtaaagtcagtaaaattgaataa

SEQ ID NO: 3921 - DNA, 144 bp, Saccharomyces pastorianus
atgataagaaatatgaatgaaaacgcaagcaacagcactgatagttcgtctataagcacaagttcacaagatgagggaaatctgcgtgcaacggaatcaaaagtagctgttggacggactcgtcaagcgcatttcgcaatttag

SEQ ID NO: 3922 - DNA, 753 bp, Saccharomyces pastorianus
atgaaaagtaataaattattgataagggcttccacgaaatcctgcgctgatgttaattgcgaggaggatgctatggacagattaggaccggttaaggttttaacggaaggcaagcttttgagcaagtttgaagagcctggctcaatgagatgtggatattatgaagctaagaattgggtcagaagattgtcaagcgaaacaattgtaggtgaagatacaaataatctttacccattttatgtggatactgcgtatgacgttcgacgtttgaataaagacatcataaacgcaagaattgaattgtatgtggagaatttaatcatcatttgtaatatcaatgacgtttccacagtatttctcatgagggaagttgtggaatggactctgtgcaattttccatcaacaactgtatatgtgcaagatatttttgaaaaatcagctcactttgcagctagtgatctatgcaaagatagcaattgcaagcatagtagaataaagtattggtcaaaggaatttgtccaaaatcatgattcgttcttcgatttggttataactttaggaggtgatgggactgtcctttttgcttcatccatatttcctaaaaatataccacctatcgtcccatttgcccttggttcattggggtttttaactaattttgatcaaaaagttcaaggagacattatcgcatgtcttaacggaaaaggtccgcatcaatttacgtatgcgattgcagtgcaaagtttatcatag

SEQ ID NO: 3923 - DNA, 585 bp, Saccharomyces pastorianus
atgcgattgcagtgcaaagtttatcatagaaacgaaactgaaactgacgctgccaccggaaagcgggtatgttttattgattttgtttctgaacatcacgtcctcaatgaaataaccatagatagaggtccaactccttgcttgtccttattggagctttacggacacaattcattgatgactaaggtccaaggcgatggattgattgtagccacacctacagggtccacagcatactcgttaagtgcaggtgggtctttgatatcgccgagtgtaaacgctatagcggtaacgccaatctgtcctcatactttgagttttaggcctataattttaccagatagtatagagctgaaagttagagtggacttgaattcaagagggacatcgtgggtaaactttgacggcaaagatagaattgaattgaaacaaggtgattatgtcgtagtaactgcaagtccgtatgcagtgccaaccattgagtcatctccgagtgagtttatcgaaagcataagtaaaaatctcaaatggaataagcgagaggaacagaaaccttttgctcatttcctctcaagaaaagtataa

SEQ ID NO: 3924 - DNA, 1446 bp, Saccharomyces pastorianus
atgcgtcctttcttttgggaagcattttttaattctttatcatataggctaaaaataaatatcactttcacaatggcaatcgttcgcaattggctattttgtttagtcggtgttttttcctttgtgttacgtgtagaagccagtacttattgtaacgccacacaagcatgtccccaagataagccatgttgttcacaattcggtgaatgtggtaccggtcaatattgtttgaataactgtgatgtgagatattcgtttagtcaggattcgtgtatgccagtgccaatatgtaagagttcatccaccaagttcaatgattattcttccaagatgggaaatgctgatgttttcttgggtaatgtcagcgaggctgattggttgtattctggtagggttttagattatgatgacgaagaaagtttgattttggctatgccaaaaaacagtggtggtaccattatttcttctacaagggctgtgtggtatggtaaagtcagtgccagaattaagacatcgcaccttgctggtgtgatcactgcgtttatcttatattccggtgcaggtgatgaaattgattacgaatttgttggtgctgatctagaaactgttcaaaccaattactattgggaaagtgttttgaacttcactaatagtgccaatatatccaccactgatacctttgacaacttccatacttacgagatggattggcatgaagactacgtgacatggtctattgacaacgttgttggtaggactttgttcaaaaacgaaacctataactccaccaccaacagttatcactacccacaaactccatccaaagtggatatttctatttggcccggtggtaactctactaatgctccaggtactattgcatggtctggtggtgaaattaactgggacgcaccagacatcagtgatccaggctattactatgctattgtcaatgaaatcaacattacctgttatgatcccccaagttctgttaagaaaaacggtacttctgcctatatttacacttcatccgacgaatttttggaaaaagacatcgctataactgatgatgatgtcatgatggataccgatggaggatctggattggaccctcacaagggagccaccacatcttctgtccaaaaaacttcgtcttcaacttcagcatcttcaaagagttcctctgaagcttcttctagccacagcacctcaacgaagaagggtagcaagactacttctgcgtcctcttcatcaacttcttcttcttcttcttctacaaagaagggagataaggatatctcggcttcaacttctcttgtatctccttcatcaagtggagccgcatccagcagcacaggctcggcaagcagtgccggtatgggtgctaacgttgctacaaactggggcctgactgctgtatgcgttgtcctaggttatataatatag

SEQ ID NO: 3925 - DNA, 744 bp, Saccharomyces pastorianus
atgagttggcgtcgagtgttcattgggcaagaggttctgccagctcgtataatgacaacgggaggcgcttattcaacttatttgcttgacatcgaggggacagtgtgtccgatctcgtttgtgaaagagactttgttcccgtattttacagagcaagtgtcgcaattagtgttgcagcaggattcaggggactccccgatttctgaaatcctgttacagtttcacattgaagataaacagcagttgcaggcgcacatcttggagttggtggcgaacgatgttaaggaccccatcttgaagcagttgcaaggctatgtttgggctcagggctatgaaaccggccagatcaaagcacccgtttatgcagatgccattgatttcatcaagagaaaggaccgtgtgtttatctactccagtgggtctgtaaaggcgcagaagctgttgtttggatacgttctggaccccaatgtgcttacgcacgattcattggatctgaatgctaatataaacgggtatttcgacatcaacacttccgggaagaaaaccgaggcgcaatcatatgctaatatcttgcaagatatcggcgtgggcgctggcgaggtcttgtttttgagtgacaatcctttggagttggatgcggctgctgctgtggggatggctactgggctggctgtacgacctggtaatgcacatgtacccgatgcgcaaaagtaccaagtctacaagaattttgaagatctttaa

SEQ ID NO: 3926 - DNA, 546 bp, Saccharomyces pastorianus
atggcggagcgactcttaatcggatctagcagcttccttgaaggagatggcggcttcttcacccatggcggagatgatagtgaccatcaagtccttaccttcgtcgaaagcggcttgcatggtgtcacccaattcaccttctggggccttgacgtcatccttggtgtcaccgtccatgttcatcaaagacaagaaaccgtcatcgatgtccaacaattggtattcgtttctcttgacaactgggacttccatgttgtgagtagatggagacaaatcttccaacttcttaccagtgaagatatcaatggcgaccatgtggaccttggcgtgaccgtgcttaccggtcttggaggtggacatgtcgacaatcttacatggtctacccttgatgacaacgaaaccactctttctcaaagcggaacattgcattgggtaggtggtggaggtaccggcatcggcggtttcaaaggtgtgttcttcgtcagacattgtatgtgtgtgtgtgtgtatgtgtgtgtgggagagtctatggataattggctatag

SEQ ID NO: 3927 - DNA, 183 bp, Saccharomyces pastorianus
atgaaagaaaactccgacccctttccatcacatcatgcactctctgctgaaccggggttttttctttgtaactttttttttttcgttctcctaaagcattcacaaataaatcttttcttttattttctatttattttgttatttatcatctatatatttagcaacaatatattttgtttttaa

SEQ ID NO: 3928 - DNA, 339 bp, Saccharomyces pastorianus
atggttaacgaggccgaaaaatataaaggccaagatgcagttagaagaaaagctatcgaaaccgccaataaagctgatcaattagccaatgacaccgagaattccttgaaggaatttgaagagagattggataaaaccgactctcaaatcctcaaagaccaaatttcgtcattaagggaattaatatcccgagtgcaagctggcgatgaagttaatggcgaggacttaacaagcaaaattgataaattgcaaacgtcatcgttaaaactctttgaacagctctacaagaataatggaaattctcaatctgaaactaagaatgggaaccccgagaaataa

SEQ ID NO: 3929 - DNA, 1419 bp, Saccharomyces pastorianus
atgttaatagctaagcgtacccaacgggcacataatccactttatactataactcgtttacagtcaacaaaggttcaaggaggagttattggtattgatttaggtaccactaattctgcggtggctattatggaaggtaaagctccaaagatcattgaaaacgcggaaggctcaagaactaccccatctgtagtggctttcactaaggatggtgaacgtttagttggtactccagcaaaacgtcaatccgttataaacccagaaaacactttgtttgctactaagcgtttaatcggtcgccgttttgaagatgctgaagttcaaagggacattaaacaggttcccttcaagattgtaaagcattctaatggggatgcctgggtaaaagcaagagaccaaacatattccccagcacaaataggtggttttgtcctgagtaaaatgaaggaaacggctgacgcttatttgggtaaaagcgtgaaaaatgccgttgttactgttcctgcttactttaacgatgctcaaaggcaggcaaccaaagatgcagggcaaattatagggctgaacgtattgcgggttgttaatgaacccacagctgccgccttagcttatggattggataaatccgagtcaaaagtcgttgcggtttttgacttaggtggaggtacttttgacatctccatcttggacatcgataacggagtttttgaagtcaagtctactaatggtgacactcatttgggtggtgaagatttcgatatctatttgttgagagaaatcgtttctcgttttaaggctgaaaccggtatcgatttagagaatgaccgtatggccattcaaaggataagagaagctgctgaaaaggccaagatcgagttatcgtcgactgtttctaccgaaattaacttgcctttcattactgccgatgccacaggtccgaagcatatcaacatgtctttttctagggcccaacttaaaagtttaaccgctcccttaataaacagaacgattgatccggtcaaaaaagctttgaaagacgcaaagctcacgtcttccgatatatctgatgttttactagtcggcggtatgtcaagaatgcctaaggttgtagaaactgtgaaaaacttattcggcaaggatgcttccaaagccattaaccctgatgaagcggtagcactgggcgccgctattcaaggtgccgtcttgtctggtgaaattactgacgttttgttactggacgttactcctttatcgttaggaattgaaaccctaggaggtgttttcactagattaattccaagaaattccacgattcccaccaaaaaatcccaaattttttccactgccgcagcaggtcaaacagcagtcgaagttaaagttttccaaggcgagagggagttggtcaagataataaattaa

SEQ ID NO: 3930 - DNA, 3528 bp, Saccharomyces pastorianus
atgagacttggtatattggtaaagcatctctatcacaagggaatgtactatctgtgttttagctatgggttatatgcgggaacatccaacgaagtgaataggaaaattgagttttccctagacggacctttcattgtgaactataccattatacagaaattcaaaacgtcttcaaaggtggacgcaatttcttcctgccatctgtttatgtttaacgacggctccattgaaggctttaaattcaaaaacagcaattttgtgaaagtctatgggtctaatgtggttccgaaactagatgccacctcttctcctatctccaactggctaaatgcctctctagatggtttgctatacacttgtaataataacatgtcatatgatagtacttcctgtaagccaagtttcaaaatccattcctttgactttgggaacaagttagtggaaatgttttatgcagccgatggagagattatttcgttcgattttatcagcagagagcgattaattcacagtaaaaaatacctagggaagccggatgtctcttttatttgcttgattaagagtgaatacaatgaaaatttgattttagaggaatatgattgtgttaaggatcacatttcccccaagggcctaaagtctaatttcagtggggggcatcgcatttacaaccttttaccgatatccaatggtgagttttgttacatgaaaataatttacgatcacactgtcatagtactgactaatacacatatccagattattaaactaggaaaagaggggttcgaaagaacagccttcttaaacaatataggccttccgaaagaagagggttttcaatttctaaaagactcatgcgatttcatgtatgaaaaatcagggatctctttaaccctttatgatacgcacgccaataaatatactgccaaagtagatcaaagtctactagaaaaacgaaaggtgcagaacggtctacagtggttaagagaaaagatattcaagctttctaaacatgatctatgcgactctgtgctacagctcccaggaaaacagtatataactcttacaagaatgaatggaatacacttcatatcaaacaaccaccgcggccctagagcagagaaggtgaaagggggacctacttataggaacaaagtttatctcgcatctcaaatcgttcgaaataatggaacagatatagactcattgcttatgagcggaagttttaactcgaaaagggggtttttagaaaagaaatctctggtatacgatgaaaaaattttcaagctatctgcttccattaagctgtcactagagaacgtaactgatttttggattacagacttaatggctggagatgagaaccatttcacgtatgagtcaatgggatcaatttacagaaatggagagttattgatggacggatcatataattacggcgtattagttacaagaacggggatgattttggaaaacaatatggatggctctaccagtgaaattaagcaagtcggcgatctacaatttgacagcaacatttcgaatatgttttgctattctatcgaaaactctacagtcagaatttcaacacttcaaccccaatctagttctctacataaagtaaaggacgtcttcattgagggtgttgattcgaaaaacagcatcataagttcttgctgggatggagatgacatattttatttggccgtatactctgaaggtaaaattttcatatgggatacaagccaaaataaacttatatcttctcgactagattattcctttatagtctttgacatattggtaaaaggatctcagtttgatagtaacgccaaaaatgaatctaattttgtcatcgcatcatcatacgttggttgtgtgagagtctacaaatcaaattcgaatttcctagaagtagcattagaaatatattcctctcatagccaaaagttggaaatattagatacgccctccgattcaccattggtttttctttataacgaaaaagaaacaattatgctaaatttggatagcttgacttacggattcatacaattgggcgtgattccaagaaaaatgagaatacatccaaaaaaaccgtgtttctctctttgcgttttggacattgaatctcaaataaatgtgtttgattttgctgcgacgtttgatcatgggaactttactaagcacatgatttcattgaaaccgcaagtgaagaattatatgtaccatctttctagtgttcccttacatctatgcaccatgccagataatgccaatcaggctgtggtatgtatacttgacactaatagtgggcagtatgagctaatgctattcgattaccttttaatgaaaccaatatctacgtttagtcttcccaaagcgaagtattcgcatgcaattttgaagccgttttggtcggaagataattcaatctactcatcgcttagatatttttacggcaataaatttatcgtgtgtttaggcactgatgataaacgtacaaaattttggttatttgaaatcagaaacagcgtaattgtccagctatatgcggattgcctggaagatcgtatatgctctgtctgcgtttactacgaaggtagtgttgttttattttcaggcgatagtggcatagcaacgtacaagatacagatgctaaaagaaacttctgaagtactcgaagctcgttctttcccaatacttgagtcgattgaatctacgggatttctagcatatatgactggcgatgatttgattcaactgaatactataaaaggcttcataaaaaccaatctttcgatcagcgaagctatagaatatccgtcagagtattcagagaccgtttgcatgaactttatagatttttcagacattacgcatgtggcgactaaaaggatctccaggaagtcagtggagcctgataatgattattccgaaaatggaaaacactcctcattaagccgattttcaggtctttctcaaaccgaaagggtgtattctggcatatcctatgtcgctactattgattctgataacacacttgcaatttatgacgattctaacaaatcattggttaatgaagacaggttaattatgccctatcttaaaatccaattacctgatacaataatctcgttggcacccattccggacggattccaaaacctccaaatatgttcaggcttggacaatgaaagattagagggagtcttacctctttttatgatttgcggtacaaagggtcaaatttatattgtatcggaattatttaatgaatcatggatgaggtcgttgcgtcattacaagaaaatcaagctcaatgatgaaagaaaagccctagattcagaaaccaacatgcgaaatgttagtggacaatacgctgtgagtactggacctgggataaatagcagtgggtttgaagggctagggaggaacttgaagagaagacgtgttaattatttaccattcaagactatagatttttttgatcctgcaatactaagaaaggtgactaaaaaacgcctttaa

SEQ ID NO: 3931 - DNA, 930 bp, Saccharomyces pastorianus
atgactatgacaccagacctggtagaaaaatggttcccaggtgaccactctgatgttggcggaggttgggcccctgattgtgagacagaagaaaatttatctaacttaccactacggtggatcttagcggaagcaatcaaatttggagtcaagttcaaacctggttcgatacatgagtatgccgccaaacatacttcaattgaatctctgtttgcggatgctcatgactatcttgatttcggttcaccgaggaaaggttctaggtcaaatgtgatggacgataattatgagactcatcatgaggagtttgataggattaagaaaatggaagattctctgaaccaaataaaagagactcgactgagtttaaaagatgaggaagaaaaaataaaggatgcctttaccctcaaatgcggacatgcgaataggtttataagggtggtatggtggatattagagatgcttcccattggaataaggatggagaataaacaagggaaatggcaaaactttcatgtgcccaatcttgggagatctcgttatgtaccagagtacgttagtttgcattggtcagtctactggagaattaaacttgatcgtgagtacagaccaaataatctgcccgaatatgtcaggcaactattccaagattttgagggtattgatttaaaaactaataaaattatagataaatataatggccaagttcgaggtgaggagactaggatcgacgaaggacctcccgatgatgaagaatcgcagctccgcttgggacaaaaagcgagctattttgctaccatatccaacgcaaggttattcgacaccaaatattcccatttaaaaaagaaatttttggactgggctggcagttcttggggcgaaattccagatgatttagaaatacacttgaaacatgacgtatccttataa

SEQ ID NO: 3932 - DNA, 897 bp, Saccharomyces pastorianus
atggacaatttcagatatgttcataaacaatataacaaaagtgaaatagggagcgacagtaacgtagattcatcattgcgttcatcgtttgggaaaaatattattctttgttttgatggaacaagagaaaattttgggcctcagcccttcactaatattttaaagttataccgccttctcgaaaacagtgatgactctgaacaaatttgctattatcaacctggaattggttcagttggatttgacgctgttgttgatgtaagaagacggttaactttttcgcatttacaaaatttattggattctatgtttgcttttagtttagacaaccacatatgttctgcataccttttcttgatgaagtattttgaaccaggagataaaatttatatgttcggtttttctagaggggcttttattgctagggtacttgccggaatgattgaaagggttggcctcttgaagaaagggttggaagaaatggttaaaatggcctggcaaatttatgagagatgggaatacgactcacagccaaatcaactacaatacacagggactttggccgaagagtttaagaagacattctcaagggactatgaggtgaagatatatttccagggtttgtttgattcggtaaactcagtgggaatattaagggaccgtttgtttccttgtacccaaagaagcaatattgtggaacatgttcgtcattgtgtatccctagatgaaagacgtggaaaatttaaacagttgtgtttcacgccgatgccttacattccaaaactactctcattgacatacgttacaaacttatctgaccagtgctcaccaatgccattctcagatccatcgaagcaggttttggcccaagaaaatcctttgatcaatacactgtaa

SEQ ID NO: 3933 - DNA, 4413 bp, Saccharomyces pastorianus
atggatagcaagggactcaccacggtagatccagtcactattataatcaaagaatgcatcaatttatcaacagcaatgaggaaatactccaagttcacctcccaatctggagtggctgctttattgggaggggggagtgaaatatttagcaaccaagatgattatttggctcacacattcaacaatttgaacactaacaagcataatgatccatttttgtcaggcttcattcaattaagactcatgttaaataagctgaaaaatctagataacattgactcgctgactattttacagccatttttattaatcgtaagcacaagttctatctctggttacatcacgtctttggcccttgattctttacaaaaattctttactttgaatattatcaatgaatcatccaaaaactacattggagcacatagggcaactgtgaacgctttaacacactgcaggtttgaaggctctcaacaactctctgacgattctgttctgctgaaagtcgtgtttttgctgcgctcaatcgtcgattcaccatacggggacttattatcaaactcaatcatatatgatgtgttgcaaacaattctttcgctggcctgtaataatagaagaagcgaagttctcaggaatgcagcccaatcaacgatgatttctgtgactgtaaagatttttgcgaaattaaaggttattgagcccatcgatgccaatcaggtatacattaatgacgaaagctacacaaatgacgtactgaaagctgatacgattggtacaaatgtgcaatccaaagaaaccgaaattcaaaaagataccatcgcctctgatatacatgacgaggaagcaattagcgaagatgatggcaatgaggaaacgcatgggcatctagagaagaacgtagataagattgaacagttagaaattgtacagaaaacaaccagatcaaattccaaaatccaagcgtacgcagatgacaactatgggttgccggtggctaggcaatatctgaacttactattatcgttgattgcaccagaaaatgagctcaaacactcttattcaactagaatttttggtttagagttaatccaaacagcattggaaatatcgggcgacagattacagctatacccccgccttttcactttgatatcagatcctattttcaaaagcattttgtttattatccagaacactacgaaactttcgctcttacaggctactttgcagttatttactacactggttgtcatattaggcaataatttacaattgcaaattgagctaaccttaacaagaatattttccattcttttggacgatggttctgcaagcagttcaaaccttgaaaacaagaacaaaccgtcaataataaaagagcttttgattgagcaaatttctattttatggactaggtcgccatctttcttcactgccactttcatcaatttcgactgtaaccttgatagagcagatgtttccataaacttcctaaaagcgctgactaaacttgccttacctgaatcagctttgaccagcacagagagtgttccacctatttgcctcgaaggtttagtgtctttagtcgatgatatgttcgatcatatgaaggacattgacagagaagaatttgccggacaagagaatgaaatggagattttaaagaaaagggatcgtaaaacggagtttattgaatgtaccaatgcttttaacgaaaaaccaaaaaatggtattcctatgttaataaaaaaaggttttattgcttctgaatctgataaagatattgctgagtttcttttcaagaacaacaatcgtatgaataagaaaacgataggtttactgctgtgccatccagataagataaatttgctaaccgaatacattcgtttgtttgattttgccggattgagggttgatgaagctattagaattttgttgacgaaatttaggttgcctggtgaatcgcaacagatcgaaagaattattgaggctttttcgtccacatactgtgaaaaccaaaactacgatccatccaaaatcagtgacaacgctgaggatgacatatctacggttcaaccggatgctgattccgtttttattttaagttattccatcattatgctaaacacggacttgcataacccccaagtgaaggaacatatgtcattcgaggattattccggtaacttaaggggatgctgtaatcacaaagatttcccattttggtacctggatagaatttattgttcaatcagagataaggaaattgttatgccagaagagcaccatggtaacgagaagtggtttgaagatgcttggaataacttaatttcttctactacggtgataactgagataaaaaaagacacacagtcagttatggataaactgacacctttggagcttttgaactttgatagaacaattttcaaacaagttggaccaagcattgtgagtacgctattcaacatttacgtagttgcatcagatgatcatatatcgaccagaatgataacaagtttggataaatgttcatttattgctgccttttttgacttcaaagacctctttaatgatatactgaactctattgctaagggaactactttagtaagttcaagccatgatgatgaactttcgactctagcatttgagtacggtccaatgccattagtacaaattacatttgaagacacaaatactgtgattccagttagtacagatgccgttagatttggtaggtcatttaagggtcaactaaacacagtagtgcttttccgtataatccgtaggaataaagaccccaagatattttctaagaagctatggtcaaacattgtcaatattattttaacgctattcgaagacttgattctgcctcctgatattttcccagatttgcaaaaaagactaaaattgggtaacttacccaagccatctcccgaagtttctattaataagagcaaagaaagtaagggtcttctgtcaactttcgcttcatatttaaaaggtgatgaagaaccgacggaagaagaaatcaaatcttctaaaaaagcaatggaatgcatcaagtccagtaacatcgctgcttctgtctttgggaatgaatcgaatgtgaccgcagatttaataaagaccctactcgagtctgcaaagacagagaaaaacgttgataattccagatattttgaagcagagcttctattcatcgtcgaattgacaatcgcattgtttttgttttgcaaacaagaaagggatttgggaaagtttatactacaaaaggtttttcagctttctcatacaaagggcctcacaaaaaggactgttcgtagaatgctgacatacaaagttttgttgatttctttgtgtgtggatcaaagtgaatatttatccaaattaataagtgatgaactattaaagaaaagcgaaattttcacccagaaattttttgccactaatcaaggtagagattttttgaaaaagttattttcattaactgaatcagagttttatagagagtatctattaggacacgaaaatttttggaaatttctaaggaaggttacagcaatgaaagagcaaagtgaaagtgtttttgaatatctaaatgaatccataaaaacagacacaaatattttgacaaatgagaattttatgtgggtactaggactattagatgaaatctcatcaatgggagccgttggtaaccattgggaaaaagaataccagaagttgacggagagtggacataaagtggataaggagaacccttacaaaaaatcaattgatttgtcactgaaatctattacattaacatcacacttgctagaagataatgataatttgaataaaaacgagatatttgctattatccaagctttggcacatcagtgcatcaacccatgtaagcaggtaagtgaattcgccgtggaaacactacaaaatactcttatcaacaagatcgaggtaccgtctgatgagatggaatccgtggaagagttaatcgagggcggattattaccactattgaactcgagcgaaacacaacaagatcagaaaatccccatttcgtccatattaacaataatatcgaacgtttacttacactttctgaagacgggaaagacaagtaacgaaacgtttttgaaaatcttgggtatttttaacaaattcgtagatgactcagaaatcgagaggcagttacagcaattgattcttgataagaagagtattgaaaaggaagctagcgcaacatcgtcccatctatcctcacgcgatcaaacacccgcatccagcgatatccaagatggggctgcggcaccgattaacgaaaccacgattgatgacattaaaccagaggtttcaaatgatgacgatatagaaaatgaaggagagaaagaaattacagaatag

SEQ ID NO: 3934 - DNA, 864 bp, Saccharomyces pastorianus
atgtggccagggagtgatgttacgtacaacgattgtgaagaaatgccgagagaaagaatgccattttatttcgacaagtttaaccaatgggaaccacttgatgaaaagttgtctcagattttccggtatgtagacatgcctcagctaagggacaggcccgaattgatactgagctacgtacctaatgtcgattggtatggccacaatttcggatacgatttacgagataagcggctacaagatctgatcggcgaagttgacggattctgccacgagttgattgaaggcttacagaaaagaaatctgttggcgttaagcaacgttatgtttgtcagcgaccacgggatgagcaatgtcgacatgaataacgtggagaatatcgttgtatgggaaaaaatgtttcccgacggtgcgatgtccaagtacgtatcgcatctctataacgagggcccgatgatgatggtctatttagaagatcctcgagacaggcgctggatgcgagacttgatcgagttcaccctgcggaaagtgtacggggaggaaatctcgagcaagttccacgtgatcttgagggaagatttcgagccggattggaagtatttccgctacgatgacaaaccacacgcatatgacgacagggtgggcgatatctgggttctcgcggatgcgcactgcgcaatcttgaaagaaaccggcgacgtacgagccggggtgatggggacgcacggctacaactttgccaactgtagcgacatggcgtccatgttcatcggcatgggtccgatgttcaacaatggagtcataccaccgttcgagaacacagaaatctacaaattactaattgaggccagcggtgtcgtataa

SEQ ID NO: 3935 - DNA, 426 bp, Saccharomyces pastorianus
atgcttcttttggagcaaggtaggagggaccttgagaaaaatgaccaaaatggcgttaaggcaagagcttctacgacatggaattggttgtggaaaagtgtgctatgtggtatgactgttgttatgttgctttcatgtgataaacgctcggcaaggtatgatgctggacccagggaaattgtacatagatcgagtacttattttaacggtacgcatgagtttaagacattaacaatattgatatctatcgatgggttccttccgagattaatagatgaaaagtgcacgccgtttctttacagcttacataacttgcagtcgccatatgacataaatatcagcactgcaccgcacatgatcccgagcttccccacacagacattccccaatcattggagtatggtgacgggaataataccccattga

SEQ ID NO: 3936 - DNA, 612 bp, Saccharomyces pastorianus
atgaaacttttgatgagtgatcatgaggtagatttagtcaatgatagcatgcaggagttccatgtgaagttcttgggtcctaaggacacaccatatgaaaatggtgtatggagactacatgttgagttgcccgataactatccatataagtccccaagcatagggtttgttaacaagatatttcatccaaacatcgacatcgcatcgggatcgatatgtttggacgtgattaattctacatggtcgcctttatacgatttgataaatattgtggagtggatgataccgggtttattaaaggaacccaacgggagcgatcccttgaataacgaagctgccacactacagttacgagataaaaaactgtatgaggaaaagatcaaagaatatatagataagtatgccacaagagaaaaatacgagcagatgttcggtgaagacgatggaaatggtgataccgatggcgacggggacgcacagaatggcactgattcggatgatgacatggaggacactaggatgtccagtggtgacgatagcgtcgatgagttaagtgaagacctaagtgacatcgatgtcagtgatgacgaggacgaggacgtggacgtctag

SEQ ID NO: 3937 - DNA, 720 bp, Saccharomyces pastorianus
atgaatgataatcataattattctgcctctacaacccaacacccctattatggtcatcctatagagagtcaactagctctaacagccgctgggagtgtcagcgctcctggtgctcctgtcgcaaccgaaaatgggctgcccatatctaacatgcaaccagtactccatcaagccaataacagtaacccaaatgctgcttcttcctctgccactgctgctggcccttcggcgactccttatcctgtttattctatgaacgttccctatcatagttctcccgcttccgcattcaggagagctcaggacaatactacttcaaatccaaacgcggaaccttctttaactgcaggcacgaatgcaccaaatcccggatacgctaactctcaacaatacactacatcacaagtatattaccaagggtttcctcaatattccatgaccagtgctcagaattcatcgatgtatcagcatcaacatcaacaccaacaccaacaccctttaccgacagtatacccaataacagcgtcgcaacaaaatataataaacgcaagccacgcttcgaacactattggctctgatcctcagcaccatcactatcagcaggaagctaacgatcataagaattttaccatgggccattcgaatagtaatattttaaacattaccaataacgatacgatgaacaatattaatacgaataccactactactacacaataa

SEQ ID NO: 3938 - DNA, 1041 bp, Saccharomyces pastorianus
atggatatcgagcctacttttaaaggatacattgaagatgaagatgatgctttgcttattctccaagctaccctggacggtaagctgaaacatattcccagaaggccatatgaaattgaaagaccctacttgatcgtatccggcagtatattcgtgtttatcgaagagatttccggaatcaaaagatggactgacggagtttcttggtctccatcgagaatatcaggcaagtttctaatttataaagaattggataaggagaacgccaacactggtgctaatgccaatgttaattcgaccagcaattctgactctgccattatctcagatgggccttccgacgcaaaggatccttcctcttccaagatcaaattacctcctttaaagaatcatcaattcgacttaccccccactatggctcattcgaattttgaatcggatcaagaatcatccatttctccatcgaaccgttcgaatttaccactaaaatataccggtctagtgaaaaagacaatctcagtgaaattgaagagacctccatttaattctatagaaaatttacacattgtctcatactattccgtcaaggatatcaaacaaagccgtttggtgacgccaaaagcctctcccttcttaaaagatactagaccttcacaagagctaattatcgcaatggaaaacacaacattgggcaatgtgaaaaataataccaacaccactaatgcgaacaactctaatagtataaacaacaaaagtaactcctcgactcctttaaatactgttatctccacaaataacaatagtgctaatataaatgctgctggcggtaatcaatttactagtgcgaacaagaattattattacaaaagtgatgaaagctctgggtacccaatcgcccaattcgctcctgcgttgccttcaacaactttgatgtatacaatgaatccaccttacatcactcaatctcctgataacgcaaatcccactggcatgaacactcatagcaataacaataataatatcatcataatactatactaa

SEQ ID NO: 3939 - DNA, 690 bp, Saccharomyces pastorianus
atgacgtccgtaagaaaaagaaagattaacagatcttccgtcgggaaggcaacgagaagaaccaaagacaaacagagaaaaattaacatccaatccaatccaattattgccgcaaattgggactattctttgacattggcacaaaattataagaaattaggactaagggccaaactacaggcgccagcgggcggtgaagaggccgatctaactaaggtagtcaagaaagtgccattaacaaagtctgtgttggatgaagacgacgacgaagacgaagaagagaagagtgatgatgcggaggctagtgttgaactagatgaaaacgagattccagaaggtgaggcaaggatacaacgcgataaggatggcgaaattgtaagagttgtttatggtaagaaaaagagtttcgatgtcgatgaggatgttgcctcgataagggctaagggaaccagtgagaaaactgaagtagtcaaacaactagaagaatttgcatctagacctgttatcataaaagaacgctgccaaagtgaaagagaggaagagtggctgggcagattatacaagaaacatggggatgattacaaaaaaatgttcttcgataagaagttgaatatctaccaacaatctgaaggcgatctaaaaagaagaatattgaaatggaaaaaaagaaacggtaacgtgctggagtaa

SEQ ID NO: 3940 - DNA, 1143 bp, Saccharomyces pastorianus
atgggtactcacagcaagatgccatcatacaaccacgagtccaaggaatccttgatagatatcatctccaaggacccttctgccatgttgggtaagaaaatcatcgacaagttccatgccacaaacgaattgcctttcctttttaaggtcttgtccatcgggaaagtcttgtccatccaggctcatcccgataagaccttgggtaaaatgctgcacgctcaagaccccaagaactacccagacgataaccataaacctgaaatggctattgccgtcaccgacttcgaagggttctgcgggttcaaaccattgcaagaaattgctgatgaattgaaacgtattcctgaattacacagcattgtgggtgatgaaacttcccaagaatttatcaatggtattgacacgtctgctcaaaagggttctccagaagacgagcaaaacaaaaagcttttgcaagctgtcttcagtaaagtaatgaacgcctcagacgacgaaatcaaggttcaggcccgctccttggttgaaagatcgaaaaattcaccttctgacttcaataagtctgatttaccagagctaattcaaagactaaacaagcaattcccagatgatgtaggtctattctgtgggtgtttgttgttgaaccattgcagattgaaagcaggtgaagctatcttcctaagagccaaggatcctcacgcctatatcagtggtgatattatggaatgtatggccgcttccgataacgtggttagagcaggcttcactccaaagttcaaagacgtcaagaacttggtttctatgctaacctacacctatgatcctgttgaaaagcagaaaatgcaacctttaaaattcgacagatcttccggctgtggtaagtctattttatataaccccccaatcgaagaatttgccgtcttggagactacttttgatggcaagcttggtcaaagacattttgaaggtgttgacggcccaagtatcttgattactacaaagggtaatggttacatcaaggctgatggccaaaagttgaaagccgaacctggctttgtattcttcattgctccacatttgcccgttgatttagaagcaggagatgaagcttttactacttacagagcctttgtcgaaccaaattag

SEQ ID NO: 3941 - DNA, 726 bp, Saccharomyces pastorianus
atgcacattgtaaaaacggtgcaagcaaagatgaacggattagtgttaggtgctacaggtctatgcgggggagcatttctgagacaggctcaggaagccccccagttcgcaaaggtttttgctatcttgagacgggaactgccctccccagccactaacaagatcgtggctatggtagaaaaggacacttcgcagtggccagcgttgatcagcgaggaaatgcatccgcaggttctgttcaccgcgctggctacgaccagagccgctgccggcggcctggacaagcagtacaagatcgaccacgacctgaacatgcagttggcctgtgccgccaaggacagagggtgcgacaccatcgtccttgtgtcctctgccggtgctcatgtggactccaggttcggttacatgaagatgaaaggtgagatcgagcgcgatatcatcgccctagatttcaaacacacaataatcttgcgtccggggcccttgctgggagaaagaacgaattccaagcagagcggttttggtggaaatctggctgctgcgctgggcgctcgtgtataccgttcgagattgcagagttggctgggctatcccgtctacggcgacgatgtggggaaagccggtgttcacttggcattgaacccttctggaaaggacaaagtccaattcgtatcgagcagggatatcctcgacattgccagttctctcggtaaaaccaatgcctga

SEQ ID NO: 3942 - DNA, 483 bp, Saccharomyces pastorianus
atgaaacttactggtaaagaatttatgtccggtaagatacttgaaacagaccaaatgcataggcagagttcaagtctttccacgaaagggttttttttatggtttggagtgatctgtttcttattttacatggtgttttacaaatctcacacgatcaaaaggttgcgtttatctggactgtacaatgttgctaaggaagtcaagacaggtataaggagaaaattgaaatcgctaaggagatcagatccattttccagattggaggaaggtgaatttgggactgatagggacaacctcaaagaagcatttaggctgaagagcaacagcatgtttgatctgggcaagagttcggcgacaatgcaaagggagcacgaaccacaaaggacagcaagtcaatctgctaatctcggtccgtcaaacttacgacccgcattctctatggccgatttctctaaattcaaggacagcagattatacgattaa

SEQ ID NO: 3943 - DNA, 1416 bp, Saccharomyces pastorianus
atgcttatagaaaacactaatgatcggtttggtatcgtcatagatgcagggtcttcgggttccagaatacatgtgttcaagtggcaggatccagaatcgcttctccatgcaggctaccaagactcagagtctatattgcaatcagtgccccatatccatcaagaaagcgattggactttcaaaaagaatcctggtctatccagtttcgaaaaaattccccaagaggcttacaaatcacacatcaaaccactgctggattttgccaaagatatcatccccgaatcgcattggtcgaattgccctgttttcattcaggctaccgcaggtatgcgtcttttgcctcaggacaaacaatctgccatcttggagaatttatgccaggggctcaggcactcctctgaattcttgatcaaagattgctcttcacaaattcaggtcatcgacggtgaaactgaaggcttgtatggctggctgggcttgaattatctttatggacatttcaacaactacaatccgcaggtttcgagtcactttacttttggattcatggacatgggcggtgcctctacccaaattgcatttgcaccccatgatgaagatcaaatagcaaaacatagagatgatattgccagtatttttttaagaagcgttaatggggacctgcaaaaatgggatgtgttcgttagcacgtggctagggtttggcgccaatcaagctagaagaagatacttggctcaattgatcaatacccttccagaaaacacaaacgattacaatgatgacgatttcaatacaaagactttgaatgatccatgtatgcctcgcggaagtaccactgattttgaatttaaagacaccaccttccaaattgttggctcggggaattatgaacagtgtactaaatctatgtaccctttactcctgaaaaacataccttgtgatgaccagccttgcctgttcaatggtgttcatgcgcctcgaatagactttgctaaggataaatttataggcacttctgagtattggtatactgctaacgatgtattcaaattgggcggtgaatataactttgacaaatttagtgaaagtgtaaaggagttctgcaatgcagattggagtcatatatcggaaaacagtgacaagggaatgtacaactctattccggacgatttcctgaaagattcatgcttcaagggtaactgggtcctcaatatacttcatgaagggttcgatttgcctcgtataaacgtcgatgcagagaaagttgatgagaaacccttatttcaaagtgtcgagaaagtcaatgaaagagaattgtcctggacattgggtagaatcttgctcttcgcttcaggaagcatactcgctagtcatgacagttccgtagttgtatcgcccccagtgaaagaagaatga

SEQ ID NO: 3944 - DNA, 1545 bp, Saccharomyces pastorianus
atgagagtcagaaagcgtcaatccagaagaacctctaccaaattaaaggaaggtattaagaagaaggcctctgctcatagaaaaaaggaaaagaagatggcaaagacggatgtcacttggaaggcaagagctaagaaagatcccggtattccagccaactttccatataaggctaagatcttagctgagatagaagctaagaaaatgaaggatttagaagagaaaatgttggccaaacaacaaaaaattgaggctaggaaagctgctagggaacaaggtgtcgacgcaatggacgaagacgattcggacgaagatggaaacggattagcagctctggtcgagtccgctcaacaagcagctgccgaattcgaaggtacttcatctaacgatgcagctgtgaatgacgatgatttggatgtcattgactataacattgatttttacggtgacgatgtggagggagaatcagaactggaaaaatctaggaaggcatatgacaagattttcaaatctgtcgttgatgcgtctgatgtcattctgtatgtgttagatgctagagatccagaaggtacgagatcaaggaaagtggaagaagctatcttacaaagtcaaggtaaaagattgatcttaatattgaataaagttgatttaattcctccatatgtgttagaacaatggttgaattacttgaagtccagttttcctacaatcccattaagagcctcctctggtgcagttaacggaacttctttcaacagaaagttaagtcaaactactaccgcaagcgcattgctggaatctttgaagacttactctaccaacagtaatttgaagagatctattgtagtaggtgttattggttatcctaacgttggtaaatcgtccgttattaacgcccttttagctcgtcgtggtggtcattctaaggcctgcccagtcggtaatgaagcgggtgttactacttccttaagagaaatcaaagtcgacaataaactgaaaattctagattctccaggtatatgtttcccaagtgaaaataagaaaagatcaaaggttgagcatgaagccgaattggctcttctaaatgctctaccggcaaaacacattgttgatccatacccagctgttttaatgttagtaaagagattggctaaatctgatgaaatgacagaaagcttcaaaaagctttatgaagttcctcccattcccgctaatgatgctgatactttcacgaagcatttcttaattcatatcgctcgtaaaagaggtagattagggaagggtggtattccaaaccttgccagtgctggtctttctgtcttaaatgactggagggatggtaagattcttggttgggttttaccgaatacttcggtagccacatctcaacaagataaacaaaattcaagtaccattagcactggtaccaaacaagccccagctaccactaatgaatctaccgttgtatccgaatggtctaaagaattcgatttagatggattgtttagctcccttgataaaatcatagatgctagcaaagactaa

SEQ ID NO: 3945 - DNA, 219 bp, Saccharomyces pastorianus
atgtgccctggtttaacttcagcaggggccgaattgccacctgctcctggctatgagaaaggtaaaattgttgtcattaatgctgaaaacaaagaaaatgcgttggctattggtgaactgatgatgagtacagaagaaatcaaatccataaacaaaggtcattccatagaattgattcaccatttgggtgatccgttatggaatttcagcattgaatga

SEQ ID NO: 3946 - DNA, 3396 bp, Saccharomyces pastorianus
atgggtaaacagtattattgggaaacgaattctgcgaaagaaaggaccgttttcatcaaatctttgattactttatatattcaaacttttgaaggtcatgtccctgaattgatcaattgggatttgtctcttttttatcttgatgaaaagagttaccagagagctgtcattaccaatcgtcccggttccatatctccaattaaatcaccaaccagcaattttgcagctaacaccgcacaatcaatgggctctatcccttcttcttcatcttttgatagggccagaagatctgagacagagaatgatgtttcagcaaatactcccacaggtgtcgcatatcatactgaaataaagtctttaagtaaggccccttactcttcaaattctactcttaatgaggtaaatagaagatacgagctcgaacaacaacagcaacagcaagaggctgaacagagacgattagaagaacaaagaaaattacaattacagaaagaaaatgaaatgcaaagactggaagaggaaaaaagaataaggcaggaagaacagaaaagacaaatggaactggagagtaaaagacaacaagaattagagcttcaacggcaatccgaggaagaacaacgtttgaaaaaggaaagagagttattggagttacaaaaaagacaaagggaacaagacattttagagagacaaaaaaaagaggaacaggagaggcttgctagggaggaggaagaagaaaaaattaagaaaacccaattagacaacgaaggctatgctcaagaaatcaatggcaaagttgataatcttctagaggacttgaatgcagttttaggggaagagacagggaccgctacggttacgcaaagcaatacttacatacctgaaaggagtttagccagaactcaagatcaattaaaaaaacccctaaatgttgccaaggtggagacacttgatggaagccatttaaacgaatcaattgacttagacgatgagatcatcggtttgaatacttccaacatatccgaggagtatcaggatgagaaaaacgatctttcatttgagaagggcgatgaagttaggtacagtcaaaactttgaagatggcactcctcacgtgtatcacgaagtatctataattcaagaagaagcaccaccagcagtacaaaaaataactcatacagaagagcatgaagaatcagaggccttagctccctccaaagagggggttgaaaaaatagataatattgacgatgaagtcctgctagagatacttacagatataaattggacagttgaagatgatgcggatagtatgatcgaaaggattgacatgaggttagctgagacagaatattcattcaaccagaatctattatccctgcaaaaaatcggtcccaatctacttccttatgaggacaaggtcagtgaagaatgtcaccgaataattccaacattttccctgtttttaatggaaatgagtaatttctctagtgatattgaatacgtggagagccaagataacggattacaagttgaaagtgccaacaagaaacttctgtggaataccctggatgaactcttgaaaaccgtttcacttgatgaagtctctttgaatcaattattagaatgcccaataagggagaagaacttgccatggatggaaaatcaattgaatttgttattaaaagcgtttcaggctatcggtagtgatgagaacgaagtagaatataatctaagggagatttccggtttaaaacagagactccagttctatgaaaaagtcaccaaaatattccttgatagaattgtggatgaaatgcaaagcaagttttccaatatacatggtcaagatatctcacacgatcaaatgattagaattctaacgactttactaatattttctccactaattcttttttgtaaagagatctcgcaaaaatcataccaggtcattatagaaaactggaacataagtatccaaccaatgtatatgaagctatggaccagaaaaatatcacagttggaaaaagttgatgctagcgatgataaagagaataagttaggtttaagtcagctattacaggaatggaacacgtttaggaaagaaagaaaaattaacgacgtcagcccagttttcagcaccaaattctctcatttaactgaatgcgtagagactatgagacaagagtgtattgtttatcaaaatttcgtagaaatattctttcatatctcttcgaaacataactttgaagaatttgtcaagcagtttaataacccagacgctcctccattactattgaataccatgaaggaaatgcagtcagatagagaagcagctgttatcgaaactcagttggtctcaaggatatttcaaccgatcgtcactaggctatcatcgttttttgtggaaacagttaaaaatgaacctacactagcccccgccttaactctttacttggaaaatgaaatcaagagtctagaatcatcgaatcatgaattcttactatctgcagtgacaagggtgtatacccaaataaaacaagtatggttagacaatgtagaagaacaggttctatattttgaaagaatttcgaatgcgacgaccaatggagaaattcttccagctatagtcgatttaccggtggatttgaaaaattcagaggacttatttaaatacaccaagaattccatggatattaaggatactgataaaagttacgagtccatagagttgatcaactcaagcttcaaaaaattgagcatggctgctacgcaatcaatggctcataaaagaggtgtttcaagtattgaccccagcctgtcagattctgctgcgttaaataacgactatatgcaaactgcttccttcctagtgaacagtaactggttaacagaaatgctctctatgctaaacttcaataaagatggtatttttgacacatcattgcagaacgcaaagaaagtgtttgatgccgaaaaagaatcctatgcttctttcctgctccgcgatactatgcccaagctaacagcttttgtttatggagtgagtaacatcattgaaaacacaaataatgtgaacgtaaccaacccatcaagatgggctgcatacagcaagcagaacctagagaacattcttttagcatactcgtcccaagaaattgagacgttggtgaaaaggttgcatacacacatggcaaacgatttcggctaccatcaagacgatgccataaataacgtgttgtgtgacaagttgtggtcgtgcatccaaggtcaaaccgtttcattatatctgaaattatacactgtcattgataaacactacaagggaacaaatatccgtttcacaaagaacgatatcatcagtgcgttcgaagaatacaagagtgcttggaacttatga

SEQ ID NO: 3947 - DNA, 423 bp, Saccharomyces pastorianus
atgagaactgggaagtccccttttaagagaaaatcccacagtcgtgaggcatcacacgatgaaaattcatcgtttttccacaagagaacaatatccggtagtagtgcacaccattccagaaatgtcagtcaaggtggagtgccctcctctgcaccaccaatttctggtggcaactattcacacaagagaaatgtgtcaagagcttccaattcctctcaaaattcaaattttctagccgagcagtatgaaagggataggaaagccatcattagtttctgcttttccagacctgaccacaagaccggcgagccaccaagcaattatatcacacatgtacgaattatcgaagattcaaaattcccaagttcaaagcctcctccagattcaagattagaaaacaaaagaaaaggattctcattttga

SEQ ID NO: 3948 - DNA, 717 bp, Saccharomyces pastorianus
atgtcgtctccaatgtcaatcctgcaaaagttacgcaagttttccacctgtgatatatctgatggtttattgaatgtctataatatctcaacaggtggctatttccctaatctaacagcgatatctttaccaccaggtagctccatagtaggcgctgcatacacagtactatttgcacatgccgacgacccaagacctgctgtaaactatatagattccgtgccccctaactctgctcttgttctcgccttagaacctcatttacaaagccaattccatccatttgttaagattactcaagcgatgtacggagggttgatgagtacaagggcgcagtttttgaaatgcaatgggacagtagtttttggtcgtgtaagagatgtggatgaacatcgaactttaaatcaccctgtttttgcttatggtgtaggatcttgcgctccaaaagccatggttaaagctgtggccaccaatgtacagttgcaaatcttaacaagcgatggtatgacccaattgatacatcctggtgattatgttgttggagatagtaacggcatagtctgtgttccagttcaggaggtcgacattccgaaattaaccacctatatcgaaaaatccatcgaggtagatatacttgtctctgaggacattaagaatggcgttcccgcaaaacaggcgcagaaggatcgaagatcggttttaaaacagtacatttaa

SEQ ID NO: 3949 - DNA, 2667 bp, Saccharomyces pastorianus
atggaggaaacaaatgatacagaggttgaaagtagaggtagacctaacgatattcaaacaggtagaccggcaaaaaataagattaaaaggcgtgcgttaacttcacctgaaagatgggagattagacaactcattgctagtggtgctgcttctatcgacgattatccagaactaaaggaggaaatccccagaaatacttcctatataatggaagaggagaataaagtagcaacaccttctaacgaaaaaaattctgagggtgtgaaaccagaagtagaggaggaagaggaacagatagacgagattgatgtcgagctgaatacagatgatgaacctaaattcctgaaagatcaacaagttaagggtgccagaaaatatgaaatgcctaaaataacaaaagttccaagaggatccatgaatcgtacagcaatgaatggttcgaatgctgtaagagatcacagagaagaaaaaatgaagaaaaaaagagagattgaacaaaaaataagaaaaaaacaatcatttgacgatcctacgaagaacaaacaagattccaggaatgaaatccaaacgttgagaaaccaattggttgttactgaatgggaaaggaacagaatgaatgaacctatttcctacgggaaaagaacctccatgccaatcagcgtacaacgtcaaacattacctgtatacgcaatgagatccgaattaatgcaggctgttcgcgaaaatcagtttttagtcattgttggtgaaacaggttcgggtaaaaccactcaaattacacaatatttagacgaagaagggttcagcaattatgggatgattggatgtactcaacctcgtagggttgctgctgtctctgtagcaaaaagagtcgctgaagaagttggctgtaaagttggtcatgatgttggttacactattagatttgaagatgttactggcccagatacgagaataaaatatatgactgatggtatgctacagagagaagcattgttagaccctgagatgtcaaaatattctgttataatgttagatgaagctcatgaaagaaccgtggcaacagacgttttatttgcattgttgaagaaagctgtggtcaagagaccagaattaaaagtgatagttacatcggcaactttgaactctgctaagttttctgagtattttttgaattgtccgattattaagatacctggtaaaacgtttcctgtagaggtgctttactcacaaaccccccaaatggattatatagaggccgcattggattgtgttatagacattcatataaatgaaggccaaggtgatattttggtttttttgacagggcaagaagaaattgactcatgctgtgaaatactttttgatagagtaaagacgttaggcgatagtattggcgagttacttattctacctgtctactctgccttgccaagtgaaattcaatcaaaaattttcgaacccactccgaagggcagtagaaaagttgtgcttgctacaaatattgctgaaacttctattactattgacggtatctattacgttgttgaccctggttttgcgaagattaacatctataacgctagagcaggtatcgaacaactgatagtatctccaatatcacaagcacaggcaaaccaaagaaagggtagagctgggagaacaggtccaggtaaatgttatcgactatacacagaatccgcattttacaatgaaatgctagaaaatactgttcccgaaattcaaagacagaatctttctcatactattttaatgctaaaggccatgggcatcaacgacttgctaaaatttgatttcatggatccaccaccgaagaatttaatgctgcatgcactaacagaattatatcatttacagtcattagacgacgagggaaatttgacgagactaggtagagaaatgtccttgtttccaatggatcccactttatcacgctccctgttatcgtctgtggatcagcaatgttccgatgaaatcgttactataatctcaatgttatcggtacagaatgttttttaccgtccgaaagataaacagctggaagctgatcataaaaaggcaagattccatcacccatatggtgaccacctgacgttattgaacgtttacacgagatggcagcaagcagattactcagaacaatactgtaaaacaaactttttacactttaggcatttgagaagagccagagatgtcaaaagtcagatcagcatgatttttaaaaaatcgggtctaagattaattagctgtcatagcgatcccgatttgattcgtaaaactttagtatcagggttctttatgaatgctgctaagcgagattcgcaagtgggttataagactatcaacggtgacacagaagtaggaatacatccttcaagttcgttgtatgggaaagaatatgaatacgtgatttaccatagtcttgtattgactagtagggaatacatgtctcaaataacaagcatcgaacctcaatggcttcttgaggttgcgcctcatttttataaagctacagatgctgaaagtcaatctaggaaaagagccaaaataattcctttacacaacaaatttgcgaaggatcaaaattcatggagactaagttcaataagacaatctagggaaagagcattaggtatcaagagataa

SEQ ID NO: 3950 - DNA, 765 bp, Saccharomyces pastorianus
atgtctgatgtttcgaaaaccatagcttctattgtagggtccgatgaccctgtgatcattgaattcatactaaatatcatgaatagatcaaaaaatttgcaagagttcatacaaaatattcaaggcttagaagccggcatatcttacgaagacagcactaaattgtataatgtattttcaaaaaatgacaagaatgaaaagagcccagacattgttatagattcagggttaagtcgcgaagttcatcaaatcttaaaggatgacgttaatttggacgaccctgtagtgactgatttcgtacttagcattttaaatgaatccaagtcaataaccgaatttcaagaaaaactaagctccatgcaaagcggtctcgataatgaaacaatctttaaaatatatcaaatcgtatccccgcctatagcgaaagaagaagctccaaaaaccaagattgcaataaaagcagaagcaaaagtgagccaagaggcagaagaaaaagagcggaaaacagacgatttagaccttaatcctgttcttgataaagtatatcgtggtagagtgagaaatataaccgcttttggttgttttgttcaaatcttggggacacaaaggaagaactgcgatgggttggttcatatatcggaaatgtcaaaacaaagaataagggatccacatgatttagtgaaacaaggtcaacacgtgtttgttaaagtaataaaagtacaaaataatggaaaaatatcgctctcgatgaaaggcgttgatcaa

SEQ ID NO: 3951 - DNA, 1341 bp, Saccharomyces pastorianus
atgtccgatgacgataccgcttactctataaagtttctgacgttcaacacgtgggggttgaaatacgtctccaagcaccgcaaggagcggctcagagcaattgccgacaagctggcgggccattccacgctgaccccgatagcagaggagtttttgtccagtgccaccgagggcgaagaggagtacgacgtgattgcgctgcaagagatctggtgtgtggaggactggaagtacctggcctcggcgtgtgccgccaagtacccgcaccagcgtctgttccactccgggattctcaccgggcccggactggctatcctgtccaaggtacccatagagtcgacctttctgtaccggttccccatcaacggtaggcccagcgcggtgctccgcggcgactggtatgtggggaagtccgtcgccatcaccgtgctgaacacgggcacgcgtcccattgccataatgaacagtcacatgcacgccccgtacgccctgcagggcgacgcggcgtacctgtgccacaggtcttgccaggcctgggacttcagcaggctcatcaagctgtacagacaggcagggtacgcggtgattgtggttggcgacttgaactccaaaccggggtcgctgccccacaagtttctcacgatggaggccgggctgatcgattcttgggaacagctgcatgggacgcaggacctggaagcgatttcgcgcatgggcccgttgcaacagttgctcaacggctgcaccacgtgcgactcgctgctaaacacctggagggcccacagacagcccgatgaggcgtgccgtctggactacgcgctcatcgacccggagttcttacagactgtcgatgccggtgtccggttcaccgaaaggatccctcacttggactgcagcgtttccgaccacttcgcgtactcgtgcaccttgaatgtactgccccagggcgtggagacgcgtcccgccacctcagcaacgggggccagggcccacgcccgggacctgctcctgcagaagtactccaactacgaaaccatgatagaatgcctccacacgtacatgaagaccgcgcagagacagaagttcttgcgcggcgtgcacttctgggcctcagtgctgctgctgattgcgacgctggtcgtgacgacgttcaccgccaacagggcgggctggtcgtccatcctgtgggttcttttcgccattgccgtctcgatcacgggaaccatcgacggtgggatttcgtttctgtttggcaggtctgaaatcagagcgcttatcgaggtggagcaggaggtcctggatgcggaacgccatctgcaaacctttctgagcaaaaaatga

SEQ ID NO: 3952 - DNA, 273 bp, Saccharomyces pastorianus
atgacacacaatcctgcaatggttgtaccacctggtgtgcacacttggtgcttcaagacggatgggtgcgcaccactcttctcaaccatcttgactgtgccttctaacaccttcattgcacactccttactttcttgcaatgggattcccaacttcaacccactttccatcaaggattccagcatcaacaaaacaaaggcagggcctgaaccaaccaatgcagtagctgcgtccatattcttttctggcaattcgacgtacttgccaacttga

SEQ ID NO: 3953 - DNA, 456 bp, Saccharomyces pastorianus
atggccgaagaagcaaagaataagcgtccattaggaggacaaaaggaacccattgaaactaagcctggaaaatctgaagagcctaaaccaaaaaaaagaagaagaagaaactacgacgattacgatgctgaggtggccaaagaggaaaccaagacaaaggacggttcgaaaaagagcgaaggcaagactgctgcggaggactcagagtcggacatggacgatgccaaattagacgcgttgatgggaaatgaagtggaagaagaagaggacgatttagctgaaattgatacctccaatatcattacatctggaagaagaacccgcggcaaggtaattgattataagaagactgcagaggaattagacaagaatgaagctactgtaaagcccactaatgaagcaggaagggatgacgaagaagatgaggatgaggatgatgactttaaggagcaataa

SEQ ID NO: 3954 - DNA, 2616 bp, Saccharomyces pastorianus
atgagcttgccttcgacacctgtcaagagcaaagttcacagtgcattatcgatggaacaggagatggacttcaatctaagccgtgatataccgtacccgcttgagaatggacctgccattcctcaatttgatgacacagaattcgctgccgtaccgcgacagggttggaacaagaataagaaacctaatgaccatacacaatctcaagttcgattctcaatcccagatcctaatgagttatcccaagattctccattgaaaattgtctacccgaagagtgtagatgagattcaaagagaaatatctaccgcatcactgttcatgaacagccatggccatttggtcgacatgcgttctaaaatactggttgatgttccggaagaagtttggaaatttcatcataatagaaaagtaagaaatgagaattctcatcgcaggactcgttcggatgctagatcttatgcaagcagtaaattgaaatcgccaagtcattcgaggtcgagatcgttacagtcaattatagtggatacaatgaatacataccgcacaggcgatgccgacaccacttccaacgaaaacactagcaacgtaagccaagtatctcctttaaacatttcctttgacaaacttcctccattaacaccccaaagaaatttgtatcttacacctgaatctccattgaataaatatcgtttgccagtcccattagaaatatcgctaccgccatacctatctccacaaaacaagcataaacagagaaacagtctagtttacgatggagatgggtacagccagtttcaagagtgtaacacgtcatcatccacagagtcttctttagaacaaccgtcatcgtcgtattcagatggaaataactctattccgtacgcgcatcatgaaatatccttcgaattaaacaacgcagatcctgataaatttcttggaatcgatggaaatgccaacgtgaatctgaaaatacaaagaagaaacctaaggagcccacagcatatcaagaagaagtcagatgtcaggagtgagcaggaagggattgaaaacaataaatcgttgaagattttgtcgacaccaaataaactaatagacattcctgacttggatgatatgaagtctccaccaagcgcaggtttaaacggtactttgaaattctttcagcatttcgaaccttgtgaggcaccagcaccttcacctaacaactttaaccctaaatcacaggacaagctcgatatgtcgtttaaattccctgctagttccgctaacaacaatactggtgaagagcgtgcaaataaagattttgtggacacgaataatgaagatttcctgaaaatcgatacttcgcctgtgaaccaatcaatcgagttgaggcgacagatgctaatggatttacaaaaatctccaacaagtaacgacccgagaatgcataagcatagaagaagtagaagcgttcataatattgacgataattttttaaaatttgacgccacgtctacaccaccaccagcaccagcaccagccccaatatctcctgttgagaattgtactccatacacttctcctgaaataccggaaagatcaccactacgatttaagtcatctccaaatacacctagcgttaaatcacctcaaaacaactctttccggcaagaaatgtcagtgccttcgattcaaatcataccggatgaaaccacttcaaatacagtagattcatcgattaccgagaatccagaagagaaaactggccccaaatcgttttctattgaagatgctgacaaatccattgcaatcattcgtgaaacaaaaaaaaatccaacggtagaaccgttcaaaccactgtcttcattcaattcgttcagtcttccaattcagactaaaaaaagatcccctctggaacaatctcttacagaattagccaccaaacaacaaacttatgcagctccaccttcactacctctcaacactgtatctcccaaaagacaactgtcaaattcaggtagtagtaaatcctcatcatataattctgaattttcggctaatactggccttacggatgcaacatctcaaccctctgtaacggctaacaggtcaatcctacaacagaacctaaaaaaccagaaaaaatcgaataataacattgattttcgtcctcattcccagaagaacaacttttcatttcccaggaagggggccacacctacacccgagcgtgtcctagagttcaacaccatttatgagaaaagaaatggtaaaatggttgaggttatcttactagatgaagacgaagacagcagcgttgaaagcaatatcagtccacaatcaaaattaattcaagctcaaaaaagcaaaaacgaacaagataagaaaaacctaaactactataacgaagttttagatatgtgtgaaaaaacagcagacgaagcaaagaaaatcatctatcaattggtggacgaaactgctagatacccgaaaaacaagcaaacaagatcaagagtgcttccgccactaccctttcccttatacgaccaaaacgggaattctttgaacaccaacaagtacggatcaaataccgccgacaacattccacgtcaacaaaacaacttgagataa

SEQ ID NO: 3955 - DNA, 117 bp, Saccharomyces pastorianus
atgatcatcgcggacagcgagtcagccgacaggttcatggacaaattgtctacagaccagtcttccatgatgatggagcaaacaatcagcaggggtaacgccagaatgttgttgtag

SEQ ID NO: 3956 - DNA, 120 bp, Saccharomyces pastorianus
atgccagacagaaaccccagaaagatcgacagaaacgacaaaacgtttcttggagcgtcaaagaggatcaatccggcaagtgctataggcagtttgttcagggctcccaccatggaataa

SEQ ID NO: 3957 - DNA, 1026 bp, Saccharomyces pastorianus
atgagtaagagcaagcatgaatgggctgactcggtggccaactctgggccggcctcgatcctgtcgtactgcgcgtcgtcgatcctgatgacagtgacgaacaagttcgttgtcaacctggccaacttcaacatgaacttcgtgatgctttttgtgcagtcgctggtatgtacactagcgttgtgcgtgctgcggactgtgggagttgccaagtttcggtctcttaacaggaccgacgtgaagagctggttccccatatcctttcttctggtgttgatgatatatacgtcttccaagagcctgcagtacttagacgtacccatctacaccattttcaagaacctgacaatcattctcatcgcgtatggcgaggttgtcttctttggcgggaaagtcacctccatggagctgtcatcgttctttatgatggtgctttcgtccgtggtggcgaccttgggcgaccagcaggccatggcaaccaagatgtcgcccctagaagatcttgaccaggatctggctgagtcggcctcgttcgtcttgaatccaggttacctctggatgttcaccaactgcatctcgtctgcgctgttcgttttgatcatgcggaagagaatccgcctgactaactttaaggattacgacaccatgttctacaacaacattctggcgttacccctgctgattgtttgctccatcatcatggaagactggtctgtagacaatttgtccatgaacctgtcggctgactcgctgtccgcgatgatcatcagtggtttggcgtccgtggggatatcgtactgttccggctggtgtgttcgtgtcacttcatccaccacttattccatggtgggagccctgaacaaactgcctatagcacttgccggattgatcctctttgacgctccaagaaacgttttgtcgtttctgtcgatctttctggggtttctgtctggcatcctatacgcagtcgctaaacagaacaaggcacagaagcaaaaaattctagcaaccactactgagaaataa

SEQ ID NO: 3958 - DNA, 810 bp, Saccharomyces pastorianus
atgagttcaaagacacagggagccaatcctaagggaatttcgcaagtattccaaacccttcaagcgctgttggtttctcattattcacatcgattagattctgacacttctgtcaaaaagacgctagttgacgtacatgtttataacttcatcgccaaattcttatttaataaaattctattaaagaaaaaccataatgatcccaaatgggttcgaaatttctaccaccaggaaaacaataaccctccaaatgacgatgtggactgcgagattttgtgttcgttgcacttcaccacagtttattctattattaacattcaactgatcaaaatcaagacaaatcaaacacttgaaccccagctttcagaatacatctcgatcttgaaacttattgaacacatgtttgccattatcgaaagcctaattcatgtgcttattagacttatatccaggcatgaacaagtaagcatcaacaggaagagagcttattgtcaagtgtatcttgagagagaattgagtttgaagagaacctatctaaggggcttttacaatacagtaagtgctattccaaaagaagaactgcaaggtctcttaaaaatggtcaagatagttattctatctttactcgaagccttagaaaggattgagtggaaatatttcgcggcttttttggaaaagttccctgcatatgagatatcattacaaaaaaaaagagcgtacatacaggctgctctattggttacggccgaaagaaatttgattgctcgttttcgattgtcatgctgttttaataaaacaactggtacttaa

SEQ ID NO: 3959 - DNA, 453 bp, Saccharomyces pastorianus
atgaatgtaattacaggtactaaaattcaaaatgtaatgttacctttcatcaagaaggtagcaaattgttcatccaaacgtaccttgtacaacttcggagtgaaagaaaagaaaagtgtggatattgaagtaagcagaaccgcacaaaccaaaaaaattgaccagtcattgtccaaaaagctccccaaaggtactatctacgatccgtttgatttttctatgggtcggattcatttagacagaaaatatcaggcaagcaagaacgcaaatagaaatgatataatgaaaagtggcgtgaatcccttagagttctatgcaagaccaagaattctttcaaaatatgtcaccaccacaggaagaatccagcatagagataccacaggcttatcggccaagaatcaaagaaggctatcaaaagctataagaagatgccaggcaataggcttaatgtga

SEQ ID NO: 3960 - DNA, 1500 bp, Saccharomyces pastorianus
atgtacaattgtaccactatgcaggattctaatatatgcacacattgcgaacttgaagaaaatccaaatgcattgctctgggtgaaatgtgatagttgtccgcagtgggtacatgtgaaatgtgtgcctttgaagcgcatccactattcagatattccaagtaccccagtttcctcttatccgaattcatggaaggagatcaagagctaccgctgtgtcaaccattatgaagaggagtttcttgctatatttcctcgcggccttccaaatggaaagcgacaaagagatcgtggggaaaatgaagatagcaatcatatcagcaagcgatataattttaggaagaaaaaggatattgactacattgctttgaatgagggcgaagcaaaaagagagaaaatgatccatcctcataaagacacctttttaagatgttttgaaaagtgggaaaataagtcgaatattatcaatgccgccaaatttgctgctacattcaatgatataagggagccatacaaaataagcgatccttggagtagtggtgtgcaagtgccgaaaatggagacaaacaaaggagttttaaccgttaatgatattacggaaattataggggaggattatcgtgttgatgtgatggatgttcaaacgcaaatgaatgagacctggactctgggttcttggaatagatattttactcaaactgaaccaggtaatagagatcgaataagaaacgttatatcattggaggtctccaacatcaaggctttagaacttgagaggcccacatcagtgaaacagaatgatcttgtcgatcaaatttggaattggaacgagggtctcgggaaagtcaatgatgaagaagcagaagaggataatccaagaccaaaagtaaccaagtatatcttaatgtccgtaaaggacgcctacacggactttcatttggatttcgccggcacatcagtttattataacgtcatctctggacagaagaagtttttgctatttcctcctactcaatcaaatgtagataagtatgtcgaatggtctttgaaggaataccaaaacagcttttttctaggcgatgttcttgaggatggttttgcaatggaattgaatgctggtgatttgtttatgatcccgtccggatacattcatgtagtttatacaccagcagattctctggtatttgggggtaatttcctagcaatgcgtgatctagagactcattttagaattgtggaaattgaaaaattgacaaaggttcccaaaagatttacctttcccaaatttgatcaagttataggtaaattatgtgagtatattgtgctttctaaaaataagaagactgttggtgggagagatacggatttgatagccgaagtcagtaactccacaattgagttactatatggataccttttaaaacctggagtgaagtataaacctttgagttttgcttccaggaattatttagtgaaagctttagccgatcttgtcacgtag

SEQ ID NO: 3961 - DNA, 579 bp, Saccharomyces pastorianus
atgggtggtgtgatctatgctatcctggttcccaactctctaaacgggtttggtcagttctgttgtgttctattggctttgtccaccattgccaataatattccagacatgtatactgttgctttatccgcccaagctttgtgggcacctttggctaaaataccgagagttgtctggaccatggctggtaatgccgcaacgttgggtatctctatacctgccacctattactttgatgggttcatggaaaacttcatggactccatcggttattacttggcaatctacatcgccattgcctgctccgagcatttcatttacaggcgttcgtttagcgcttacaatgtcgatgactgggataattgggaccgtttacctattggtattgcaggtattgctgccttatttgttgctgccttcggcgttgccttgggtatgtgtcaaacttactgggttggcgaaatcagtcgtttgatcggtgattatggtggtgatattggtttcgaattaggcggaagttgggcatttattgtttacaatattgtcagacctttagagctcaaatattttggtcgttga

SEQ ID NO: 3962 - DNA, 1587 bp, Saccharomyces pastorianus
atgtctctgacacatggaatgtctgtagctggtactaaagatacaggatatgcgctcaaagatcttgagtctcgagctcgcgatgttaaaactccttcagccgatgaatactatgaagatacagaatcacacggaaccgaagaactagttgagaccaagttgtcctttttaaacagagttgctgccagtctaagcgctgagacaaagggtattgagccaatcacagacgatgaaaaaaccgacgactctatactgaacgccgcgtccatgtggttttctgctaatatggttttgcctgcctacgctatcggtgccctaggtcccttgatatttgggctgaatttcggtcaaagtgttctggttatcattttcttcaatcttatgggattgatatctgtagcgttcttttctgtttttggtgcggaactaggtctaagacagatggtcctttccagatacttagtcggtaatgttgcagcacgaattttctctttaatcaactttatcgcttgtattggttggggtattgtaaatactgtagcaagttcacaagtgctgaatatggtcaatccaggtcatcagtgtcctctttgggccggctgcattgttattatcggtgccactgtgattgtgacattttttggttataatgtcattcactcttatgaaaaatgggcgtgggtaccaaattttgctgttttcttagtcatcattgcccgtttggcaagatctggaaaatttgtccttggtgcatggacatctggccctactactgcaggaaatgtgctatcgtttggttcaactgtttatggatttgctgcaggttggaccacgtacgccgctgattacactgtatacatgccaaggaaaacaagtaagtacaaaatattcttttcacttgtagccggtttagcagctccattgtatttcaccatgattcttggtgctgccgtagcaatgactgctgtcggtgatccaacgtggagagcatattatgatgataactctattggtggtttaacatttgctatccttgttccaaattctgttcatggattcggccaattttgctgcgttttgttgtctttatccactattgcaaataatgttcctaacatgtacacgattgctttatcagtgcaggctacgtgggagcctttggcaaaagttccaagagttgtttggactttattaggtaacgcagccgctttagctatttcgattcccgcttgttattatttttctactttcatgaattactttatggactccatcggttattacttggctatctacatcgccatcgcctgctccgagcatttcatttacagacgttcgtttagcgcttacaatgtcgatgactggaataattgggaccgtttacctattggtattgcaggcactgctgccttaatcgtcggtgccttcggtgttgccttgggtatgtgtcaaacttactgggtaggtgaaattggtcgtttgatcggcgattatggtggtgatattgggttcgagttagggttaagttgggcatttattgtttacaatattgcaagacctttagaactcaaatactttggtcgttga

SEQ ID NO: 3963 - DNA, 1542 bp, Saccharomyces pastorianus
atgactgacgatctagatagttccaaagttcattctgaaagctgccacaaggctgggaaatatgctggctatggtaccacacataagatcagggctcaattgaactttagcgatgagaagaaatggaaaaagttttctggcaggaggctagagctcattgactcattcgggttgagtcagcataaagcaagtgaacaggacgataatataaaacaaatagctaccatactaagaaatgaattcgagtatcctgagacagtctcaggagaatttgagaagttggttactgctgctgttcaatcggtgagaaggaacagaaaacgttccaaaaagaaattactggactcaaaaaagaagactgcgtcaggcaagattcaaaaaattcctttgtctccgccaagttcaagcaatatggggtcttcctgttctgcttccaatgcatcaagctctgacgaagatgctagtgtcaaagaggaacccattttacctgctcttactagcacgacatcagtaaaattgctatctaacccgaacgaatgcaatctcccatcagtgtcaaatcatctccgctctttactaaagaagaacactttggggtttcacggctcatctataccatgtgcgcccagtgatgataacgcattaccaaaacttcgtgtggaggctcaatctttagtcccaaacgaaaactacgactctatcgttaaatcaataattgttgatatcgtgaataattctgttccactacctgagcaaattcatagagatagatttgctagaccatatttaacagaaaaaacaagctgccaaaacaaagttctgatatcaaatagtctaagaaaacttattctgtcaaagatacataactcaaaaacgtgcttaggtgtctgtaaagatgaaaagctgctggattcctttacaaacttagaaaccctgggcgaaaattcactaagggcttctatctcatttgtagtagaaagcagcttcacacatttaccatcctccacaaggcagtaccttactgacaggattttgtcgatggacttcttgactatactatcgcaaaggttattcgtacccgccactagccaattatttgccgatttaccgcaaaaaaagatccaagtcagagtgctgaacctcttattagggagtcttgtcaaagattatgggttcgacacggccttggcccccataaatgaagtcatatatcacatgacgcttcaccaatacccattagtttgtattcaaaaaaatccgaacgttacgaaaacgaactcagcatctgaagtactccgtttacaaacttcatcagaaagtatagctaaaagagagcctcaaccgaacacgccaaacaagtcgcaaaagtgtaccgatctcacacaaccttcattggatgcatcaaacacatacaacgatgacggattaaagatgttgagtgcgatttcattacaaatcgaaaattccagacttccggaacgatttaataatgttccaaaacaaacaggtgcctctgcaccaatcctccctgcatttccatag

SEQ ID NO: 3964 - DNA, 153 bp, Saccharomyces pastorianus
atgtgtagccacagggtgtgttttgtagtcgacaaacaccatggcatcgtcatgtgtacacactacttgaacgtctatcttgaatggcctaccatgatactcggtttcctcaccatagtgccacacgattttatcaaaagtttcgtcctttga

SEQ ID NO: 3965 - DNA, 1221 bp, Saccharomyces pastorianus
atgccgccggcgagcactatcaccatcattccacaggctacggtgtttacattacctttgcttcccaaggatgatgccgcaagatgtatagcccaggtggatggaacgtatatggatggtcgcctcattaaagctgcatatggtaccactaaatactgctcttcctacctcagaggatcaccatgcccaaatccaaactgtatgtttttgcacgaacctggggaagaagctgattctttcaataaaagggaactacacaacaaacaacaagcacaacagcaaggcggtggaactacgtttcctagaactggcataccaaataatgtacccgccagtgcagccggttcaaacacaaatctactgagtgagcacttcaacagcacaccgtcaccagctgctatgagggctcaattacatcaagacagccacacaggtgcagggacgcctgttttaactcctgctccagtccctgctggatcgaatccatggggagttactcaatcagctacgcctattgcatctatcaatctctccaagaacagtagctccatcaacttgccaaccttgaacgattccctgggacaccatactattaccacaactgagacttgtaccacaactacgacaactatcacgaacaacaatgtcacaactcactcccatggcagcagcaagaaaaagcattctcttgctgcggaagaatacaaagacccttacgatgcgttgggaaatgccgtcggttttttggacacaagactacattctctatcaaattaccaaaaacgtcccgtatctatcaaatctaacattgttgatgacgagacctatagaaaatatccgtcattattttcctgggacaaaatcgaaacttccaagaggagtgataacacattggctaataaactcgtggagatactggctattaagccaatagactactctgcttccgtggttcaattcttacaaagcgtgaacgttggtgcaaatgacagcagtgcaattactgaaaacatgaaagcttcctcacaattaataagactacaaaccgtgcaaccgcaaattcaaccccctctaaatgtcagcacccctccaccaggtatctttggcccacaaaataaagtacccatgcaacaacagcaaatgggtgagacaagctcaaggaactcatctgatctactaaaccaactaatcaacggaagaaagattattgctggcaattaa

SEQ ID NO: 3966 - DNA, 621 bp, Saccharomyces pastorianus
atgatgaatccacatgttcaagaaaatttgcaagccatccataacgccttaagcaattttgatacatcgtttttatcagaagatgaagaagactactgccccctttgtattgagccgatggatattactgacaagaatttttttccctgtccctgtggttaccaaatctgtcaattctgttacaataatatcagacaaaacccagagttaaatggccgttgcccagcatgccgtcgtaagtacgatgacgagaacgttaggtacgtcacactgtctcctgaagagctgaaattggagagggccaagctagccagaaaagaaaaggagagaaagcatagagagaaagaacgtaaagagaacgaatatacaaatagaaagcatttatctggcactagagtcattcaaaagaatttggtttatgtagtcggtatcaaccctcctgttccatatgaagaagttgctcccgctctgaaatctgaaaagtattttggccaatatggtaaaataaataagattgtggtaaatagaaagacaccccattctaacaatgccgccggcgagcactatcaccatcattccacaggctacggtgtttacattacctttgcttcccaaggatga

SEQ ID NO: 3967 - DNA, 756 bp, Saccharomyces pastorianus
atggccttacccaataaagtctgtgaaccctttgtggaagtaatcgaaagcgttcacggcaaatcaaagattattgatttatccgccgatcataggtttgtctcggaatcagactgggcctatggcttaccagaattgaacaatagggaaaagattgctgccgctacgaaaattgccaatcctggttgttatgcaacagggtcacaattgactatcgcccccttggctaaatacatcaacggccttccaaccgttttcggtgtttcaggatattctggtgccggtacgaagccttctccaaagaatgatcctaaatttctgaataacaacttgattccttacgcgctaactaaccacatccacgaacgtgagatttctactcgtattgggcacgatgttgcatttatacctcatgtcggacagtggttccaaggtatttctctgacggtctccattcctatcaaaaagggttcattgtccaccggtgaggtcaaacaactatacaaagatttttacaaggacgaaagacttgtccgtgtcattgatgacattccactggttaaagatataggaggcactcacggtgctgtcattggtggctttaaagtcaacgatgcccaagatcgtatagtaatttgtgcaactatcgacaatttgctaaagggtgcagccactcaatgtttgcaaaacatgaatcttgcgttaggttatggagaatacgctggtattcccaacgacaaaattatcggtaactga

SEQ ID NO: 3968 - DNA, 1650 bp, Saccharomyces pastorianus
atgccatctgcaagcttactcgtctcggcaaagagactcaatgcttccagatttccaaaacttgcctctttattaaataggtctgctacagcagggtttgcgtctgtaacttcgagagcctcaccatctgttacttttacaagaaagaaagtaggctactcaaagagatgcatttcatctactgacgactcttcggctactaggtccactgttatccaactactgaacaatatcagtacaaagagagaagttgagcaatatttaaaaaacttcacttctgtttcgcaacaacagtttgctgtcatcaaagtgggtggtgctattattagtgataacctacacgaattggcctcctgcttggctttcctgtatcatgttggtctatatccaatagtattgcatggtaccggtccacaagtcaatggtagactagaagcacacggaattgagccggactacatagacggtattaggatcacagatgagcacacaatggctgttgtcagacaatgctttctagaacaaaacctcaaattggtaaccgcactagagcaattaggagttcgcgcaagacctatcacatctggcgttttcactgctgactacttggacaaggacaaatataaactggtggggaatataaaaaacgtcacgaaagaaccaattgaagcatctattaaagcaggtgccttacctatcttaacttctttagctgaaactgcttcaggccaaatgttgaacgtcaacgctgatgtagccgcaggggaattggcccgtgtttttgaaccattaaaaattgtctacctaaatgagaaaggtggtatcatcaatggctctaccggcgataaaatttctatgatcaacttagatgaagaatacgacgatctaatgaaggaaagctgggtcaagtatggtaccaaattaaagattagagaaatcaaagaattattggactacttaccacgctcttcttcagtcgcgattatcaacgtacaagacttacaaaaggaactgttcactgactccggtgcgggaactatgattagaagaggttacaaattgctgaagagatcatccattggcgaatttccatcatctgatgcactaagaaaggctcttcaaagagatactgatattgctactggtaaagaatctgttgcatcctacttgagagacttggaaaatgccgatttcgtttcttacggtgatgaaccccttgaagcactagctattgtgaaaaaaggtacaaaggttccgaaattagacaagcttgtatgttccgatgcggcttggttaaataacgtcaccgataatatattcaatgccttacgtcgtgatttctctgcattacaatgggtagtcaatgaagatgatcctaacattgcatggcattttgatagatctcaagggtcgtatttgaaaaacggtaaagttttgttctggtatggtattgatgacgtaaataacatctctgaattggtagaaacattcgtcaggtcttttgataccactcggtccaaaccatgcagtacgaataacgtagtggaaatctctaataacttaccagttatctgccaaggactaacactcgccgtgctgatggcaagtccgtacatggcggacaggcccgtaatgcctgtccgaagagga

SEQ ID NO: 3969 - DNA, 102 bp, Saccharomyces pastorianus
atgatgatatttggattagggagactgttttatgttattctattactaattaatgctgttgctgtgctgagtgaagaaagattcttaagaaggagtatgtaa

SEQ ID NO: 3970 - DNA, 135 bp, Saccharomyces pastorianus
atgattcgtacagttggcttaggaagatcaaatgatgagacacctgtttttggtcaggatcaaaacaccaccaagtccaaggttgtacaattgattggtgccgtacagactttactgaggagtatgttattttga

SEQ ID NO: 3971 - DNA, 888 bp, Saccharomyces pastorianus
atgagttgtttatcgatacttttcagtattatcactgtatggaatatagctacgacttttgcggcaagcgatagtatttaccttaagggacacagggtggggcaagatattgacaacctatacaaagtgtatgataatggcactatgtatcccgtcactttcaatgagtggttaaatgatctatctaggacaaacgactcaccatcaggtaatgtgaccatatcaaagcgtgatagtgaaatttcctgtattaatgacacatgccagcacgtagattaccatgtgagtgacaaaggggttattactatagacatagctacgtatagcactcctgccgaacgggataactctgtttcaagcaacgcatcgtatggactttcaaaacgtgaaacaacgtatgaaacgttttgtaagaagaaaatatacggtatgaatgtttccggtttctgtaatgcctatgacttcgctgttcctgctttcgactttggtagtaatgtctacactcttgtcagtggtatcattgataagatcaaaaacactacgaagagggataagacagcgtgtttaggttacgagttagatcatgtgataatagatcctgccgttgattggtctatcttcgtttctacttggaaacaaggatcggctaaccgtgacacacaggcctctgctgacagcttgaaatgtgctgcccaaaaagcacttgacagtgaacataatcaccaaaaaacggctttctgtatccatctagatagcggaggatcgtttaacttagacatcaggctaatttccgagctttcattttcgaaatacaacccctgggctctttcatgtccaaaggacaagggttctaactcttggcaggttgtgagtgactgttttgaatag

SEQ ID NO: 3972 - DNA, 1968 bp, Saccharomyces pastorianus
atgctactccgaataaacgctaagttttgcccaaaagagcagttactgaaaaggacattctattcactaactaacttacgaaaaagtcaagtaagagaaaggttacatcagctggaaaagaatgattttgtaccgaataaaacttccaaagaattagacaggttaaactccaagaaaagacgacagttaaagaaattacaaaagactgcttaccccaaggatcaggctctccacgttcttcgtaaatttcataatgtaaataatgaagcattggcagatacaaaattgggtcccactagtcgaacagatctgaagtttttgtccttgactaaggataagagattgttctataccatattaggtgtaaatggtcaacaattaagagatgccaaattaattgccaatgatgttcaaaaatttttgaaaagaggtcaattagaaaaggctgtcttcttggccagattggctaagaaaaagggtgtcgttgggatgaatctgattatgaagtattattttgaagttttgaaatcccaacagagtgctgttgatattttcaattggagaaaaaaatggggcgtgcctattgatgaacattcgatcacaatactctttaatgggctgtcgaagcaagataacctggtctctaaaaaattcggggagcttgtcttgaagacgatagacagtttgagcgataaaaatgagctcaacgggatggaatataatactgctttagcggcattgacaaactgtaccgatgaaagcttagtgtttaagcttcttaacaagaaatttccaggattgaaaaaagacgctatcacctataccttgatgattagatcgtgtactagaatttcagatgaggaacgttttttggtagtactcaatgacttgatgaataaggtaccttcttattgcattgactccaagttgttgttcgaatattgcggagtagtacttgaccggaagttttcaaaatccgagagtcaagagatggggctgcgggccttgtgtgaatacttcctatttgataaggccatctttaataaatacttgcaatctagcgagtctctagaattggtttcgttgagccattggaacattaacgagccatttcctctcaataagcatgttgtggggttgtttatgaactactgtctaaggagcaagaaatacagttttgctgttgaaacatttcaagcgttagaagaacggaataacaaaatgctagatctggacatatatcataagtacatggagacgcttataacagccaggcctacgacatgtggcgaagagtgcatggatgtctatgaacgtatagactcattggcgtcgcacatttccgttacaaagagaacattgattttagtgtataacgctttccaaagacaaagtctcaaagctgttacaaatagagatgaatccaaaaccgaaattattctgcggaagattcaaggattcattggtcatacggaggctatctactcttcgaagctaaacgaaaaggtatatggctttgactcatggaagttcttgtttcctgtcctgaaaaacctcaacatgcatgataaagtgaatacgatgggcttgaaggacgtactagacgaatacgtgaaatctttgctaaacggcatcttcgatgcgggggccaaagaaagcgtagaagacaagcggttcgttgcgttagaggggattcgtttagttaagattttgaccgagagaatcaagctaccgacgctagacagcgaggagatagctggactaaaaggcgtagataggagcaagtttctcgccagaagacatctcttgagactcaagcaaatgttactggagaatctggctattattgagggcaacatgaaagaaaagaacgttgataacgttggtgatgacactggcgccagtaaagagggagtactagaagacctgcttgaattaatactagaaaccagctacgagaaattctag

SEQ ID NO: 3973 - DNA, 255 bp, Saccharomyces pastorianus
atggacgccaataataaatccaaggagaataatgacattccagatgtgaaacctgaagtaaagggcaaaaattcaggtctgcgttcgtttatgcgtaaaaagactcagaatgttattgatgaaagaaaattgagagttcagaaacaattacataaggagaaaagtatgcgtaaaagaaatcaacagattaaagaaggtgtgatttcggaagatcacaaagatgtcgttgaagaggcattaagtagatttagttag

SEQ ID NO: 3974 - DNA, 1149 bp, Saccharomyces pastorianus
atgggctacaagaaaactggtcacaaaaaccacacaaaggagcgagaaaaccaaaataaatttgaacgttcaataaatactaccgctaatagtaataacaatgtcaataatattcgtaatcaaacaaaggataagaaattgagagctggtttgaagaaaatagatgaccaatacaaaaaggcggtctcttctgccgcggccacagactaccttttacctgaatccaacggttatttggaacccgaaaatgaactagaaaagactttcaaagtacaacaatctgaaattaaatccagcgtggacgtcaccacagcaaacaaggccttagatttatcgttaaaggaatttggcccttacaatataaactacgccaagaacggtacacatctattgatcacaggccgtaaaggtcatgtggcttctatggattggaggaagggtgagctacgtgccgaactgtttttgaatgaaacctgtcattcagcaacttacttgcaaaatgagcaatattttgccgtggcacaaaagaaatatacatttatttacgaccatgaaggcacagaactacaccgtttgaaacagcatatcgaggcaagacatttagaattcctaccatatcattacctgctagccactgctggtgaaacaggctggttgaaataccatgatgtttccactggtcaactggtttcagaattaagaaccaaagccggtcccaccacagcaatggcgcaaaacccatggaatgctgtaatgcatttaggccattcgaatggtacagtttcgctatggtctccgtcaatgcctgaccccttggtaaagttactctctgccagaggcccggtgaaaagcattgccatcgacagaagcggttactatatggtcaccacaggtgctgataaatcgatgaagatatgggatatcagaaacttcaaacaactacattcaatcgaaaacttgccaacaccaggcacgaacgtttcaatttcagataccggtctattagcattgtctcgtggtcctcatgttacattatggaaggacgctttgaaactaagtagagatagtaaaccatgctttggatccatgggaggaaaccttcatagaaacactccttacatgtcacatttgttgccggtaataaagtag

SEQ ID NO: 3975 - DNA, 930 bp, Saccharomyces pastorianus
atgggcctttgcaccctcccctcactcaccgccagcaacagcattaaacaacgtcacactgtagagatggctgaattgactgaggcagaaaagcgcaggctgcttagggaaaggagacagcagaagtttagcaatggaggtgccagttccagactgaataaaatcaccgggcaggcaagcagtcatttgaacgcagaatctcccttggatgctcccagcattccaacgggtaccccggtggagagttctggtgtggctactccagccagcaaaaacgacagcagcgcggctcctcaatttgacttactaaagcaattagctgccatgcagggccaaggtccgggctcaggctcaggctccccaccggactcttccactcctgatttgttttccttactgagctccatgaatactggtatgccgggcgcagagggcacaccatcacttggtcaggcgtctcctatggctcccatcaatcaagctgccttagactaccacgattacttgctcaataaactgaaggcatggaccattttggtgaaatgggtcttctttttattgccctatctgtttctacttacaagaccaaatgctgcggtgtggtctgctttcgcattcgctcaatcggcttggtttgcgcctttgagaaacccatctaacttcaccactgttttcgctacatttgagtttctttctatatccatttactaccaactgttgaaaaatgtggagcataagagtaagattagaaatttgcaagatacaaacaaactggtcaagctagtttcgcttgtgcccgaggggatgattcctatccccaacctgaagggcaaaatagtcacggctttgcaatattgggatctgctgtccatgctcatcactgacatttcattcgtattgatcatgctaggcttgttgacgtacttatag

SEQ ID NO: 3976 - DNA, 195 bp, Saccharomyces pastorianus
atgttcaaacaaaacacacaccagtccctctcaggctcacctacagactccagcaccaggttcaggccatccaccatgtgggcaccacagctcgcggtttcttctgccttttcgacttccagcaacaccgccgttcctgctgctgctgttgcaggtgagtctgttgcgcccgcagtgtcaaaggaacagtcatag

SEQ ID NO: 3977 - DNA, 393 bp, Saccharomyces pastorianus
atgtccatatcgttcactcttttgttcatgttcttgttcttttgtcccagcaaatccgcacggcggggtcaccccgaaaatctatccgaaatgcattataagaacagccatatggcatctatactcgttccttcgccccttaccacaaaagaccaatgttcaaacaaaacacacaccagtccctctcaggctcacctacagactccagcaccaggttcaggccatccaccatgtgggcaccacagctcgcggtttcttctgccttttcgacttccagcaacaccgccgttcctgctgctgctgttgcaggtgagtctgttgcgcccgcagtgtcaaaggaacagtcataggcgatttcccaggaacaccccagattataacattaatatctaa

SEQ ID NO: 3978 - DNA, 81 bp, Saccharomyces pastorianus
atggctggccatctaaacccatttgcatcacggcccagttccgccactgatccagttagcctgcttactccgatgccgtag

SEQ ID NO: 3979 - DNA, 2538 bp, Saccharomyces pastorianus
atgcgcttcaggggtagatgcgcagaaaccgcgcacgcgtctgcaccgacgccacaaaagcgggccgggccgggccgcagctgcagccgggctgccccggctgttgcctccccccctcctccgagtcgccccgtgctacgctacgctacggtcggcaacacgtgtattgccgatgcggaaaacaggatggacggcacgggcaggatccgcgcgttgcctggcgcatctgtgcccatcctatctatctctctatccgtctatctaccgcccgtttctattgttatcgtcctagcacgcacactccctggtgctccaccggcaatcgaccaggcagagacagaccagacggcaacagaatactgcactgcactgcactgcacacaggacggaaaggaaagatcccggctcgaatcaaaaaataaaaaaatacaaacacacgtcagaacgtgtgtttgttctctttccctctcttctgtacacactcaaacccccccccggtatctttctttttttttttttcttctgtggtatatttatccgtgcttcgtcctttccgcactcagtctcatcccatctcatcgaaaaaactactgtgcacgtcccgctctccttctctgctccatgatgtccgtctcaaccagattgaaccctgcctccattcatttgagtaccatgagccctcatcctcagcttcactcgctctcccgccagccacacgcttccatgtccagcgacgaggcccaggagtcgtcgccttcgctgccaccttcgaagaactcgagcaagaacccctcctcgtgggatccgcaggacgacctgctgctgcgccatttgaaggaggtcaagaaaatgggctggaaagatatctcgcagtacttccccaacagaactcccaacgcgtgccagttcagatggagacggttgaagtccggcaacctgaagtcgaacaagaccgcactgatcgatatcaacacctactcgggcccggtcaagatcacaaacactgacagcgtccccgacgaggaaaccgctatcgaggcgcccgccagcgcctccgcgacgccatccattccgattccctctagaaaggcgtccttgccttcgttcagcgcatcgatgtcatttgcgcactctccgtcgaatatgacccctcccgcaatcgtcccgaacgctccctcctcgataccgttcgtcccaccccagctgcccgttgcacacctgcaccaccatccgcaccaccacctgcaccaccacccgaaccataaggctttgaaacctcggtcaaactctcattcgttcacaagctcgttgaaccaggaccccgtggtccgcctcaacgacgaggaaaagtacgggttcattcctaaagtgtttgttaggtccagaagaagctcgtttgcctacccgcaacaggccgccataaccaccaccccatcttctccaaattcctcccacgtcttgaactcttctttgcttggttccaagtctaggaaggactcgtttgccaactggtccagaagatcttccttcaacatctccagtaacaacacttcaaggcgctcttccatcgttctggctccaaattcagtgtcgaacgtgttcaacgccaacaccaacaacagcagcagcagcagcaacacgaactccagaagggagtccatcatcaaaaaagaatttcaacaaagattgaaccatctgaataccagcggcgcctctaccccgagcaatggagccattttccccgcctcttataccttcatggacctaccacgtcgttcgtccgtttcatcgtcatctaccacattgcccaagttcaagagaggctcgctttcgggtcattctacaaacccctccaagtcatcatggtcaagggatgaagacatcttactagtggaaaacaaaaagagaaatttgtccatgatggagttgtcaattcttcttccacagagaaccgaggtggaaatccaatggagactgggcgtctcgtcaaacgatgccgaggaactatctcccgtacattcaccccagagaaccctggccaagaagattcgcccaagaatgttccaaaccgcctccaccacggataacaacaaagaaaacgataatgtgcgcgacgatgacgaagatgatgtagatcccttgcatcgttccaaaggatccgcacacaaaaccgctttttcgtccagcagttccaatttgtcctccaaggatgtttctccggaccccattttttcaccagatccagcagatgattcgtccaatgcttccgactccggatcaagattcacaatcacttccgagacgagcttttcgaacaccaccgaccgtgccaccagctccaagcacccacacgacatcactttgttggacaacttccgttccgaagccatcactccaagaccaaagccttcctccacgactacatccatcactaccgaaaccacttgcaacatgatgaaccattccagctctacaaccaccactacgaataatagtccgctgccaagcatcaatactatcttcaaggatatgctctaa

SEQ ID NO: 3980 - DNA, 4005 bp, Saccharomyces pastorianus
atgaccaaagcgctccttagtctcaaatcagaaataaacaaccagtatcaagagctggcccgactgcgcaggaagaaagatgatttggagcatcttcgggattccacaatatctgatatctattctggatcttactccacagatcatttacaaaagcactcaatgaggatacgggctaatacacaacttagggaaattgacaactcaataaaaagaaccgagcgacatctttttgacctcaaacaacaattcgacaagaaaagacaaagatcccttacaacatccagctcgattaaggctgacatagggagcatcagaaatgatgatcttcaaaatatcgacagcgaagaatcaaacggccacaatagtttggcagaccaaatcactcttgatgatgagtatctaaccactcccacttctgcaactgagctcaatagtcagcaaaatttaaatcgccatggtacgataaattcccaaaataatgagaatctttccactctttctgtttcaaataatgacgatccaaatagggggaatttaaaagataataaaatggaaagcgatcacggaggcattgacaacgaaaatcaaatctttaaatccacaacgactgaggcagctacatggctcgtaagcgactatatgcaaagttttcaagaaaaaaatgtaaatcctgattttattgctcaaaaggcaaacggcctagtggttttattaaaagagcattccgaaataagaaaagatttagtgctaacttcgtttatgtcatcaatccaaaacctgcttcttaatgaaaacaaacttatagcagcatccgcttacagggtatgcagatatttaattaatggttcaagttttattgatgaactgttggaattgaggttagatgcattcattatcatttccttagcaaaagataactcttttcaaattgaaagagaacaggcattgaaactgatacgaaggttcatcgaatataacactggtataacacagggaattacgcaagccattatcagttgtgttgaaaaacctgaagactctttgaggcatatggctttggaaacgctattagagctttgttttgtcgcaccagaaatggttaaggaatgccgtggtatgagagtgatcgagggatttctacaagattacaattctttctcactagcgtgtgtgatactggacactgttttacaattgatggctactcacaaaacaagacaacattttttgaaagattttaatgtatctgtattaaccacagttttctccgatacaaacacaaaatcaaccgttaatgtcgaaaaaatgcaaaacgcctctacacttatttcgatcacattaaatagttataatggattcatgcttttttctaacgacaatttcaaaccacttaaacaattggtatctttttttcaaattccaatatgcgcccagtacctcattgacatttttctagatgttttgaaaatcaaaccattgccatacaaatcaaaaagcaggcactctcatgctttcaaaccgattccttcccaatactacaaagaatgtatgtctgtgaaccaaagactagcactaattgtgttaattcttgacaattcaggattcgtctcccatcttcttgaactcttgaatgatgaggatagagatgacaacctggtggcaaaaggcagatacctacttaccgagtactttaatctcagaatgaacctagtcgataataagtacacctcggtgtcaagaccaatttccaaggaaaacttcacttacgttgacgaaacattccaattcaggaagatcgcctatcgaatgaatagaaatagaaatacaattggaatgtcggagattgattacgtccaaaacataaaggcattctctaaaacggtcaaagagaacactcttcttcgcgaagtagatgattttcgatttagaagaatggtttatgactctaaagttttgcaaacaaaagacttcacacgatggaattggaacataataaacgaactactcgaaggaccgctattgaataagaaacagttggaagaattagtgaaatcaaccaagttcattagaagattattggtgttttatagaccacttaggttaagattttctaatgttaatagaggcgcaaaattgtctcaaaagtatgttcaagttggatgtcaattttttaaaactttaacggcaacgccagaaggtataaaaattcttatggatgataccaaaatcataccgcaattggcatctctaatgtttagagccatggagggaaacatatcaggaaatatcttcgacaaaaacacgttaaaggagaaaatgatatatggatatttcaaatttatcggaattctgacgcaatcaacgaatgggattcatgttttaacaaggtggaatttttttactgtgatttacaaaatgttccaatttgaatcgaaactggggctcgaatttttattattaactatacctgagttagatttaaagtattcatcacattgccgtgccattatgggcaaagcccttgttgttgcaaatgaaaaagttagaatcaaggccacaaagcatattggtgataaactaaaggaattattatctatcaaagaatgtgatctcaagttaagagcaaataaaactagattacagcaatataaaatggaaatgttaacaagacaattatacgatttaagcccgagtgtagttgctgtagctgaccaagctctatatgaatgtattgttgcaggcaatggttccgaagagttaggtacctcatttaggatgtttttgaaccaaatggtgtttatcaggtcaccgatacttttcgaattattgagtcggccatacgggtttcagttgttgaatgaaattaatttcgtgaaggaagaaagagattcatggctgtccaaaaaaaacgtagattatgtccatattgtggaagaattcttgaaaaaaaatcaatcaattaatacgaaatcccttacctttcaacaaaagggtaggttaccgctacatttctatgaaagcttgacaaggacagaagatggaattttgctattaagtcaaacaggtgacttagtttctttcatgaatgttataaagagatatgttaacggaggtagtatggcaacgatggaagatgctaaagaaattatggatttgaaagctgcgttgtggtgcgttgggttcattggatccacagaattagggataggcttactagataactattcgttagtagaagatattatcgaggtggcatataaagctagcgtaaccaccgttaggttcaccgcattttacgtccttgggttaattagcatgacgcacgaagggtgcgaaatcctggacgaaatggggtggaactgttgtatcagcgtacaagatgaacctatcgggattgcactgccaaaccggcttgataggttcctatcatataacgaaaataaatggtcaacgtttggtgagtatacagacgaaatgattgttttcgatagaaacaatggtgatctggctgaaaagagctcacctatagagtttgatttggataaattattgagcgagaaaaatactgcagagaatccattgaatgaaagaatcaccggcggtaaatataacaaggatatcacaagccaaagcattactgtttcggatgaaaacactagtcttttcgcgaacgagagccttccttcgccctacgtaggacagtatcgcaatgacgaggactccattgagcgtaaagtgctgcatatagtgagtcaattgggcaaccacatcctttcgaaccgcgcagtaaaggaaatcacagaaataaacgataagtatggtccgaggctctttgaaaatgagagaatgtttttcaaagtgttcaatatgatgtctaagtatcggttcaagccgcatgtcagaaagttcctttgcgggttattcatcaacaatagagcgcttgaaaatgtcatcaagcatgacaacaagagagacaaaagaccaacaaacttaacacattag

SEQ ID NO: 3981 - DNA, 423 bp, Saccharomyces pastorianus
atgaaaaatctcgatcacttcctattgttcttcggatataacaacaatgttttctcaaaacggaattacacacaccagggaggacacttctcgttggaccatctcgccgagtctttttatgatttcacaatgagcatacctcgcagtacaaagcagagtagccctctctcaagtcgacaccgttcagtgactaacgtaactccattattaacaccgagacatagccatgataactcaagtacccaaatatcaagtatgaagaacactacgtcaagtagtccgtctacaatcatgaacgaaagttctaagagaaacaagcaaaacctggtcctttcaacctcattcatatctaccaaaaactggaaaatagtgcaccttcaccgaccagtcccctacaagcaagacgaacgagaagcacaatga

SEQ ID NO: 3982 - DNA, 279 bp, Saccharomyces pastorianus
atgttccaactgaactacaagccgccaccgttctctcaaaggagcgaggcaatgtctgcattgacgtttgcgtccgctgcttccataggtacgttcagtacgttggtatttggattttgttgggcatttgatgtttcaaccgctagagaattcgtcttcaaggcaagagaattcatgggtctccctcaaacgtcagacactgatacaagtatggacgaagaaacggcaagtataacgaagcaattacaagaccttttatcaagcgacaaagacgagtaa

SEQ ID NO: 3983 - DNA, 162 bp, Saccharomyces pastorianus
atgatgacaaatacgccaatgagcagcactatgactgatgcgaagaagcagtacaagagaaggaggatgctccaaatggtcaagttttatggtgcagccagtttcaccctcatcactatgaggctaatctccaaggccataagagtacgaaaatgtatgtag

SEQ ID NO: 3984 - DNA, 303 bp, Saccharomyces pastorianus
atggaaatatcgattatcggaagttacttattaatgagattctgcttcgaagacaaagaagtccgtaacaattggagatggaagtgttttgagatgggctttagcggtggggtgtatatggaattatactctctctactacattttcgcggtactgaatatccatggtttttcatctattctaatctccatttgttatagtctactcttcaacataatgtgcggtctgggactgggcggactgagctacttaacggcttcgtggtttatcaataagatttaccatttgaaagtcagcagataa

SEQ ID NO: 3985 - DNA, 348 bp, Saccharomyces pastorianus
atgaactgtgctgacaacagtggtgctagaaacttgtacgtcattgctgtcaaaggttctggttctagattaaacagattgccagccgcctctttaggtgacatggttatggccactgttaagaaaggtaagccagaattgagaaagaaggttatgccagctattgttgtccgtcaagctaagtcttggagaagaagagacggtgtctttttgtacttcgaagacaatgccggtgtcatcgccaacccaaagggtgaaatgaagggttctgccatcaccggtccagtcggtaaggaatgtgccgatttgtggccaagagttgcttcaaactccggtgttgttgtttaa

SEQ ID NO: 3986 - DNA, 249 bp, Saccharomyces pastorianus
atgggtgacactttggggctgtatagcgatataggcgatgacaactttgtatacaaggcaaaggcgttgtatccctacgacgcagatggcgatgatgcttacgaaatttcattcgaacaaaacgaaattctacaagtctctgacattgaaggtaggtggtggaaggcaagaagagcaaatggtgaaacaggaattattccaagtaattatgttcagttaattgatagccccgaagaaatgcatcgttga

SEQ ID NO: 3987 - DNA, 1131 bp, Saccharomyces pastorianus
atggctaaagaggtgaaggaagcaaggagaatcgacttgaacgcgaggtcgaaaatgtctgaacttaacacactactaaaggaaataaatggttcacttgctgccacatcagaatcattggagaaactctcagatctatatagtaattctgatagcgatgaggtttccgaaaataacaaaatgcatgaacatctattttccggcgctaataagcctactgagaaagtatcgctactatctttaaagaacgggagcatgctggggtatataaattcgttgatgatgctcataggcgacagactagacgaaaaatgtaagaatcccactgcaatggatgcacgtgaacgttctgtccaacaccgtgtagtgttggaacgtggtgtcaaaccgctggaaaagaagctgtcttatcaattggacaagctaactagagcatacacaaagatggagaaggaatataaggacgcagagaaacgtgcgctggaaagatcttctttggtaagccacggcgatggagcagatagtgaagatgaagactcaagtgatgaagagatggcatacagaccaaatactgcgggcattatcaacacggacaaaaaatcttcacacagagctactgctgaagaagcatcgaaggaagaaaatggggaagaagatggcgagaacgaatcgggtgtatatagaccaccaaagattaccgccgttttaccaccacaacaaacacattttgaagacaaattcaatgccagagaacataaggatcgtagcaataaatcgcgtatgcaagccatggaagaatatatcagagaatcatccgaccaaccagattggagcacgtctattggtgctgacattgtaaatcacggacggggtggtattaaatcttccagagatacagaaaaggaacgtaaggtcacctcgtttgaggaagataatttcacaagagtgaatgtcacaaacaagaacgataagaggaaacagaaacaaagagaaagaagcgcaagagtgaatgttattggtggtgaagattttggtatattcagttcaaagaggaagctagaagacagtacttcaagacgtggtgccaagaaaactcgttctgcttgggatagggcacagaggagactgtag

SEQ ID NO: 3988 - DNA, 627 bp, Saccharomyces pastorianus
atgataaacgaatatgtttctagaaaagttgccctaaaggacatgcaaccatgcgcaatttgcagtaaaccatctacaaccgtcctttataacgcatctggtccagactggctatacacgtgcgatatacatctacaagataaccctcagtttactatccccatctacagtaaagagtataacgatgctgtggctcaattgaaagtagtcaagaggaaaatggataccttaatatctgcccaaagccgattagggtcctgggatggttgggtaactaaaatattcaccaaaaaggataaggaaaagaaagacggttcagaaagtacagaacctgctccagctgagcctgctgatgtccctctagaggtaaaggaggacgcagacaccttactggaaacccaggcaatgtataggaaacttcttgacgaggttacagaattgcaaggaaaaaaccgcaagtatgagctagcaaaaatcatgttcgagagtagggttcaaagaaagaaaacagaacaaatgaatcgggaacgatatcgcaaagaacaagagaactactctaatacggaccctaaggaactgctgcaaaaacatgtgtttccctcagtaccacaacaggagacgcaatag

SEQ ID NO: 3989 - DNA, 3432 bp, Saccharomyces pastorianus
atgggcactcgtgatcgaaaaaacgtcatcgaagagctcgatataccttctgatttacaactagaattgacagagtcaggtaataatagtaccgcatccctccgaagtccaactaagaccagcgctaccaatctaccagctatgtctgaagatatagcagataatgcatccatagcctcttcgtcagtagattcattaaacatgctattagagcgacaaagagtaagacaattgaatcatcctcaacaccaacaacatataagtagttctttagcgaaaactccaaccactctgtcatcgttttcttcaattggaagcgcaactaagaataaagtcaaagaaaccaatcgaatatccttaacatatgatcctgtatcaaaaaggaaagttttaaacacttatgaaatcatcaaggaattaggtcatgggcagcatgggaaagtgaagttggcacgagatatattgagtaagcaattagtggcaattaagattgtcgataggcatgaaaagaagcaaaggaaatttttcacgttcatcaaatcaagcaaaatatttgaaaatgataaaattaaacgtgaaattgctatcatgaaaaaatgccatcacaaacacgtagtacaactgatagaagtactagatgacttaaagtcaaggaagatctatctagttctagagtactgtgcaagaggtgaagttaaatggtgtccgccggactgtttagaatcagatgccaagggcccatctttactaagttttcaagaaacgcgagatatattgagaggcgtagtgctcggtttagaatatctacattatcaaggaatcattcatcgagatatcaaacctgccaacctattaatatcagaagatggtactgttaagatttcagattttggagtttcattagctgcgacgagcaccaatagctcagatagtagcgaatctttggatgagttggaattggcaaaaaccgtgggtactcctgctttttttgcgcccgaaatgtgtttgggtgaggatgcatttgctaagtataatctaacaaaggaaaacctatttcgtggctcttgcatttcattcatgatagacatttgggctgtgggtgtcactttatactgtctaatttttggaatgttaccatttttctccgattttgaattgagactttttgaaaagattgtcaatgaccctttaaaatttccgtcttataaagaaatgcagtccaacaaagtatctaaaatatcttgtaaggaagaatacgaaatggccaaagaccttttattgaaactgttagaaaaaaatcctcaaaaaagaatgaccataccagagattaaaaagcatccttttgtttcttgggattttgatcatatatcgaaggaagacgacaaattacttgcttccactctcgaacaaaaacttcggtttcaatgtaatcaaactgatcagtttgaacctatctctatttcgaagcatgaactgaaaaatgctgtttctggtgtagggaaaaagatcaaagagtctgtactgaagagcatcccgctaaaggatccagtggatccgtcacatatgaactatattcatcctacagaaacttcaagaagccgaagtgacgctaatgtcattgtgagtgaaggctcggttttgtcaaatatcaaagacttaagtgccaataacgcagatagtgatgctgttgatagtagtaacggcgaagatcgtttccgtgacaatacaaatgacggccatttaactaaaaaagagctagaacaagaattaagcaaatttgatgataaacacgagcccagcaatatggtgaatttaccaatcaactcatcatttgcatcattagatagcttctacattgacaattttgcaatggcaaaaatgggtatgagctctcccgaagcaggggatcctactctgtctacaccgaatcttccttctgcaccttcgtcgacaagactaggacgatctccaatatttggtggactgcctaatcaaccaagccctattcgtcctgttttgccgcaacaaaaatcatcattttatgcatcaggccgatatgataataaccacaataatcttgttaggaattcctcatctcatttgatgtcactccattccggtagaccatcttcaagaagtagccgaatgaactcgcgcaaccaaaacttaacgaagacacctgatagcttttccaagagctcgaacgtgcaagtgagtgaacgaaaagtccccaaggatttggaaatgccgacacctaaaagaaaccctaatactagctactcgaagagaccgtcttcgggaaatggcagtaacataccatccgccaaaactgatactctggataaaaattctaacgttgaaggtaaacccccttctagaaattctcctataaaatcgttatatcaaagaatgaagcaatctaaggacaaatcgcaaacgtttgaagtacgtcgaggtaatttctttagtcactttaatggtgatgatgatgatagcagtagtcagtcctcagtaaccagttctggttccgcatctgattcagaattatcatcctcctcatcatcgggtacatctcagattccatccaggaacagttctagtaattttaatagtggctattcagaaacagaatctttaccttttgagtttggtgttgattcagaagatggaagtggtgtactgttaagagatctacctaccggagaccaaataaggccattcctggatatgcaaccatatagccacgtgaaagttaggaatacactcaattccaaaccaccttctatttcgtcttcttcatcttcatcagagggtgaagaggagttaatgctaaacgccgggaatgcggggcataggaggagacacaactcttcaaaagttgatgagccatcaaacaacccacaaaatgtaccaaataaagcaatctattccaatggaagcgttcatgatagcgagacgacgataactccacataacatagacggactgaagatacatcaaagtccgtgccttgatcaacccattgggaatctcaaaactctagtattaccaaaacacttggatcaaaaaaaggcaactacagaaacttcaaatttaaccgatattgttgaattcaatgctaatagtagttgccaaaaggatgaacaccttggaaaaatcctttattcaagggacttgttaaaggacgccctagattctactaatgtaggtagaagaaggtctataccctcaaataaactaagaggaaggagggaagccaataccattactactactgataatggtagtgatgataaagacgtgaggaagaatggttataggaataacgaacaactaggaggctttggcggtaatcacaaaaatcatgaacgatcgcgatctttgacagttgcagaactaaatgagttaaagagaagaggtgttcagttataa

SEQ ID NO: 3990 - DNA, 429 bp, Saccharomyces pastorianus
atgcatggtggtctttcaccagatttgaacagtatggagcaaattagaagagtaatgagaccaacggatattcccgatgttggtttgttatgtgatttattgtggtcggatccagataaagatatcgtaggttggagtgaaaatgatagaggtgtttctttcacttttggtcctgatgtagtgaatagatttttacagaaacaagacatggagctgatttgcagagcccatcaagtcgtggaagatggttacgaattcttcagtaagagacagttggtaacacttttcagtgctcctaattattgtggtgaattcgataatgcgggtgcaatgatgagtgttgacgaaagtttattatgttctttccaaattttaaaacctgctcagaaaagtttaccaaggcaagccggtggtagaaagaaaaaataa

SEQ ID NO: 3991 - DNA, 186 bp, Saccharomyces pastorianus
atggactcacagccagttgacgttgacaatatcatcgatagattattggaggtaagaggatctaaaccaggtcaacaagttgatctagaggaaaacgaaatcagatacttatgctcaaaagccagatccatattcataaagcaacccattttactagagctagaagccccaatcaaggtatgttaa

SEQ ID NO: 3992 - DNA, 957 bp, Saccharomyces pastorianus
atgagaaggagaagctacattctccattttaaactatatgctcagacaggaaggttccaatcaatgaaattaaaaagagaccacaatgagctaacaaaggcagacaataatgccgatggcatatcgaaagaattagagtctccattggtggaggtcgcccttcccgaggattatattgctagacatgaagaaaagttcaacgtagcttgccaacacattttggagagagacccgtcgcttttacctcatataaagaataacgaattttcgctatatttgaggaagacccaagtccctaatacacttgaggactactttacaagacttgccagtacgatcatatctcagcagattagtggcctagcagcgaagagtattaaaggaagagttgttgaccattatggcggtacgtttccggactacaaagtgcttttcgaggactttaaagacccaattaaaaacgcagaaattgcaaagtgtgggttaagtaaaagaaaaatgacatacttggaatctcttgcagcgtactttactgaaagcaataaggagattgaaaaaatttttggccaagaagataatgatgaggcggtggttgacagtctagttacaaatgttaaggggattggtccatggagtgctaaaatgttcttgatgtcggggctgaaaagaatggatatattcgctccagaagatctgggtattgccagaggattttcaagatatctttcagataagccagaactagaaaaggaactgatgcgtgaaaggggggaagttaaaaagagtaaaataaaacataaaaaatataactggaagatatatgacgatgacataatgcagaaatgctcggaaagatttgcaccttataggtctgtgtttatgttcatactgtggaggctctcgagcacaaatattgaagctatgatgaaggcagaaaaggattttgtgaaatcttaa

SEQ ID NO: 3993 - DNA, 336 bp, Saccharomyces pastorianus
atggttactacaagcactcatgcagggcaaaccacacacacacagaagcacacaatgagtctaccggagattttgcccttggaggtcatagacaaaacaatcaaccagagagtgctgatcgtgctgcagtcgaaccgcgaatttgagggcacgctggtcggcttcgacgacttcgtcaacgtcatactggaggacgctgttgagtggctcatcgacccggaggacgagaccaagaacaagaaggtcatgcaacaccacggcagaatgcttttgagcggcaacaacatcgccattcttgtgccaggcggcaaaaagtcccctgcccaggcgttgtag

SEQ ID NO: 3994 - DNA, 309 bp, Saccharomyces pastorianus
atgattctggcatattttctactggctaatttagagtcatcttcacttttggcaccggtaacgaccattttccccgatgcaaaaatcagagctgtagtttttggctctctgatacgcatgataacagcagcgaaacgtttagggttatactccgcattacgcgcatgtagtgccactgttttcaagtccagcctacaacccaaagtcacagtggccacaatattttgcaatgttggaacaataccagatgtggcagatgtatccttttcagattctggggccgccctctttatgtcttcttcactttga

SEQ ID NO: 3995 - DNA, 423 bp, Saccharomyces pastorianus
atgttttataatgagatgtcaatgtgcatcgtgacgttttcttatagcatatctgattgttgcgcatcactgagtgcgaatgaggtgttttccttttcacttttcagcatagctaattccttttctagtttgtatctatgttcacgttcttcggccagttccctttcatattttctttgcgtactcgtcaacacttttttaaattcacctgtcattattgaaagtgagcgtgatccagagccacctgttggacttcctatagaagagggagaagccggatcccacgtagctggcgagctcaccggtgatgatatactaaaattacttttgtttgaactcaacttgctgtttgcttcctctaattctttattcatttgttctaagtcgtatatttttttttctgttttattcaaattcgaatga

SEQ ID NO: 3996 - DNA, 123 bp, Saccharomyces pastorianus
atgtcttgtacgtattcggcacgatcgttttcaaattgcttggtcaaaaaattatgtgccagttgcaaatcattaaacgccgtctccaactcatctagtttgttagaagtatttttctcttga

SEQ ID NO: 3997 - DNA, 1920 bp, Saccharomyces pastorianus
atgcggcgtttaaaccatgcgacttcccccgctatcgtcaagaaaggctctttcacttcgatgttggccacgatagatgaatctttgcattttttggacgagaatagtcaattcaaagacgctgcggcctacagaattaagtttaagcaatgtttgattagggcctgtgaattggtttcccattttttgcaaaacttgttaaaacagacaaatcaagaaattttagataaaacaaaaaataaaaactcattgtctggactaccgtcgagtacaagagatgcgttcttgtatagtaagttctccacaatagctgaaactttcaaaagccaggcgagtgaaattgtcaagcgagtcaatgacaaggcgtattataggtatcacgacgaattgaattctattctccatgaatgcttcaatcactatttccagactcgtttgaaactattaacgcctgtcatttggacacatattgacgatattatcgttaaggataaagatctcgacttagtcaagtttattcaggacggtaaagcttacttccaacagctatgcacggatgaatataagcttttcgtcgagttcttccctgaaaaagaatgtcgttttaagatcaaccaatggttcttacagttatgcgagccactatatgattccataagaatcagagtcttgaaagagacagatatttcgaccttgtgtgactctgtgactttgtttgccccatactatgagtttgaagaaggttctgaagagtatttgaggcaatttaccgatattcaatacgataaattgtttgaaccaattgttcacaaggttcaagctagattgattttgagggttcagatttacgttcaacagaatattctcagctataagccttcaagggacgttttcatgatttcaaatagaaggaaaaatccaaaggccaactcaaatgatggcgacaagaggacaaccaatgccaaaaacggttcagatcctttgttagattcttatttgtcttctctcaaaactagaaatattctatccatttccgacgatgatgcagatgagaagtatattaattcggaagaaacaaccgatagaattacacaattgcaaacttactatccgcccctgttaaagaccctggctctgttgtctaaaatttatgaaatgatcaactccgtggtgtttgatgatatggcccatcatatagttcacgattgtatcatatctttgagaaaagcttacgatatggtaattagatcatcggcagggaaatcagatatcaacaatctcgatgtttcattggcgtacttgaaaaacctattgatgttgcgtgactccatacaaaattttaatattcaatataccgttaatgaaacttacctggatttttctggtgtggaaggatttttcaaatcgctcaaagaaaatggtagaaatgtgttgaagaaaacaaactcatccacgattttgactttagcaagggagttggtccccaaagttgtaaacaatatggtggatgcacgtacagaactaatctccgagttgagaaatgtcataaaggactttactgaaaaaacctctttagaacttattgatgatactttggatatcagcaacggcgaagatttatcatcaagaaatttaaaattaagggaaaatataaaagccaggttgcccagaatatacgaacaaatattgaattacatcgacgatcaagatattgttgtcaacctattagatgctgtgcaagagttaatcacacagtcctattctaaatattatgaaaatataagtgaaatggcggaaaatggggaattaggtaaggatcaaattgccgatgttatgtatttagatgtctttgcggatttttttgccaaagaagtggcagaaattctaaaaaatgatggcacgaacacccaaacaaggtaa

SEQ ID NO: 3998 - DNA, 1542 bp, Saccharomyces pastorianus
atggatttgttctacataccagatgccactgtctcaaaaaggcgttcaatgcatgtggcacctagaacagataacaataccagagttgcgtcaatgcggcacaacaataaacctagctttgcttcctcctcaacgtcgtctctaccctccaccagaaacggttcctctcgccatgaaaactcaaacaataacagtgctatcgataacaacgtgcgcccccaatataattataggcccaacctatccaagcgccactctttggtgaccatcccagagaagtatacaggtaaccgttataatctacggtcgtctccgccgacgtattcaaaccctcgtataaggaaagaattaactcctttccagttacaaaggaagcaaatgaaaactgcttttcaatttcccaatggtgaaaattttactccaagaaaccagaatccaaaatttccaccttccccttcgacttcgtcattgcctctcataacagccccaccaatacctaaatcatcttcaatgagcaatctccctgtcgctgcgccctcaacttatcagtcgcccaagaagactactacctctgctaatagtggtggttcaaaggtagaacccgagtctccaaaactaataaggtcgaattctaaaaaaatatcacactttttcaggaaaatctggtcatccaaatcatcaaattccacggatttcttagaagaaaatgtcaaaaccaagcagaaacggaaaaatccagagaagtctgtgccagaaccaatcacgtctctcgaacaaccagttgaaattaaaaagcaaagctcgttaaccgtcaacaatgaagtaacgtttttaccatcaattgaacagcccgacttggtacacgaattggctgcgtttggagacagtaataagatacccataattccacctccaagatcgccaaatagacctactttgtctgacaaacgaacaaccaagttatattattccaaccaagattcttctaatgaggacgtcactccggtagaaaagaccagcgtgttcttgaggcgtctgcgagatgaatggtctaccgtgtatttaaacaaaatacctctgactgcgtctgttccctcttctctttctaccactgccgaggcccctaattcctctattatcaactctttaccatcatcgccaggtcctttctcctcctcctcgtcttcattggtttcccgtggcccaacccaatccttatcttcctcttcaccaactccagtactttcttcaatgtcatcgaaatccaaaaatgcttccaagtccttacgctttgctgatgaaatttatgtaaacgagacatggtctcccatcgactattgtagatgtgacaattcctttcttgataatttttctaaagtgaaaagtcaagacatggctaacccttccacttttactggtaataatttctcttccaccaaaaacatctccaatgttgaaatcaagatggaggtaaatgagttcaaaagaagagaaatgcgcgtccatcaaaacagcaccaggtatacgcattactacttatga

SEQ ID NO: 3999 - DNA, 300 bp, Saccharomyces pastorianus
atggaaaagcacagagatagatgcgccggttgtcattggtacgtacgtgattacatttcgtccttgataataaaatatatatatataaatttggtttatattacattacattacatcatgtttatgcttatgcgctctcttcttcctcctgtgcttggctttcttccgcacacaccccctctcttagaaaatcgaacttttcgtcgtttagtatcgtcttcttcaatatgtcggcggttattctcttggttccttgatctcttgccatgtccccgctttttttcaccaacagcgctatga

SEQ ID NO: 4000 - DNA, 84 bp, Saccharomyces pastorianus
atggaaagtgctgcagaagagggccttgcagaagattattcggatttcatgaaagaactagaaatgtcggaaggaaatgactga

SEQ ID NO: 4001 - DNA, 153 bp, Saccharomyces pastorianus
atgaatgacaacctgccgaaggagtacttcgaactaatacggaaagttcttaaagagaaggaaaccgataatgcgcctttgcaaagacgaaggggactaagaaggagaaaccaggccctaccggatgccaaaagtttaaaaaggtttgaatga

SEQ ID NO: 4002 - DNA, 162 bp, Saccharomyces pastorianus
atgactattgattctgaagatttcgaagatgtcacagatgaaaacgaggcaaacggtgtaggagatatctccgttgaaatcaaaccccctagtaagatcaccagcaccgccaaaagggtaaaccgcaacatatgttctaatgatgagcggaaaagaagataa

SEQ ID NO: 4003 - DNA, 1494 bp, Saccharomyces pastorianus
atgctatatctactttgcctgatggttcacgggtccatacggaacgaatggattaacagtaagcgtttatccagaaaactgagtaacctggtacctgagagagtgtttgagttactgcatcctcaaagggatgaagagctcccacttagaagcaccagaaaattattggatgggttaaagaaatgtatggaattgtggcaaaaacactggaaaattactaaaaagtacgataatattgggttttacatgaggacatggaaggaagttgataagagcaacaagaatagaaaattcaaaacattgacgaaatcgaattttttaaaggcagtcgacaaaggtcatggagatcctgatgtttccgcacagggcttcgttgcgatgctaagggcttgcaacgtcaacacacggctcattatgtcatgtcaacctccagactttaccaatatgaaaattgacacttctttggatagcgacattgcctatagagatatggtaaaatacccaattttttggtgtgaagtatgggataagtttgccaagaaatggataaccattgacccagtaaaccttaagaccattgaacaggttagattgcgttctaagctcgcgccaaaaggagtggcgagctgtgaaagaaatatgctgaggtacgtgattggttacgatcgcaaggacggttgtagagatgtcactcgtagatacgctcaatggatgaactcaaaagtaaggaaaagaaggattactaaagacgagtttggcgaacagtggttcctaaaagcaataactacacttcaccgcaggaagagaaccaagatcgacgattatgaagaccaatacttttttcaaagagatgaaggtgaaggtatcccagactcagtacaggatttaaaaaaccatccatattatgtgttggaacaagatatcaaacaaactcaaatcataaagcctggttgcaaagagtgcggctatttaaaagtgcatggaaaaatcggtaaagtattaaaggtatacgcaaaaagggacattatggatttaaaaagtgccagacagtggtatatggaaggccgaatcttaaagactggctgtaggtgcaaaaaggtgattaagaaaaatgttgggagaatcaagggggatgtggaaaaggaagacgaaaggttgtatagttgggacgatacggaagtatatattccaccattggcgaccggaaatggggagattactaagaacacatttggaaatatcgaggtttttgcacccacaatgatacctgccaactgctgtctaattgaaagccctgtggccattaaagccgctaggtttttaggggtggagtttgctcctgctgtaacttctttcaagttcgaacgtggaaattcagttaagccagtcctaagcggtattgttattgcaaagtggcttagagaagctgttgaggccgctattgatggaatagagtttgttcaagaagacgataacaggaaggatcatttgctt

SEQ ID NO: 4004 - DNA, 1470 bp, Saccharomyces pastorianus
atgattacttacccatatggttatcatgcagggttcaattacggctacaacctagccgaatcggtgaacttcgctctagaagagtggctgccgatcggaaagaaagctgggaaatgcaattgtatttccgactcagtggagatagatgttaaaaaattggccaaatcttggaaagaccatgataataaggacccggaagatgcactctatctcaatcaattaccaaaccctgctcttcccttgcctcacaggccaacactaaaggaaatggagaatagttcacttcgatccacaagcccagatgtcggtcatttttcaagtttcaaaacaaagagttcgggtgtttcttcaccactactatcacgtatgaaagactattccaatatcgtcgaacccacgctagaagacccgactttgaaactgaaaaggatttcatcttttcaggaattgccttcaaccaaattactgaaaagagaaacttcacaattgctcacagacaacgaagacagtatagtggccatgagcctgacttcaatggcgaatagcgctgcgtcttctccaagattaccattgtcaagattgaattcatccaatgagctttcgaatacccaaccactacttgacatgactaataacactcttgcattcccacgacctaatgggccgtccggtttaaatcctttattatatatttccaacaagaacgtgaacggaatttcccattctgcaccccattccccagtgaatcccaatatatcattaataaagagagtcaagtctcccaacattgtaacattaaatatatccagagagtcgtccagaagccctatatcattgaattccgaggtaaggcaacaacaacaacaacaacaacagcattcgcaactacattcattctcaaccccatccaccgtgtcaaatctatccaattgtgtgcttgggccattaactgacccaagtgacataaaaataccgcatcctgaaaggtcattccatcgcccaacgaatagaatgctcaaaaaggaactgtcaacagagaggtcgaggtcgaggtccaatcctttacttctaaaggttgcatccatgtgtgaagaagagacgttcaccagtgaaaacatcgattcggacagggaaccatcctcccctctacaaacttctaaatttgctcccgaggaaattgtactatcaggtaaaaacaagatttacgtttgtaaagagtgccagagaaagttttcttctggtcatcatctcaccaggcacaaaaaatcagtccactctggggagaagcctcactcctgccccaaatgtggcaaaagattcaagagaagagatcatgtcctgcagcatttgaacaagaaaataccttgtgttccaaacgacacgtctgtagtggcccctctcttgaaccctactgtgcaaccgcaggatgagaagacggccattaatcaacaaagtacatctttaaactga

SEQ ID NO: 4005 - DNA, 1089 bp, Saccharomyces pastorianus
atgactaaaccaatcgctccttcagaggtcgtgggcggaatacccgtcttcaagcccacgtacgagcaattcgaagatttctattcatattgcaaggcgataaacaaatacggtatgaaaagcggtgtggtgaaagttattccgccgccagagtggaagaagaagttggatttgccccatcctgcggagactttacagaaaatcaaaattagatcgcccattcagcaacatatatccgggaataaaggcctgttcatggtacagaacgtggagaagaacaagacgtataatatcatacaatggaaagacctatcgaaggattacgtgcctccagaggaccctaaatcgagacgggactctaggaagaattctgtctcaaagtcttccaaattgaaactgaagaattttgagtcctctttcaacatcgatgattttgaacaattcaaaacggaaaacacggtagacctatctgactttgaaaatccagaaaggttgaagtttttggaagagtattactggaaaacgctaaactttacaacgcccatgtacggcgcggatactccgggatccatatttcctgaaaacctagacgtttggaacgtggccaagctaccgaacatcttagaccatatggaaacaaaggtccctggtgtaaacgactcctacctctacgctggcctatggaaggcctctttttcttggcacttggaggaccaagacttatattctataaactacatccattttggcgccccaaaacaatggtattcgatacctcaggaagacaaattcaaattttacaggtttatgcaggaacaatttcctgaggaagccaagaactgtcccgaatttctaagacataaaatgtttttggcgtcccccaaactcctgcacgaaaacggtatacgatgcaatagttcatcatgcaggcgagtttatgattacttacccatatggttatcatgcagggttcaattacggctacaacctagccgaatcggtgaacttcgctctagaagagtggctgccgatcggaaagaaagctgggaaatgcaattgtatttccgactcagtggagatagatgttaa

SEQ ID NO: 4006 - DNA, 153 bp, Saccharomyces pastorianus
atgttgctttctcgtctatatttaggaactaaaacttttgagagttcctttacgattgtacttttagagcatccactaggaccggaaagcaacaggatcctatgtttggcatcaggcaaaaacatagcctctaaagcttctcgtacatcctga

SEQ ID NO: 4007 - DNA, 2103 bp, Saccharomyces pastorianus
atgttatttagtagatcattcataatgtttaagtataatgatatcttatatgtaagcactaaaagtgagctcaatgcaaatgatctaaagccgacaccttgtcatagttatctgtatccgaatgatatggatagcacgaatttgaataaacgcccttcactacagtacagtctcagttcgttgggttcgcaaatcacaaaatggagctcatctagaccgacttcgccagtgcgtagggctagaagtacagaaaatgaattcagtattaagcgagaagcagtaactgactccccagacgttaataattataatgataaacaatggtatgaaaaatacaagccaacaaatctggaacaggtggctatccataaaaggaagcttcaggatgtacgagaagctttagaggctatgtttttgcctgatgccaaacataggatcctgttgctttccggtcctagtggatgctctaaaagtacaatcgtaaaggaactctcaaaagttttagttcctaaatatagacgagaaagcaacatagcatctcttcgaagtaccaggaatcattctgttgtaactgagtacaggggagattgcataatcaacgatgttcctcagatggaaagtttcagtgagtttttgaagagtgcgagataccttgtaatgtctaacttatcgttaatacttattgaagatctgccgaatgtctttcatagggacaccagaaatcgcttccagcaacttattttacagtggttatatagttcagaacctttactacctcctcttgttatatgcctaactgaatgtgaaattccagagagtgataataattatcgtacgtttggtattgattatacatttagtgctgaaacggttatgaacaaagaaatactgatgcattcaaaattgaaaagaataaaatttaatccgattaatagcactttattgaaaaagtatctgaaacttatctgcgttgacaacatggccctgttaaagaaaaataataaatggagtaaaagagaagaagtcataagccacattgcccaagaaacgggcgatattaggtcagcaataactacacttcagttctgggtgacctcaggcggggagttaccaatctcgacacgagaatccaccatttcatattttcatgctattggaaaggtgattcacggttcacatagcacgagcgatgataatgaaatgattaacactcttttcagtagtgccaatggtttgttatcaaatcaggattacaagatgggtattctagaaaattatggtacatttaataagggcaattttaatatttctgacgcgttatcaatcgtgaattgtttaagtgagtgtgaaacaatgaatagtttaccggaatcaaatgagtacggtttacggaaagtacgaaaaacttttcggaatattgccaaggagagtcacaatcatgggacagtttattttccgagagagtggaaagttagaaaattacaaaattcattcagggtccaagccaaggattggatgaatgttaatctctacaaatataatacagtgcattcattcagagatatagcgctacagcttggctattacgcacctttgatcaggaagtcacaaagttataaaaagaactccatgctatattatttaaaaaatcttccgactgactctgtggagctaaaacaaacattggaggagttccaagatacaatgcaaattgaagaagacatcgatataattgatcgcataggcggacctattgagtctctatctgtagaagacgggctagaaccattgatggatagcgattatagtaattctgattatatagaaaatcagaaaaagcgaagcgatacaaaacttcgtattttgattgaacggtacgaaaaaaatgtaatgatgacggatagaggttccgaaagtgaagacgtgtcgtttaatgatgatcctattgtggatagcgataatgataacaataaaactggcgacgatacatttggaagaagtgacgaggatgaatctctttatgaaatgctatcccaaagacaaccacgcattgcctcagtggttaacgagtcactttcagattctgatctagagatgctctga

SEQ ID NO: 4008 - DNA, 1263 bp, Saccharomyces pastorianus
atgcttgctgcttcattcaaacgccaaccatcgcaattggcccgtgggctgagaagtgtcctgtacacttccaccagattaagccatgttcgtactatggcaactttaaagacaaacgataaaaaagcacctgaagaaattgagggcacggacactgtgcaaatcgagttgcccgagtcctcttttgaatcgtacatgctggaccctccagacttgtcctacgagacttccaaagccactttattgcaaatgtataaagatatggtcatcatcagaagaatggagatggcttgcgacgccttgtacaaggccaagaaaatcagaggtttctgccacttgtctgtcggtcaagaagctatcgccgtcggtattgagaacgccatcacaaaactggacaccatcattacatcctatagatgtcatggtttcaccttcatgagaggcgcctcagtgaaagccgtcctggctgagttactgggcagaagagccggtgtctcctttggtaaaggtggctccatgcatctttatgctccagggttctacggtggtaacggtatcgtgggtgctcaagttcctttgggtgcaggtttagcgtttgctcaccagtacaagaacgaagacgcctgctctttcactttgtatggtgacggtgcctccaaccaaggccaagtctttgagtctttcaatatggccaagttatggaacttgcccgttgtgttttgttgtgagaacaataagtacggtatgggtacttctgccgcaagatcatctgccatgaccgaatatttcaagcgtggtcaatacatcccaggtttgaaagtcaatggtatggatattttagccgtctaccaagcatccaagtttgccaaggactggtgtttatccggtaagggtcctcttgttttggaatacgaaacctatagatacggtggccattccatgtccgaccctggtaccacatacagaactagagacgaaattcaacacatgagatccaagaacgacccaattgctggtctcaagatgcatttggtcgatttaggtattgccactgaaggggaagtcaaagcttacgacaaggccgctagaaaatacgttgacgaacaagtcgaattagccgatgctgctgctcctccagaagctaaactatctatcttgtttgaagatgtctacgtgaagggtacagaaaccccaactttaagaggtagaattcctgaagatacttgggacttccaaaagcaaggcttcgcttctaggaattaa

SEQ ID NO: 4009 - DNA, 672 bp, Saccharomyces pastorianus
atgacaatgagtattactgaagtatttggtgagtttaggtgtggtaaaacacagatgtctcatactttatgcgttacgacacaacttccaagggaaatgggtggaggtgaaggtaaagtggcatatattgatacagaaggtacttttaggcccgaaagaatcaaacagattgctgaaagctacgaccttgatcctgaatcatgcttagcaaacgtttcttatgctagagccttgaatagcgaacaccaaatggagcttgtagaacaattgggtgaagaactaagttctggagattatcgtttggtggttgtggactcaataatggctaattttcgagttgattactgtggtagaggtgaactgagtgaaagacagcagaagttaaatcaacatctctttaaattgaatagattagcggaagaatttaacgtcgcagtatttctgactaaccaagttcaatccgacccaggtgcttctgccttatttgcatctgcagatggcagaaaaccgattggtgggcacgtcctggcacatgcttcagcaacaagaatcctgctgagaaaaggtcgtggtgatgaaagagtcgctaaattacaggattctccagatatgcctgaaagagagtgtgtttacgtgatcggtgaaaaaggtattacggacgcaagtgattag

SEQ ID NO: 4010 - DNA, 378 bp, Saccharomyces pastorianus
atgtacttcctttttcatcacttttcccctcatacaacaggagaacactattttcaaaacaccgaaaatagccgccctagtaccagctttttgtataaagggaaggcaggtttggctaatgtatccttttcgttccttcacttttcacataccctttctgcatcttggtcttttgagtcaaacaacaaatcacccaaagtcatgtctgttacaggaactgaagttgatagcgatacaacaaaaaatattcttagcgtggatgaattacaaaactacggtattaatgcctcggatctccaaaaattgaagtcaagtggaatttacactgttaatgtatgttacaataaaaactttcgtgtacgtagctttttttactaa

SEQ ID NO: 4011 - DNA, 1956 bp, Saccharomyces pastorianus
atgagtagcaattccagcagttcgtcctgctcttctgacggtccgcagaaaatttctgcgagcagcaagtatcatcaggaggcacgttcaggaactaccaatgaaagcttctctggaaaagtggatcagaatggaaatgctcgcccttttagagaaataggtaaggatacggaatatctgtcgccaggtaaagtagaaacctctaccgagcccgaaggacagtcaagaaataggctttccccttcgatcaaaactcctgacgatgattcatttcgtcctcgacaaaaaggtcctcctgtgggattcgcacgctcttcaccaaatttaaaagctttgaatacacttgccagtgcagagcaagcgaggctattagaggattatttatctggaaatatgtctcgtagaaatggtagttatgttgacccactttatcgtcaactcaatcctaccccgggtggtactagaaataagccagtttggagtttaaatcaaccactaccgcacgttttagataaaaccttggcagaaaagatgatacaaaagaacatagatgccagatctcatgcttcctcgaaattaggctcaagagatgcgtcacggtccggttcaatgacttcaattaatgattggaggaaattcctgaggcgtgctgcgtcgaatatgaagctaaccgacatcgaagcacagcttcctaatgctgggaatggcgctggtgacctgtcacctaaatcaaaagtagaacacattcaaaaacctcctgagtcacaaatcgagtttgctcaagagagcagaactaagccccatcatgccgtcagtttttcattgggaggtgaaagttatccaccgtcggtggttggtgaagaagcgcaatcatttccaaatgtgcgaaagaaagatgaacgcgagtcaaaagaggcagatcttttgaaagggactcttgaacaggaggctaaaattacaagtaaactggacggagacagcagtattggtaacatagaggatgatcatccagacgaactgaaattcaccaatttttgggcgaaaattcgatatcgtatgcgtgagccgtttgcagaattccttggtacactagtgcttgtaattttcggtgtgggcggtaaccttcaggccactgtaacaaagggaagcggaggatcttatgagtctctgtcatttgcatggggcttcggttgtatgcttggtgtttatgtcgctggtggtattagtggtggtcatattaaccctgctgttactatttcgatggcaattttcagaaaattcccttggaaaaaggtgccagtttacatcgttgctcaaattatcggtgctttctttggtggagcaatggcgtacggctatttttggagttcgattacagagtttgaaggaggaccgcatattaggactacggcaactggtgcatgtctcttcaccaatcccaagacatatgtaacttggcgaaatgcattttttgatgaatttatcggtgcttccgtattggtaggttgcttgatggctgtgttagatgacagcaatgctccaccagctaacggtatgacggcgttcatcgtaggacttttagtggccgcgataggtatggcccttggataccaaacaagcttcacaataaacccagctagagatctgggtcctcgtatattcgcttctatgattggttatggtcctcatgcctttcatcttacgcattggtggtggacttggggtgcttggggagggccaattgctggtggaattgcaggagctcttgtatacgacctgttcattttcactggatgtgaatcacctatcaactacccggataatggctatattgagcatagagtagacaaacttctccacgctgagtttttgaagaataataatgcggaatctgttgaagttgacttagacagtaacagtaacagtaattccagcaagaagtctcctcctacataa

SEQ ID NO: 4012 - DNA, 1794 bp, Saccharomyces pastorianus
atgtcgcacaaacaatcaatgtcgcacaaacaattcaaatccgatggaaacattgttgctcagtatctattcggactagccagaagtaatccgggtcttacggtaattaaacatgatcgtgttattttccgtactgcatccgctccagactcaggaaatgccccgaaggtaacattggtatctggcggtggtagtggtcacgagcctactcatgctggatttgtcggtgaaggtgccttggatgcagctgctgcaggagcaatatttgcttcgccttccactaaacagattttttctgctcttaaggctgttgagtctcctaagggtaccttgattattgtgaaaaattataccggtgatattattcattttggtttggccgcggaaagggccaaagcggctggcatgaatatagaactagttgcagttggggatgatgtgtcggttggaaaaagtaaagggtctttggttggccgtcgtggtttaggggccactgcacttgttcataagattgccggcgctgcagcttcccacggactcgatttatctgaggttgccaaagttgctcagtcggttgtcgacaatagcgttacaattaatgcatctcttgatcactgcagtgtccctggacacaaatccgagaatatcttgggagaggatgagtatgagattggtatgggtattcacaatgagtctggtacccaaaaatcttctccattgccatcaattcctgaacttgttgctcaattgctacctctacttcttggggtggatgaggaccgttcttatgtgaagtttgattccaaggatgacgtagttctcatggtgaacaatatgggtggcatgtcaaatctagaattgggttatgccacagaagtcatctcagaaaaattgattgaaaagtaccacattattcctaagagaacaatcactggtgcttttgtgactgctttgaacggacccggatttggtatcactctattgaacgcatcgaaagctggctcgcatattatccaatactttgactaccccaccacagcaagcggatggaatcaaacttatcacgcagctgaagactggaaagttcttgctgacggaaaagttcctactgctccttctatagaaacagtgaagaacaaaaaaagttcaggcgtgacggcagactatgatacttttgccaaaattttacttgccggaattgcgaggatcaacgaggttgagccaaaagtcacctggtatgataccattgcaggagatggtgattgtggaacaactcttgtttctggtggtaaggcgttgaccgaagctattgaaaatcattcgttgcgtctcgatgatgctgctcgtggtattgaggacgttgcacatatagttgaagactcaatgggtggcacttctggaggtctgtactcaatctacctttcagctcttgcaaaaggtgtcgatgattcgggagacaagaaacttactgtggaaacgtttaaggaagcctcccaatttgctttagaagctctgtataagtacaccagagcacgtcctggttataggacattgattgatgctcttcaaccttttgttgaaacgttgaatgccggaaagggccctagagcagctgctcaagctgctattgaaggcgcagagaagactagaaagatggatgctcttgtggggcgtgcctcatacgtggctaaggaagaattgagtaaacttgatggagagggtggattgcctgaccctggggccatcggtctcgctgctttgcttgatggtttggttggagctgctgggtactaa

SEQ ID NO: 4013 - DNA, 2190 bp, Saccharomyces pastorianus
atgttaagtggtatcgtactcggtatcgtacaccagcaagccggtatgctatcattttgtgattatttctggtctgaggaccttgcctctggtctggaggtgctatttgaccggctgtaccatggttgtgagcaatgcgacttgttcattcagttatttgcgtcaagaatgcagtttgaagtcagtcatgggaggcaattatttggaatagaagccggtatgaataatttgaaggtagtacaggaagatgagcaggaaactgtgacggtggccagggctctgagaggaattttgcaagaaatgtcgcaagaagggacgcatcacttgacaatagcatcgaacatcgaaagtttggtgttgcaaccattcagtaagtggtgcgtggaacatagggaaaggattcagtactctgaaaagaccttgctgaccaacgtcaacaatttcaggaaatctaagaaatacgtcagcaaactggagaaagagtactttaataaatgcagacaattagaagaatttaagagaaataatttcaacgacaatgagctggccaatgccatgaaatcattgacagtacaacacaaatacgaagaggatttagctagggaaaaagatcaccggttttttaatcaaatagcaggaatagattttgattacaagactatgaaagagactcttcaactgttgttgaccaaactgcccaaatctgattacaaactgccccttattagctattctttgagtaacactaataatgggggggaaataaccaaatttctcctggaccacatgtcattaaaggatattgaccaagcagaaacttttggccaggatttgttaagtttgggctttttaaaatattgtaatggtgtcggtacaacatttgtcaattccaagaagttccaataccagtggaagaacaccgcgtacttgttcgccaatgtgccaatgcccggctcagaggataccgtcactggtgaatctttgatatccaggtttaacaactgggacagttcatcagcaaaggaaatcattcagtctaaaatcagtaatgatcaacgggctacatcaatccaggctcctcatatctcggatagtgagaggatcctcttcaaaatgatggatggacttaaagcgtcagatacgaagtattatcaagaatgctttaaaatggatgctttgagatgctccatagaggagttattgatcgatcacttatcgtttatggaaaagtgcgaaactgatagactaaatgccatcaagaaagccacgttggatttttgttccactttgggcaataaaatctcttcgttgaaactgtgtgtcgataaaatgctctcgttggaaaatgatatcgatcccacggcagatcttttgcaacttttgaccaaatacaagacgggaagtttccagcctcaagccattgtctacaacaattattacaatcctggtttatttcagaactttggtgttgatttagagactcgttgtaggttagacaagaaaattgtcccactgataatttcctcaatcttttcatatatggacaagatatatcctgatttgcctaacgacaaagtgagaacttccatttggaccgattcagtgaaattaagtctgacacatcaacttcgaaatttattaaataagcaacaattccataacgaaggcgaaatctttgatataatgtctcaatcgaagctgggaccaagcactgttgccagcgttgtcaaaatttatttattagaattaccggatccattgattcctaatgatgtatcggacattcttcgggtactataccttgactatccaccattagtaaaacctgtagatgacgattcagattcctcttctaaggaccaagagaacgacgaaaaagaggaagactctgacactaagagaataagaggtctttatacaactttgtcttccttaagcaaaccccatatagcaacactagacgcgataaccacccatttttacagattgattaagattttaaaaatgggccaagatggcaatgaagtggctaatgaattcaccatttctatttcacaagagtttgcaaattgcattattcaatcgaagattacggatgataacgaagtcggctttaaaatcttctacgacctgttgacgcataagaagcaaattttccacgaattaaaaagacaaaattcaagaaattag

SEQ ID NO: 4014 - DNA, 1026 bp, Saccharomyces pastorianus
atggcaacggtagtaactaactataaagggcgaaacaagccgatttcagtggcaaatggcaactccaccaagagagacgaaatcgagaaaaaacacccaacaggagaagctttcgagatgaagttaagagtcactggtccaggcatcaaccaggtcattaccttgaagcaggacgccacagtcaacgacctgattgagcatgtcggaatagatgttaagacgttaaggtttggatacccccctcaacggatcaacctacaagaggaagaggctgctatgaggcaaacccagctagatgagctcggaatcaactctggtgaaaggatcacgctagaaacttcccaaagtaacgacagttttagcatgtcgccaccaaaaccgaaaccaaagagagttttgaagagcacagaaatgtccattggtggcggtggagagaacgttctatcagtccatcctgttcccgatgacaactcatgcctcttccatgctatcgcctactgtatcttcaaacaagataacgtccgtgccctaagagagatggtctccaaggaggtccttagcaacccagtcaaattcagcgacgccattttggacaaacccaaccgagaatatgcccaatggatattgaaaatggagtcttggggcggggccatcgagatcggcatcatatctgacacactcgcagtggccatttacgtggtggatattgatgctgtcaagattgaaaagttcaacgaggacaagttcgacaattacatcctggtcctgttcaacggtattcattacgactccttgaccaagaatgagttcaaaactgtttttgacaagaaaaatcagcctgaatcagatgatgttttaacggcagctttgcaactagcctctaacctgaagcaaactggctactccttcaacactcacaaggctcagattaagtgcaacacctgccagatgaccttcgtgggcgaaagagaagttgccaggcacgctgaatccacaggtcacgtcgattttggccaaaataaatga

SEQ ID NO: 4015 - DNA, 1872 bp, Saccharomyces pastorianus
atgaagttgtcgtgctcgctggtgtggtttatactgactgctagtgtcgctgtggccaagacacacacgcttaattatactgcttcctgggtgaaggccaatcccgatggtctgcacgagaagaagatgattggtttcaacggcgaatggccactcccagacattcatgtcgaaaagggagaccgtgttcaggtttatttgaccaacggctttgatgacggcactgcaacctccctgcattttcacggtcttttccaaaataccagtttggggaaccaacttcagatggacggtccctctatggtaactcaatgtcctatagtccctgggcaaacatacctgtacaactttacggttcctgaacaagtggggacattctggtatcatgcacatatgggtgcccagtacggtgatggtatgaggggtgcattcataatccacgatcccgaagagcccttccaatacgatcacgaaaaaatcgtcattttagcagatcattaccatgaaaactataatgtcgttaccgaagaatttttatccaggtataatcctacaggtgccgagcccgttcctcaaaatatccttttcaataataccatgaatgtgactttggatttcacacctggtgaaacatatcttttcaggttcctaaatgtagggttgtttgtatctcaatatattatcctcgaggaccatgaaatgactgtggtagaggtagatggaatttacgttaaaccaaacgttaccgattcaatatacctttctgcagggcaaagaatgagtgttttaatcaaagctaaagataaaatgcccacaaggaattatgctatgatgcaattaatggatgaaacaatgcttgatgtagttccaccggagcttcaacttaaccaaactattcaaatgacatacggtcacgctttaccacaggcggctgctttgaatatcgaagattgtgatttggaccgtgccacaaacgatttttatttagagccgttagttgaaagagatttactttcccactacgatcatcaaattgttatggatgtgagaatgataaatttggatgatggtgtgaaatatgcttttttcaataatattacttatgtgacccccaagatccccactttgactacattgctaacctcaggaaagcttgcctccgattctagaatttatggtgataatatcaatgcgcagtttttaaagcataacgacatcatagaagttgttttaaacaattacgactcaggcagacacccattccatttacacggtcataatttccaaatagttcaaaaatcccctggctttcatattgatgaaaactatgatgaatctgaacaagataagatgaccgttccttataacgaatccgcaccactacaaccgttccctgagaggccaatggtgagagacactgtggttttggaacctagtggacatgttgtgcttagatttagagctgataatcctggtgtttggtatttccattgccacgtagattggcatttgcaacaaggtttagcatcaatcttcattgaggcccctacaatacttcaggaaagagaaacgcttaatgaaaactacctcgatatttgtcaagctgctggtattcccgttgctggtaatgcagcaggtcattcaaacgattggttcgatttagatggattaccaagacagccaaaaccattacctaagggatttaccgcagaaggatatgtggcatttattgtttcctttattattggtgtatgggggctgtactctattgctcaatatggtattggcgaagtgatccctaacgatgagaaagtgtaccatactttaagggaaatcttggctgagaatgacatagaggttcctcgcaattaa

SEQ ID NO: 4016 - DNA, 1083 bp, Saccharomyces pastorianus
atgtgtaaagccggtttcgccggtgacgacgctccccgtgccgtcttcccatctatcgttggtagaccaagacaccaaggtatcatggtcggtatgggccaaaaggactcctacgttggtgatgaagcgcaatccaagagaggtatcttgacattgcgttacccaattgaacatggtatcgtgaccaactgggacgatatggaaaagatctggcatcacaccttttacaacgagttgagagttgcaccagaagaacaccctgttcttttgaccgaagctccaatgaaccctaaatcaaacagagaaaagatgactcagatcatgtttgaaactttcaacgtcccagctttctacgtctccatccaagccgttttgtccttgtactcttctggtagaaccaccggtattgttttggattctggtgacggtgttactcacgtcgtcccaatctacgccggtttctccctacctcacgccatcttgagaatcgatttggccggtagagatttgaccgactacttgatgaagatcttgagtgaacgtggttactctttctccaccactgccgaaagagaaatcgtccgtgacatcaaggaaaaactatgttacgtcgctttggacttcgaacaagaaatgcaaaccgccgctcaatcctcttccattgaaaaatcctacgaactaccagatggtcaagtcattaccattggtaacgaaagattcagagccccagaagctttgttccatccttccgtcttgggtttggaatccgctggtattgaccaaaccacttacaactctatcatgaagtgtgacgtcgatgtccgtaaggaattatacggtaacatcgtcatgtccggtggtaccaccatgttcccaggtattgccgaaagaatgcaaaaggaaatcaccgctttggctccatcttccatgaaggtcaagatcattgctcctccagagagaaagtactctgtctggatcggtggttccatcttggcttctttgaccactttccaacaaatgtggatctcaaaacaggaatacgacgaaagtggtccatccatcgttcaccacaaatgtttctaa

SEQ ID NO: 4017 - DNA, 350 bp, Saccharomyces pastorianus
atgtgtaaagccggtttcgccggtgacgacgctccccgtgccgtcttcccatctatcgttggtagaccaagacaccaaggtatcatggtcggtatgggccaaaaggactcctacgttggtgatgaagcgcaatccaagagaggtatcttgacattgcgttacccaattgaacatggtatcgtgaccaactgggacgatatggaaaagatctggcatcacaccttttacaacgagttgagagttgcaccagaagaacaccctgttcttttgaccgaagctccaatgaaccctaaatcaaacagagaaaagatgactcagatcatgtttgaaactttcaacgtcccagcttt

SEQ ID NO: 4018 - DNA, 326 bp, Saccharomyces pastorianus
ctacgtctccatccaagccgttttgtccttgtactcttctggtagaaccaccggtattgttttggattctggtgacggtgttactcacgtcgtcccaatctacgccggtttctccctacctcacgccatcttgagaatcgatttggccggtagagatttgaccgactacttgatgaagatcttgagtgaacgtggttactctttctccaccactgccgaaagagaaatcgtccgtgacatcaaggaaaaactatgttacgtcgctttggacttcgaacaagaaatgcaaaccgccgctcaatcctcttccattgaaaaatcctacg

SEQ ID NO: 4019 - DNA, 756 bp, Saccharomyces pastorianus
atggggggaatacagagaaaaaagaacagaagccagaagaagccagcaatcgagcacacccagagggggactgaaagaattcctgttgggcccaggtcgagacaagcaagaaaagaaacgaaacgaaacgcaattatgaatagcgagtacgattatctgttcaagctactgttgatcgggaactccggtgtcgggaagtcctgtctgcttttgaggttttcagacgacacgtacaccaacgactacatctccacgatcggggtagacttcaagatcaagaccgtggagcttgacggcaagaccgtcaagctgcagatctgggacaccgcgggccaagagcgtttccgcaccatcacctcgtcctactaccgtggttcgcacgggatcatcatagtgtatgatgtcacggaccaagagtccttcaacggcgtgaagatgtggttacaagaaatcgaccgctacgcgacctcaacggtcttgaagctgttggtgggcaataagtgcgacctcaaagacaagcgggtcgtggagtacgacgtggccaaggagttcgcggacgcaaacaagatgccgttcttggagaccagtgctctggactccaccaacgtcgaggacgcgttcttgaccatggccagacagatcaaggagagtatgtcccaacagaacctgaacgagaccactcagaagaaggatgacaagggcaacgtcaacctaaagggccagagcttgaccaacaccagcggcggctgctgttaa

SEQ ID NO: 4020 - DNA, 771 bp, Saccharomyces pastorianus
atgaataccgtttattcgagtccgcacagtagcagttccagactatcactgaggaataaacaccactcgcccaagaggcattcacagacaagcttccccgcacaaaagactacgccacaatcacaacaactggcatcaccacaatatcaacaagaatccaatgagaggccggaatcacaacaagtaatgtttctcagcgaaccgttcgtaagaacagctttagtgaaaggttcattcaagacaatagtacaactacccaaatatgtggacttgggagagtggatagcgttgaacgttttcgaattcttcacaaacttgaaccagttttacggtgtagtggcggaatacgtaacgccagatgcatatccaacaatgaatgccggtcctcacacagattatttatggttggatgccaataatagacaagtctcactaccggctagtcaatacatagatttggcactcacgtggataaataataaagtcaacgataagaacctctttcctaccaagaatgggttaccgttcccgcaacaattttctagagacgtacaaagaattatggtgcaaatgtttagaatatttgcacatatttatcaccaccatttcgacaaaattgtacacctatcgctagaagcccattggaactcgtttttttcccatttcattagttttgccaaggagtttaaaatcattgataggaaggaaatgactccacttttaccgttaatcgaaagttttgaaaagcaaggcaaaatcatatataattaa

SEQ ID NO: 4021 - DNA, 693 bp, Saccharomyces pastorianus
atggaaatgactgattttgaactcactagcgattcgcaatcgaacttagctatcccatccaacttcaaatcgactctgccccctaggaaaagagccaagacgaaagaggaaaaggaacagcggagaatcgagcggattttgagaaacagaagagcggctcaccagagcagagaaaagaagagactgcatctgcagtacctcgagaagaagtgctccctcctggagagcttgctgagtaacgtcgacctcgagaaactggccgagcgcaaagacgtgttggcctgcagccgcgacgccttcgtcgcccacctcgacgagtacagggacttccagtgctcgcgggacacgtcgatggacgcccgtaccagctcacactcgtcttctgacactttcacaccttcgccattgaactgcacgctcgagcctgcgacactgtcgcccaagagcatgcgcgactcctcgtcggaccaagagacctcgtgggagctgcagatgttcaagacggagaacatacaagaacccgccacactacctgccgcagacgataacaacctgtttcacacggcggcttcaccgctcgtggacccgctctgcggcgagatagcagagaatagtctgccctttgacaattcaattgaccttgacaattggcgtaatccagccgtgattacgatgaccaggaaactgcactga

SEQ ID NO: 4022 - DNA, 1443 bp, Saccharomyces pastorianus
atgagcaagaacagagccccgaatctcgacccggatctgaatttaaacaacgatatttggaatctgtactcgagcgcgcagaaaatattgccagactcagatcgtattttgaacctttcttggcgcctgcacaatcgcacgtcgttccagcacattaaccgcattatgcagcattccaactctgccttggacttctctgcctcgccctttgccgggactacggcggcgacgactaacaacgagaccgatgacactgacaaccagcagttcttcctttcggacatgaatcttaacggcgcgtccgtgttcgagaacgtgtttgatgatgacgatgatgatgatgatgatgtggagacgcactcgatagtgcactccgacctgctgaacgacatggatgggggcgcccaccgccccttacacaatgcttctgcctttcccaacttcctggacacctcctcgtcatcctcctttgacgaccactttattttcaccaataacttaccgtttctaaatagtagtagcattaataataatcataatcataataataatcataataataacaacaacaacaacaacaacaacaacaacaacaacaacaacatcatcatcaataacaccaccgccaacaatgtcgccaacagtcccttgctgagaagaaatccctccccctccatagtcaagcccggctcgcgaagaaattcgtccattagaaagaaaaagcctgcgctcaagaagatcaagtctacgacgtctcttcagtcgtccgccacgccgccctcgtcgtccaacgcctcctccaatccggatatcaagtgctccaactgcaccacctccaccaccccgttgtggagaaaggaccccaagggcctgcccctctgcaacgcctgtggcctgttcctcaagctgcacggtgtcacaagaccgatgtccctgaaaacagacatcatcaagaagagacaacgctcctccgccaagataaccgccaatacaacccctcctccatcatcgtcctccgcagccgcaggagcagcatcatcgaaaaagaaaaactacaccgccagcgtggccgcgtctaagaggaagaactcgctcaacatcatcactcccctgaggccccaggacatacccatcccgaagacctcgtcgccctccatcccacaacatctccgttcgaacaacaataacaataacagccaccacttttcgagctccgcgcccgtcgagatcgagacacccttctccagcttccagcccgacatgaacatgaccatgaacatgaacctccacaacacatccacctccgccctcaacagtgaggccttctggacgcccctggacgctaccatagaccaccacgtgccagacactaccccgggctcgaacgccaacaccaccccgaacggcaacctgagcctggactggctgaatctcaatttatag

SEQ ID NO: 4023 - DNA, 705 bp, Saccharomyces pastorianus
atgtcctcaaactcgttaaatatcttgaccagcccgatatcgcgtcttttcagcctgttgggtacttgcgactttctcaggtccaccagaaactcttcctgcgtcttgccgttctccgccacgtgcttgtgcagatccagcgatatcagcttgtccaccttgttcaccgtggcggaactgttgtactttttcaatggcgttaggttcaggtcgtttttgtcaataacaactgcgccggcggccccggcttcttcttctatttctgctgctgctgctgctgctgctgctgctgtcgctgccttgggcggttgcggcgtcgctttcttcctgctcaacaccatgggtgaagaggattccagtatgggcgtgggcgtcaacagcgacctggtctcctccacagtctcttcgcccttgtcgtcttcctcctcgccgtccatttcgctcgtgtccgcattgacgtttttcacctctgtagcgctgttgcgttcgcgcttcttaccttccttttccatcttgttcatgaactcccttctcttgatgcgttggtcggacccaaactccacctcgtcctcggggtccacatcgtactcgtgtcctgtacgtcttaaaatgaacttgccgggagatgcatcgccctccgccgcttcatggaagaattttagcgactcttggatctcccgttcgctgaggtttgtttccaaatga

SEQ ID NO: 4024 - DNA, 2187 bp, Saccharomyces pastorianus
atgagcaaagttggagctgacaagagagtcggtatcactaatttctttcaattaaaaatggggaaaagagtatacgatccaattcatgatactttccaagaacgaaatgacagccccgaggaaagaaagccatctacagattctacagtaggtgctgcgccaccggtactagccgaggaagaatctccagtttccaagtcacaagaatctgaagctaagactagcaaagccattccagttatacatgagattgaaattgacgataagaacgatgacgattccacccaaagtgaagaggaaaatacaaatatcttgctcaactttgaaccttcaatggtacctggagcaacaggagcaacaggagcaggagcagcagtggggggaaccacaacaagctctgctaaaagaaagcccaaagaaagcagttcgagcaaatacaatcgtcatttgaaaaaacctgatggtgagccgtttaataggaaagatatacagtttagtttcatgcaagaactgttgatggataagagacagattttcaccaatgttttgaagcctctatacaaaaattcgatagtgcccattaacatcgacggtgataagatatcaataaatgtgaccgataaagagtacgatgcgaggacgtttgttttcaacgacaagttgacgtttgcgcaattgtacgtgttgacgatagcaacgtctatcaaatgctccaaaatacttagagataaactgttgctggaccaacaagtagcgttttctacgtgcattttggcactgttggtcaatattggtagactaaacaccacgataaacttttatttggagatgacttcgcagttaagaactttccattctgtgcccgttttgcaattgcatgccaatgatccgaaacttctccaagacacaccaagattgaagtccatattgaagaatctaccgtggggcaatgagcaaatttcactcttggaaatctacgaaaaaatagaccaaaatgatagcgaagtggacaatattaacaagtttaacatcatcaatatgttgtttagcatatgcgacaacttcagtcttattgacaaaagattcctttccaaatatgtggaaataaaaagcgaagatggcacaacactaaaagccgaggagatagatacagtggaggaagacaatgaagcagagggagaagccgaaggaggagaggaggaatcaggttgtggagtaacgctgtttgatatactcgatttttcgaagtatgagccaaaagacagatgcgacgtgttgatctggttgttatatattcatttggaaacaaacctcagcgaacgggagatccaagagtcgctaaaattcttccatgaagcggcggagggcgatgcatctcccggcaagttcattttaagacgtacaggacacgagtacgatgtggaccccgaggacgaggtggagtttgggtccgaccaacgcatcaagagaagggagttcatgaacaagatggaaaaggaaggtaagaagcgcgaacgcaacagcgctacagaggtgaaaaacgtcaatgcggacacgagcgaaatggacggcgaggaggaagacgacaagggcgaagagactgtggaggagaccaggtcgctgttgacgcccacgcccatactggaatcctcttcacccatggtgttgagcaggaagaaagcgacgccgcaaccgcccaaggcagcgacagcagcagcagcagcagcagcagcagcagaaatagaagaagaagccggggccgccggcgcagttgttattgacaaaaacgacctgaacctaacgccattgaaaaagtacaacagttccgccacggtgaacaaggtggacaagctgatatcgctggatctgcacaagcacgtggcggagaacggcaagacgcaggaagagtttctggtggacctgagaaagtcgcaagtacccaacaggctgaaaagacgcgatatcgggctggtcaagatatttaacgagtttgaggacatccctgtagcctccgtgctggggatccgcggtaagaagagaaagaagttcaaagataacctgctggggttcgaaacagactacatgaagaacctcggcgcatcgaaaaaggtgcttctgcagaggatcgaaaatgcggacgtagacgacgaggagtcgagtagcatgtttaagctagaactagactag

SEQ ID NO: 4025 - DNA, 669 bp, Saccharomyces pastorianus
atgtctaagcgccggctaaaaagaaccattgcgccttgctcatctgatatttacgacagtttacagtttcaaaataatggttatgtcaagataaaagaactgatatcacacgttgtcatcgaaaacagctttatgtccaatgcaatagcagacgaagctggaatacgacgggccgctgaacctacagtaaaggaacaggttcacaagttcagaaaatggaaaaataaaactcgctgcgtatcgaaagaccctacgatgaaagatttcagagctcgtaaaagagatatggtgtacagatggttcgaaagacatttgcctaaggagaaagtagaagtcctttcccatgaaaaacaattgagcagcattgacttgcattttctgccctcaaatgtcatcgtcggatgttcgagggagttgagtaaaccgggatcacctcaagttttaggaagcccaaattttggccctaaggaagagttcaatgaacgttttttcaatatcgctagttgtcctgtaaagagagaatttcgtgaattagtttttgaactaaatgatgaaaaccagaattattatacatccctcagggcttctaggaaacctgtcatacaaggccaaaaaaatgcacatgcgtctcagtttattgttggtaaggagcatcggaccaatttttaa

SEQ ID NO: 4026 - DNA, 195 bp, Saccharomyces pastorianus
atgggctgtttaatcttttcctacttttatgttttcttctttgtttgtgagacaaagggactaactctagaagaagtcaacgaaatgtatgaagagaggataaagccatggaagtctggcgactgggtaccaagcgctaagaggttagaacaactaacagatggtaccccgctagacacagaggatattaaatag

SEQ ID NO: 4027 - DNA, 6429 bp, Saccharomyces pastorianus
atgactgctaacaatgatgatgatataaaatcgcccattcccattacgaacaaagctctctctcaattgaagcgcgtagagagaagtcccggaaggcccagttcgtcgcaaggcgagataaaccgcaaaaagtccagactgtttgcatcggaaggaaggcctgattcgccattgagagcaaggtccgccactccaacggtggaccaaaaaatgttcaacggtatggattccacgtcgcttttgaacgaaagattggagcattacaagcttgattatgttagtgacaaggcgcaacacactaagaatatatacgatccgaactctagatggttcagcagatcggtgagacccgaattccccattgaagagtttttgccatataagaccgaaagtcatgaggaccaagccaaatacttgtgccatgtcttagtcaatctttatattgccattagttcgttagatatacaagggttaatctctatttccagtaaagatctggctgatttgaagaaagaggtagacgatttagctttaaaaacggaccttttccgattatctaataacacagcagagaacgacttagttggtaacgacattgctgattacgacgatgcagaaggtctagaagacgagttggatgaatacttcgacctggcgggccctgacttcaatgccacgggtaagattaccgctaaatctgctactatcgtcaacgtcaaccattggactaatgagttcaagaactgtttgcatttcgatttcccagtggccttaaggaaatcccttgccacagtttattattatctgtcactcgtccagggtcaaaaagtgtataggcaaatgcacgttgatatgtttgaaagactggtaaacaccgatgacgataaaacaaatttcactgaacttttacaaaacgaaggtcttttgttggaccatcaaaccatgttagatttcctatgcgagtttttaccttatccagacccggactatgctcgatatgaactaacgtcgaaggaagatttacagttattcagattacttttgaagcacgcacacaacgctaaaccgttttttgacaaaacaaaggaaaatttattagttgacaccatgaatttcttgttgtctagtcttgccccatccactatgatggccatcatgcccattatcacatctgtcgtcccttaccactataatatacattccaaaatcattgactacttcccattctgctacagtatctggagttcagtgagtgccaacgtggccattgatactcacatgtatgattttgttggatcaatatccaaggacgttcataacaagatattaagcaatgatcatgggaaggaaataaacagggtagagtttggaaaatttgggattttcacagatgaccagatgacttttatgttcaacagactgcaaggtcaccttagaactgatggtcaaatacattcatactctcgcactgtgaagcctttcgtctatgctatcaacggctccaataaagataactttttcgagaaactcttgagcttagcaaaggctatcgaaacattcattcatccttctaacaatggattttggacgaagccaaatgctaaattcattcatgccttcattaaatcttatcatggaagagccaagtatgaagaagaaacatgtgccaatggtatcacgaacgaaatatgtctgacttcctcttgtcatgaagagattgtcgaaattttcttgaatatagtcggcctgggttcacaaaataaaaatcctgatattgccaactattacatttcctgtttcgcatatttattagaactgaatccttcaaatgcatacctcatttatgacaaaatactgatagatctgtatgatacgttggccgaccaatatattaattctagacacagaatcatatcttctttgaaacaatttacaagagtcatcaggtttgttgtaatggacaaattatatcgtgtgcacataacaaacattctttcaatgctagtttccaagctcgatatgaacgataccaatttgacaagcaaccttatcaatggcattgtatcgattgctgctttcatccctatcgaaaaccttacaagtgaagaagattacttatcgttcgaatctcatacccttcctttggtcgagcagcatttctatcacatcaaaaacggtgaaagttcaaagactttcccaattgacgaaacgcagttgggtgttgctttcaaagcctctactacggtttttgaaagtattctgaaagtgtacgtagaaaaagtcttccaactggtcgatgtggatttagaagactctttggccaccaaaataaaccaaacttctatgattttgcaagaatctatggacgataagatattccattactttggtgagttattacaaagaaacttctggagtaatgactccttcaaggaaaaggatccaaattacgaattaatcaccatcccgttggcagcattggtaagaagaaataatgccttaagtaaagacttggtcaagactcttttattccatatcaaagagcaaattaaaagaggcgctgggtctgttagaagtacatctgaaattcagcaaagagatgtaaagttggttttgtatttgactacgctaaatgatgtcttgagacaatgccacaattcactactggagtatagcgatgagttgataaccttcatgaaatatttatatgacaacataaccaatccaccattagatgtcatcacatctattgtcattcacagtgctttagcaactctatgtacaacagaaataacagactgtcgtctatttccagaacattctaaaatttctaaagaggatagatgggggggactgcagttcgatcctagaagatttgaaaaacagcacctggactttcaatggcatgttccttccaatgatgagataaccttgtccataagtattttagaaagccttacagactattgtgttaacaaagtagaagaactgatgaagactccccaaaatgattctgaatatagtgacatgatacaaaaatacgttttagttatgacacacacgctttccgggtcaagtttacttttcgatccagattttaacaagtatagaacacaatcaaacttgtcatatagagagaaactggttttgttgaagaatatccgtgaaaacaattgtgaccctcaagagctagatatcgatattgaacaaatccgttctggtaaggatgacgaagagtatatcgagagtaaggatattgaagcaggattggatacgggtgtctctgatgttgtgcaactgagagatgaattccaagatgaactgattgttgatgatgaaatggtatccgagatgccctccggtgtaaacacccccgttgcaggagctcatggtgctggtaattcatctatgagttccgaccttgcctttagagatttggacatctacagttgtaactattactttggaaataccacagaggagaagctacagaatccacaatacttacaagtccacaaggtaagatcacgtattggacgcttcttccacaagctttatttgttcctttctgccaactttgaaaacaataccaacatgttccaaatcttactgcatggtcttaaagtttggtttacagatttgggacaagaaactgttttcaatgaagatccggatgcctttattgatatcgatttcctcgagaacgttcaatctctttcgcatatgaatgagcctttcacgagaaccaactttgctattaggacaaacggtttgcatcaaagcagagtcctattacattcaacaaatagaaaaggttccaagttggaaaaccttttattggttgacatcatacatttagctacatcaatttatcctgatatttataaacctgcacaaggtactttggtacattgcatgaaacagttggtagggtcgtatggtatcgttattaacaaagtgatcccaatattggagaaagctgttaaagatcacgattatatgaaaatccaagttattctgaatgtattgttgattaaaaaagttcatagaaagcttatgacagattatagagatatcgacaaattgatatttctactaattgaatgctgtcatgtaaatgaattagaaattggtatgtacgcagacaagattttaactgatattgttattggtatcaaaattccgtcgagtgtatgtgtcatttctgatgaagctttcttacccttagcgccccccgatggtacaattaatttgcaggttgaagccgtaaggctagccaaaaagaaaaagcgtgaatactatctctcgctattggtcgatttgcaaaacagactgttagataaactggacaatgagaaagagatgggctggaagataaaaatgtttattatgcgctttgttacgcaaatccaatcgagtttggaaagtaagcccgacaaacgcgcagtttcctcaatagtctcacaaactgctactaagcatccagaaattatacatttggttgtaaagtcgttgctgtcaatttgtaacaaaataatttctctttctgactatgagtatgacatcagcagggcctataaaaatgaatttaatccatcttttgttgaaataatggacacctcgaatacggacttctctaagaattttgctaaggaaatgaataacttcgacaatccggagtactttattgactcaagagcatttgttggatggctatgttggggcagacctatttatgtgatgtcgtcaaaaactttgagcgttaatttacaaaagaatgagttagaagtgttgaagagcactggccatttagtgacgaaagaatttttgaaggatgtaacaatgaacttggtacaagataatgaaacaaggggtgtttttagtagtggcaatgtgtcattcttttctttaatcatccttttaatatcgtctggtttctgtgaactaaacatgtcagaactatttgagctgtgtgagtcatattataacaaagatgacaaggcttcaatgattatgtccgttgaaatagtagctggtttagtttgtggtagtaaatttatgtcagccgttgatttagagaagcgtgatgtcttcatagagaaatttttggcaaaatgcttagattatgaattaaatcacgacgcatttgaaatttggagcacgttggcatggtggttacctgcggtggttgatttaagaagatccaagacgtttttcaaccatttcatcaatgctgataacatgtttgatcctgaatctgatgcagccacacaccaaacttctaaaatttacatgttaagaagtattttgatgagtatggagttcagagcaccagatgttagtagactgttcgatgaattggtatttgaccatccttacgatcaggtccgtcaagctgttgccaaattattgaccaccctggtgcaaaatcaaagtaatccttcgatatcagatcccaagacattgttggaagcagaactgaatgactcagatggattggggttgcctttaaagagagttccagaaagtgtggacacgtacatcaagaaacaatttgaaatcatcatacgtatggcagagagtgttattggtttgagtcctcaagaatttatcaagaccgactacttctacaggacgtctaccatattttattggatcaaggagatggcaaggggacctaataaggttatattggttccatacctggtggattacgtgctaccatttctaatcggattagtgaagcacaaggacgtttgcgctcttgccggtctggaccctatccgattatacgctggcttgggctacatgccaatcagaaaaaatcatgttgccagaatcgtcgaatatgtctgttcttcggatgtagttctatcgtcgaaccaaaccaaactgcaactagcttttatccaacacttcctgtcagcagaattacttcaactaactgaagaagaaaaaaataaaatcttggaatttgttgtgagcaacctgtataacgaacaatttgtggaagtaagagtgcgtgctgcagccatactgtctgatatcgttcacaactggaaggaagaccaagcattgttggacctgatcgacaggtttgcaaaggggcttgacgccaacaaatacacttcgaaggaaaagcaaaagttatcaaagacagatatcaaaatccatggtaacgttttaggtctgggggccattatatcagccttcccatatgttttccctctaccgccatggattcctaagcagctaagcaacttatcctcgtgggccagaaccagtggtatgactgggcaagctgccaagaacaccatcagtgaattcaagaaggtgagggccgacacgtggaagttcgatagagtctctttcaacacggaagagctggaagacctggagggtgtcttatggagaagttactacgcttga

SEQ ID NO: 4028 - DNA, 684 bp, Saccharomyces pastorianus
atgccatcagattcggctatgagtgatcaaatcaatgctttgtcagtacagcagcagcagcagcagcagcagcagcaacaacaagtatatatgtcccctcaagcagaaaacttgaatcacatgtattcgttagttaacaaacttgtgctgcagttgaggaaaaaccaagcagaaaagacgaagatattacagaatgtagacgtattatctggtagcctgaacaggtatgaaaagtcggaacaatctcatgacacaacagacaacattgcattattcaatagatttttggaacaaagagggagggatactattatgggagaagaacaagtaagcgatggcattgaagaggacagggaggatgaggctatgttggaaacactgaagcgccaaaatgcgaagcttcgggaaactctagaggcatccaaacagaccacctttgaatccatggatttgttgaaatattctgaaaattcattaaagcatgtcgttgcgcaattaagggagaacaccttaatgtatcacgaagagacgatcaagttggttaggcaaaaattccaaatggaaacagttccctcggaggacaaagaattcaaaatgtatatggaaaatgtaaatgatttacaagagttggcagacatatcgaacacttataggctactattgaggctacatgtactagactga

SEQ ID NO: 4029 - DNA, 135 bp, Saccharomyces pastorianus
atggcattttcttttctcttggctgagcttgagtatgcttttctttattcaacccataacgagttttttgaattcctccatctcctcataacagttcaacgatttgcctctattggccaaaaggcactcagttaa

SEQ ID NO: 4030 - DNA, 1410 bp, Saccharomyces pastorianus
atgcttggtttaaaaccaacattgttgttgtgttctcttctccaattcatttcctttattgggtttctattatgctgcttaacatctccgataatcaaaaagtgggggctggctcaacacagaggggtttcctacggtgcctttggttactgtcgagccgcagcagtcgtttcctgctctcgaatacagttgatgtataatcctaccaaaataccgcaccttgactcctctttagaacgctggtggtcggatcccagggcaagacatatcatcgggaaacttttaatttgtatacctatagccacaggtttgacttttattagtttcttattttctttggttttcttttttctatacaagcctggaggatgtttgaacgtttccttgattatttctaacagtgttctccaaacagtgacatttttgtcgactttatttgcctgcgttgttattttgacacaattccatccttatacaacttggtgcggttggttaaccgttccgtgctcattatggtcactaattgtgtgtgtcttgtcagtgttgggctttgtgggcttgcatgaccaaccagaaaccattgataaagaggctagcgtggaaaacgttgatagcattcttaaactatatggtaggagccaaacacccagcaccattactgataaatctttgcaacttacaagaaccacgacaccttcctcctttagccattctatgtatgttagcgcaaatttcatcaatgatgacttacaaaagaccttagatccttatcgagaagaaccagccactgaaaatcaagatcaaccacagctaaaggatgactcccctttaaaacaagaccccctagtgaattttttcattcctaagttgaacgatacagaaatgttttccagaagggatgcagggaagcaggaaacattccccttgaataaaattgacttagctagcattcctgtaaagcaggaagaaggggaggtacccatcgagaagaaaatggaaaacattttgtactatgaaggaatttcgagccattcgcaacgcaactacgatccgccgtggttgttcggtgctcaggttgcctcagcagcccgcctcttcaagatatattcacagagagattaccaagtcacagcgcctccccaataccaactccatcatccgctagatttccagcaccaagaagatgtttatcacaattttacttccccatcgtatccgcagcaggtgggagactaccacaattataactataactctcattccattccgaacacttccaagcacaccctccaaacactctccgacacctacgtctcgcaccaaatggtgcctaagaaatacaagcctgcctacagacaacggatgcgtcctgtgaagagtagcccccagccagcttactctttctactag

SEQ ID NO: 4031 - DNA, 741 bp, Saccharomyces pastorianus
atggaagatcttattacagatcttactgaagagggaaaactggaaaaaaatacaaaagatcacggagacagagaaaccgaaaccatccaagaagaagttgaaatatgtggcttggacttcactgaagaagccgctcttgaaactagggaagcctcgttcaatggtgaagatcgacacgttagcgaagccacctcacaaagcgaaaaggcaaaggaggtttccgaggagccaaccgcggatgacatcttcaaagatatcatggatgagactgacgagttcctggagcaattgaaaatcgttgacgactctgaaataaacgccctgctccaatcattagaagggaaggacaccaaaactcaaaacaccaagactcaaaacaccagtcaaaacacgcaagaccaagcaaaagtacaagcgcaagccgtcatcaagacaagtgagatccgcaagctgaacgaacaagagcccgtatacatatacacttcactagccggaggcgggttccacatgatcccgcgaacaaaccgtctaagcactatcctgactgccaacagggtcccattcacctacagagacctgggtacggatgacgaggcaagaaaggtctggaagacgttcagtaagggcagaagccttccaggtgtggtgagagggcgcaacgacctcatagggaactgggaagacgttgaggaggctaacgaagactataaactgcgcgaacttatttacgacactatgtag

SEQ ID NO: 4032 - DNA, 2823 bp, Saccharomyces pastorianus
atggtagagccttcaactgtaaaggatcaggaacttaacattcaacccacaaaagtaagcggcgatgaaaatgctcatacatcggtttcaatagatccgtctttcttaagtgtggaaaatttgacaaacggtgaagatgagcttacagacgatatagacgaggtgttaaataccactgaaaatttcgcaatggaactaacatctcaaaggaaatttttgaaattgagaaacaaaaagaagaatcaaaagcaaaagaaatcaggtattagcggggctacttctgtagagcttcgtgatcttgttgatgagaccgtaacaatcctgccccgggatgtaagttctcataatttgagacaggaagatgatataatcaaagtaaatatagatacatcaaatgacggaattgaatcttctgtagacgcctcaacagacatagatatggatatcaatgagtcttccactaacgaatcagcaaagacgggagttgataatattccaactaggaagagcaaaaaaggtaaaaagaagaaagttaaaaaggctcgtagctccttgaattctacaggcagtactgattctttgaaccaatcgactttagattccatattggtaggtattgaagagtacctacaggacgataactcaaaggacgatgaggatatcaaggtaaatgttattaaagatgaagtcatcgaagataagcaaaccacagacaatgaggtcagtaaaataagctgcatacctttgtcagaaaaacgatttgatgagggaaaagagaatattgaaactgtcaagaaatctactcaggaaatactcaatgctgatgtgatcaacacagaccactatgaaaaccaataccgtgctggcttaggtgaggtggaacgtgctacatctcaagagcataatgacactttgaatactggcaaagaaagtatagaccatcaccacaaaccgcgcagtttggatgaagagaaggaaaacacagaaattgcaacagctgattctcttttacaaagcggaactaaaattgctaaaaccgatacctcagctatggatggatttcactctaatactggcaaatttaaaggtagcgatttggaagagggacggcaaactgatactgctcagaaaccagaacatccactaaatgtagagttaaaagacgaggataaaaataaaagtcatgccttggaactgcaaaccaagggaaacgaaaagccagtaacagcgaatcataaaaaagacgaaaacgtcaaaaagttcaaaggcattgtttccaaaaaagacactacactagaagaagatccgattaagaaagaggctgacattgataacacagcttatcaaacgggatgcactagtgaggatgagttgcaagacaatgctgttaaagtacctttagaagctgtaaaaaacgaaaaagaaaattcaacttcgcaagaacttgaaactggtaatacgactgagcagccagctgctgtaaaaaacaacaaagtatccggtatcgaagagggatcatcctcgaaaaaagacatgacttcaggaggttataaagaaaaattgaagacggggtatgattccatcgctagggaattagaaggtaatgcaaagtttgaagaaacatcagaaaagcctgctcgtaaagattctgctgaagtggccagcaaagaaaacgagccaaaagagcatgttattcttgaaatgtctagggtagatacggaggaaaaagaggtcgaaactgctgaagctttgaagggtgatacgaacggaaaagctttcagtgctgctgaggctttaaaagaagataccaaagtacatggcgccgttgctgctaaaacttcgaaagaagatgcgaaagtaaaaggcgttgaaactgctaaggaagctaaaaaaacagaagatgccagaacttctgaacctataaaagaaagcacaaatgtcaaggacgccgacgctacaaaacaagaagcgaaaggagacttcaccgaaactaatgaagctgtaagagaagctgcacaacctgagaatggcaaggatgctgacgcttccggagaaaacacacaaacaaaagatcccgaagttgcaaaagaagacgccgaagctgtcaaagaaggtgtgaagtcggaggatgtgaaagtggcagacaccgaagacaccgaagctactgaagctataaaagctaccgatgctaccgaagctataaaagctgctaaatctaccgatgctaccgaagctataaaagctgctaaatctaccgatgctaccgaagctataaaagctgctaaatctaccgatgctaccgaagctataaaagctgctaaagctaccgacgctaccgacgctataaaagctaccgacgctaccgaagcagccaagactttggaagaggatacgaaagagcagggtgtcgaggttgttaaaaaatgtgtagaaacggaagatgtgaaagtggaagatgtgaaagtggaagatacgaaagtggaagacgccgaagctgccggagctctgaaagaagatgcaaaagagaagggcgttaaaaccgttagagaaactatgaagtcagaggaaacgaaagtggaagctgacgaaactgtgaaagataccgaagcagccaaggctctggaaaaagacacagaaggacagggtgtcgaggctgttaaaattggtgtgaaatcagaagacaccaaagtggaggatgcgaaagtggaagatgcgaaagtggaagatgccgaagctctggaagaagatgcgaaaggtcaaaatgtcgaggataacaggctttcggagaaggcgcaacggcagccaatgcttcttatccagtga

SEQ ID NO: 4033 - DNA, 1101 bp, Saccharomyces pastorianus
atggcaggtgccggtgccggtggtatggttggtatagaattgaccgatttcgtttttattttaaattcgcaagacgctgttaagtcattttctgaattcgggactatcaccctaggtggtaatgtctctgtagctgccgggccccttggtagaagtgctgaagcagccgcttctgcctctgcgggtggtctggctgccgttttcgcctattccaagagtaaagggctattcgcaggtgtttccgtggaaggttctgccattttggaaagaagggaggccaacagaaagttttatggtgataattgtactgcgaaaatgattttgtccggtaggataagaccacccccagcggtggatcccttgttccgtgttttggagtcgagagccttcaattacaggtctcccaacagcggccgtggtggttacgatgaagacgaagatggctattacgatggcgacgatttttacaacgacattcctagttcattcagctcttcagacacttcatctggcagggccaatacaagatccacaagagggagagctaaaagtgattctcgctacacatttgacgatgatgacaatgacgacgattacggtgatgggcttccaagaaactcgagagtaacacccactgttagtggtggtagtggtggtaaacttgacgacccgactggagcttcgagttattatgccagccataggagatcgggcaccgctcagtcgaggtctcacccttcaagaaattcacgttgggctgatgatgaatacgatgattacaccggtggtagtggaagggacaggacgaacgatcgtgaggtggatgatttatcaaacagattttccaagtctagaatctcgtccgcttcaacgccgcaaacaagtcaaggcagatttgctgctccaacatccctatccacatcttctccaaaagctgtggcattatatagctttgcaggagaagaatccggagatttgccatttagaaagggtgatgttgtcacaattttgaagaaatctgactcccaaaatgactggtggactgggagagttaatggtagagaaggtatctttccagcaaattatgttgaactagtctga

SEQ ID NO: 4034 - DNA, 156 bp, Saccharomyces pastorianus
atgaatccagttgaccatcctcacggtggtggtaaccatcaacatattggtaaggcttctactatttctagaggtgccgtttctggtcaaaaggccggtttgattgctgccagaagaactggtttgttacgtggttcccaaaagacccaagattag

SEQ ID NO: 4035 - DNA, 948 bp, Saccharomyces pastorianus
atgccatgccacaaagaaacgtcacaaaataaaaactgtcattataacataatccacacaattaaaaaccaactaaaaaaacaaaagaccacactccactccaccgcaatgtctgaacaagccaacgtcgatactgccgaaatgatcacagtctacatctcgaacctgcccttctccgccagcgagcgcgacctgcacgcctttttgagtgactacggcgccacctcggtgctgatccccacacagaccgtgcgcaggttcagcaagaaacgcaccgacaagccccgcaagcccctgggcattgcatttgcccagttcgcaaacgccaccctagcctcgaaggccatccaagacctcaacggaaccaccttccagaaccagaaactgtttctgaaactgcatgtcccttacgaggcagaaccctccccgctaccagagaccaaaaagtccaaggacaagaagaagaagaacgggaaggaggccccggaaactgccccggacacggtctactgccacgatttgcctgacgacgttactgacagcgagatccgcgagctgttccagctttactccccgcaggagatctggatttacaggtccaaggtgtacaagaagagatgcattcccttggcgcctcaccagatcaccgccgctctggtcactttgcaatctgacaaaaacatcgtagatatctgcgacgacgtgggcaaggctgctgccctgaggggcaaaccagtgattgtgaagcccgctttcgtctccaagattcaagaaatcaagcaattggtcaaggacaacctcaccaacgcacgcgacccaccacctccggcggcaccagcggcaccagcggcactagtacaagaagtgcaaaataacgatgcaggttctggcgggattccaccacctcccccttcttcttcgggcgcccccgccctggctgctgcttaa

SEQ ID NO: 4036 - DNA, 972 bp, Saccharomyces pastorianus
atgagccaggagagcagaagaacacggcacgccatgggccgcacatcttctgaaggaccacacgggttcgtggacgacctggagcccaagagcagcatcctcgacaaggtcggggactttatcacggtcgcgaagcggcatggggagcgcgaggatgtggatgttgaccacgaccatcatcaccatcaggaaaacgaaaacgacaacgacaacgacaacgacaacgacaacgacaacgatgagctcgcgctggacgacctggaccgcgcgttcgagctggtcgagggcatggacatggactggatgatgccctcgcacgcgcaccacgcgccggccaccaccaccaccatcaagccacggctgctatactcgccgctgattcatacgcagactgcagtacccgtgaccatttcgcccaatctaatggccaccactttcacttccgccaacaagatcaccaagaataagaacaacagtagcccgtatctgaacaagcgtagaggcaagcccggaccggactcggccgcttcgctgtttgaactgccggacagcgtaattccgacgccgaaaccgaaaccgaaaccaaagcagtatcctaaggtgattctgccgtcgaatagcacacgacactcgtcgtgtgcgacggcctcgtcgtcgacgacgaccagcaacaacgacgacgtggtcgtcgctagcgagtcaccagtgatcgcaccgcacggctcgggcggcggacggccgctcagccggcgccggtcgtcgggcttgatcgtcgacgacgataagcgcgagtcgcacaagcacgcggaacaggcgcggcgcaaccggctggccgtcgcgttgcacgagctggccgcgctgatcccccccgagtggaagcagcagcacgtgtcgaccgcgccgtccaaggcgaccaccgtcgaggccgcgtgccggtacatccgccacctgcagcggcacggcagcacgtga

SEQ ID NO: 4037 - DNA, 168 bp, Saccharomyces pastorianus
atgtacttctgcgagatctccttagacttgtcagaaaccttatccagtttgtcgttaccttgcaacaacgcaacgaccgcatcgttcacacaccccatcagtttggacccagacgcgccactgctgtggtcgctcttgttatttagttgcgagccaaccacctcgtga

SEQ ID NO: 4038 - DNA, 231 bp, Saccharomyces pastorianus
atgcctgagtctacttgctccgagatcagtaccagttttttcgacacgttcagctcctccagcgacttgttaacgtccaggatctgcttgctcaacgataaccggtcgtttagcatcttttcggactccttcacgtatttcagcttttccagctccagttgcgtctccagatcacacagcttcgtgaacttgttctccagtttgtccatggtcaatttcaccagctcttga

SEQ ID NO: 4039 - DNA, 2550 bp, Saccharomyces pastorianus
atgacggactcggcgatgagtagacaactggggccaacgataccaatgactgctgtcgaagatgtggtgggggccagaatggctgcaaggaccaggaaaattaatggcgacatcaactataaagagaaagaagtgtacgatttgactgctgacacgttagattctgacgatgacgatgacgataaagatggcgatgtcaaggatgatgctcccgtgtggttgcaagatgatgtgcattccgacgaagatattgagctggactcagaggacgatgccgacacagaggctgtgcaggctcaggtggtggataagttggctaaagatacgaaattggaagaagacgcttcagatgatgaagtctctgaattggacactaagactgtttcattgaaactaaagaaactgaacgagttcgtgaggcagagccaagtatattccagcattattgcagacacgttgctgcaaagatctaacgaggtggttcaatctaatgctaagagtgaagagcattctgcaaagaaacgtaaaactaaaaagaaatccataaccgatttctttaaaaagcagaaaaagcccgaggcagccgtcgtcccagataatgcaccggatgatatggctataaagcagcctcaccttttgaaaaactgtactttgaagccgtaccaattagaaggccttaattggctgattactctttacgaaaacgggctcaatgggatccttgctgacgaaatgggcctaggtaagactgttcagagtatcgctctcttggcatttatatacgaaatggatacaaagggtccctttttggtgactgctcccttgagcacgctagataattggatgaacgagtttgggaaattcgcgcctgatttaccagtcttgaaatattatggagccaatggctacaaggagcgttccaccaaattaaagaatttctttaaacaaaacggcgggactggtatcattatcacctcatatgagattattctaagagatactgatttgatcatgagtcaaaattggaaattcttgatcgtcgatgaaggtcatcgtttgaaaaacgtaaattgtagattgattaaagaactgaaaaaaatcaatacttccaatagactactattaacaggaacgcctttgcagaataacttgactgaactgtggtcacttttaaatttcataatgcctgacatatttgctgattttgaaatcttcaacagatggtttgattttgatagtttgaacttgggatctggcgccaattctgaagcacttaataagctaatcaatgatgaattacaaaaaaatttgatttccaatttgcacaccatcctaaaaccatttctcttgaggagattgaagaaagttgtcttggcaaatatcctaccgccaaagagagaatatatcataaactgttcaatgacaccggcacaaaagaaattttacaaagctggtctaaatgggaaattaaagagaaccatgtttaaggaattgatcaaagaatttttcactttaaatgatgaatatatcggtcatatttctaataagtccataagagattttatagactataaattatccgtcagtatagattcaaatacaaaaagtggaatcaactcgactgtgttacaaatggataagttatacaaggagcacttacaagtggaggtttcgaataaaaaattacaaaacatgatgatgcaactaagacaaatcattgattctacgtatttgttttattttccgtatttgcatcctgaggatttaagtttggaaaatcttttaaaaacatcaggaaaattacaagttctgcaaatattgatcccaccattaatagccaagggacataaagtcctcatttattctcaattcgtcaatatgcttgatttgctcgaagattggtgcgagctaaatttctttgaaacatttcgaatcgacggttcagtgaataatgagacgagaaaagctcaactagagaaattcaataactctaacgataagcacaatatctttctgttatccacaagagccgcagggctgggtatcaacctagtcggagcggacacggttgttttgtttgacagtgattggaacccacaggtggacttacaagccatggaccgatgccatcgtattggccaagaaacaccagtaatagtgtacagattatgctgtgataatacgattgaacatgtcatattaactagagcggctaataagcggaatttggaaagaatggttattcagatgggaaaatttaacaacttgaaaagattggcactaaatgaaggctcatttttgaaaacaaataagccaggggcgaacgttactaacaaagatttagttcaagaactgtctatgctgttattgagtgacgactccagtatcggatttcgaaataggaggaaagggggaaacaatgccgctgagggccagctgaccgatgaggaggtcaaggaattaactgacagatcactcgaggcatacaagtctaatagggcagtgaacttacctcacgtcagactattcgaaaccacctcagggctttag

SEQ ID NO: 4040 - DNA, 3012 bp, Saccharomyces pastorianus
  modified_base (2846)..(2880): a, c, g, t, unknown, or other
atgtcattctggccatttggacagaatctaaaccattctaatatcaataaaattctagatgaatactttcatgtgttgcacgaaatagagaagattaacccgagtattgggaagtctataccggctgtcttcaacaacgttcagcagcgaggtaccaacgattccctggagtctatcccggaggagtatagccatgccaatgaagtcaggggcacaggtggtggacagaagagcaggtttgagaaggacgagcagcaggagcgctatgaaaaggaggaagaggagcagagtttgaactctagtgagtcttccagcacgtcgttctcctctgggtcgacttccaaaacagatttggacgaggaggatatcagtaattctacggcccccatgatggttaccaccaaggccttggataactcgttcatcgagaggatgcttgttgaaacggagctgctgaacgaactatcaagacagaacaagacgctattggactttatttgttttgggtttttctttgataaggaaaccaacaaaaaagtaaacaacatggaatacctggttgaccaactgatgtattgtgtctcgaagatccagaccgccaccacggtagatctcaacaatctgatagactaccaagaacaacagcagctcgacgacagctcgcaagaagatatctatgtggagtccgatacagagcaggaagaggaaagggacaataatttgaacaacataaataagagacgaaaacgcaagaactcttcacttgacgatgacgacaatgacgacgacgagggcggtaacaaaagcgacgagaacgaaagcgatgaatcggcttatctgaccaaagccactataatatcagaaatattttctctagatatatggttggttagtgaatcgttggtgaaaaaccaaccttatcttaacaagatatggtccattatcaaccagtccaatttcaattctgaaaattctcccctggtaccgattttcttgaagattaaccaaaatctgttactaaccagacaagatcaatatttgaattttattcgaaccgagaaaagtttcgtggacgatatgttgaagcatgtggacatttcattattaatggactttttcctaaagataatatctacagacaagattgaatcgccaacgggaataatcgaactagtgtacgaccaaaatttggtttgcaaatgtctaagatttttgaataatggagaatcaccagcggatatccaagcttgtgtgggtgattttttgaaggctttgatagccatttccgccaatgcgcccctggacgatatttccattgggccaaattctttaacaagacagttagcatctcctgaagccattgccaagctagtcgatatcatgatcaaccaaagggggtctgcattaaataccacggtctcaatcgttatcgaactgataaggaagaacaattctgattacgatcaagtcaatcttttggccaccactattaagacgcatccaccttcaaatagagatccaatctacttgggttatctacttaggacattttccgaccatttgtctgattttttccaaattatattagatattgaaaacgatctcgatcttccgttacatgagaaccaactgcacgaaaaattcaaacctctagggttcgaaaggttcaaagtggtagagttgattgctgagttactacactgttccaatatggggttaatgaattccaaaagagcagaaagaattgccagaaggcgagacaaagtaaggagccaactgtcccatcatttacaagacgcattaaacgatttgagtatagaagagaaggaacaattcaaaacaaagcactcccctacgcacaacgctgatgacgacgagataaataacaacaacgataacgatgatgagagtgattatggtgacgaaattgatgaaagctttgaaattccgtatattaatgtgaatcaaaatacaaaattaagaagtaatcccaccgtgggggacttgtttaaaattaaactgtatgacaccagaatcgtttctaaaataatggaactgtttctaacgcatccttggaataatttttggcacaatgttatattcgacataattcaacagatcttcaacgggagaatggatttttcatataattcattcctcgttctgtccttgtttaatttaaagagctcgtatcaatttatgactgatataaccgttccaaatgaagagggagctgaagtttccacatatactcctgttatcagagatccaaatttcaattttaagataactacgaatttcatattaaaaggttaccaggattcctataaattttatgaattgaggaaaatgaatttagggtatatggggcatattgtattgatcgctgaagaagtggtcaagttttccaagctgtacaaagttgaattgatctcgcctgatattcaagaaattctgcaaaccgaggattggcaatactactctgaagaagtactgaacgaaacgagaatgatgtactcaaagattcttggtggtggcagctacatagacgatggtaacggtaatattattcctcaactacccgataatagcgcagtactgggctccaatatggatgctaatgataacaatgaaatgtttgattcagatacagggaatgacagtgacagtaatggtggcggtcaattgatcaacgttgagtctttagaggaacaactgtgtttatccacggaatcagatttacacaacaagttaagagaaatgttgattaataaggctcaagaagacgttgataacaagaacacagaaaatggggtcttcatactgggaccaccagatgatgacgnnnnnnnnnnnnnnnnnnnnnnnnnnnnnnnnnnngacaataacaataacaacgacaataataacaataacaataataataataacgataataatgataatgacaatgacaaaactcgtgattataatgaaaatgctgctaatgataatgattatgatagtgaatga

SEQ ID NO: 4041 - DNA, 717 bp, Saccharomyces pastorianus
atggacgattatcaatacccgcagaataaaatactagtgctatcgcacgactcgcatatcttttcacaaacgcaacttttgaaggacttattccactacaataccacaagcgccacaatagtcaagagtcaaacctgggaaaataaatactataagacctctttcgacttgtatatagactctttcgcaagtctaccggaatggatgaaggattttgtcacgccggaatgtgagccacttcggaatgtcatggcaggaataattctcttaacagataacaaattaataaatccccaagagttcttacagccactcctgggtgtcttgcatcccaatacattcattgtagtagtaaacattaatgaagaagtggagcaagacgaaatcgacgggttaaacgaagcgtggaacaatggttttaccaacgtcatcgaatttataaactggaccaaatcaagagcaaccattggtcataacgagtatggagaaagactgggcctcgatagaattcacgaaattatagatacacacgactggttgaattgtgagcttcaaccgattgcaacaagggtggaggagccggcgtacgatatgccacttgaacaattaatcacaaatttgcaaagtgcaagactcagatacaaatctatggggaacaacgacgaagcagacgtatttgcaaacgaaatggctaacgaactatccaaatatttatga

SEQ ID NO: 4042 - DNA, 1641 bp, Saccharomyces pastorianus
atgcacttattccatccttcttggcagaccaatatattatgcatttgtttgccaaaatcccttatattcgtcgctcaaaacggcttaggaaataatgtgtcaaaaaaaaagctgcagtataatagcgacccgtttttcttatcagtcaaccattttgtttattgcccaaactaccccagagcatcatccacaagcatgtctcactcactgacttcagttttccaaaaaatcgacgccttgaagcctcagttcttcaacagactgaccaaggccattcaaatccctgcggtttcttcagacgaatcattaaggcctaagcttttcgaaaaagccaagtttatctccgagcaattgtcccaatcagggttctatgacatcaagttggtggacctgggcattcagcctccaccaaccgctacacccaacttgtctctgccacctgtgatcctgtctaggttcggcaacgaccctgcgaagaagaccgtattagtatatggtcattatgatgtccagcctgctcaattggacgacggttgggatactgagccctttaagctgattattgatgaagctaatggcattatgaaaggtagagggatcaccgatgacactggtccattgttgtcctggatcaacgttgtggaagcgttcagtgcatccgggaaagagttccccgttaatctggtcacctgtttcgaaggtatggaggaaagtggttctttaaaactggatgaattgatcgaaaaggaagccactggctacttcaaaggcgtggacgctgtctgcatctccgataattattggctaggcaccaagaaacctgttttgacttacggtctaaggggttgcaactactatcaaactatcattgaaggtccaggcgctgatttgcactccggtatctttgggggtgttgtcgccgaaccaatgatcgacttgatgcgcgtcttgggttctcttgtagattccaagggtaaaatcttggttgacggtattgatgaaatggttgctcctttgactgaaaaggaaaaggccctatacaaggatatagaattcagcgtagaagagttgaacgctgctaccggctccaagactagtttgtacgaaaagaaggaagacatcttgatgcatagatggagatacccttcattatccattcatggtgtagaaggtgccttttccgctcaaggtgcgaagactgtcatcccagcaaaggtctttggtaaattctctatcagaacggttccagacatggactctgaaagactgacctctttggttcaaaagcactgtgatgccaaattcaagtcgttaggctccccaaacaaatgtaggactgaactaattcatgatggtgcctactgggtttcggatccattcaatgctcaatttaccgctgccaagaaggccaccaagttggtctacggcgttgatcctgatttcaccagagagggtggctctatcccaattactttgacctttgaaaaggccttgaagacaagtgttttgctgttaccaatgggtagaggtgatgacggtgcccattcaatcaacgagaagttggatatttccaactttattggcggtatgaaaactatggctgcttacttgcagtactacgctgaatcgccagaaaactaa

SEQ ID NO: 4043 - DNA, 858 bp, Saccharomyces pastorianus
atgacgtatccctttgagtacttgaagaccggcttacagctgcagcccaagggtaccgcttttgagatcatcttgccccagattaagtcgtatttcgtgggtatttccgctttgaacctggccgcatttggtaagactattgtgaggttcattacgtttgacaagttatgtcaatctttgaataacaacaccgaaaataatgacaacttccaaagattgacgggtcccaacctgctggttgccggtacattaaccggtatagtggagagtctgtttatcatcccctttgaaaacataaagaccaccatgattcagtcagcaatggtcgatcctaaaacattggagaaggcccaccctcaagctagtgggaagcccactttccataaaccgaccaccaaggccgcctctgtgactcgtatcgaaaaacttttgcctacagtcaaacacatgtatcacacaagaggcctttcggcatttgtccagggaacaacccctaccttatttaggcagatagcaaacacttccatccagtttactgcgtacacagcgttcaaacggctgttgcaaggaagaaacgataagtcgtcgtcagtaatcacaggactagccacatcctttacgcttgtggcaatgactcaacccattgacgtcgtaaagacaaggatgatgagccaaaatgctaaagccgaatatagaaatacactcaactgtatgtatagaatatttgtccaagaaggtatggccacattctggaaaggttccatttttagattcatgaaagttggtatttctggtgggttaacgtttgctgtttacgaacaggtcagtttgttaatgggcttctcctccaggtcgtga

SEQ ID NO: 4044 - DNA, 159 bp, Saccharomyces pastorianus
atgccaccaacgatccaatcaagattgtcccagctgaagatggttccggtgccggtgctgctgttattgctgctttatccgaaagaagaattgccgaaggtaagtctcttggtgtcatcggtgcttaacgaaaaagaaaaaaaaagtaacgaagtatga

SEQ ID NO: 4045 - DNA, 1278 bp, Saccharomyces pastorianus
atgtataaaggagtcaatgcctttgccaatcctttgaggactgggataacaaattttttctctacttctattaaaagaaccgtcaacaataagcttacttttgctacaggttatactcaattgagaaaaatgtcttccgttactggtttttacattccgccaatctctttcttcggtgaaggtgctctagaagaaactgccgatttcatccagaacaaggagtacaaaaaggctttgattgttaccgatcctggtattgccgccattggtctctccggtagagtccaaaaaatgttggaagaacgtggtttggacgttgctgtctacgaccaaacccaaccaaacccaaacactggtaacgtcctggacggtttgaaggttttgaagaaacaagactctgaaatcgttgtttccatcggtggtggttctgctcacgacaatgctaaagctattgctctgttagctaccaacggtggtgacattggggattacgaaggtctcaacagatccaagaaggctgctttgccactgtttgccatcaacactactgccggtaccgcttctgaaatgaccagattcaccattatctccaacgaagaaaagaaggtgaaaatggccatcattgacaacaacgtcaccccggctgttgctgtcaacgatccatctaccatgtttggtttgccacctgctttgactgctgccactggtctagatgctttgactcactgtatcgaagcttttgtttcaactgcatctaacccaataactgatgcatgtgctctaaagggtattgatttgattcaagaaagtttagttaacgcttacaacgacggctctgacaagaaggccagaactgatatgtgttacggcgaatacttggcaggtatggcttttaacaatgcttctctaggttacgtccacgccattgctcatcaacttggtggtttctaccatttgcctcatggtgtttgtaacgctgtcttgttgcctcacgtccaggaattcaacatggaatgtccaaaagctaagaagagattaggtgaaattgctttgcatgttggtgcctcacaagcaattccagaagagaccatcaaggctttgcacgccttcaatagaactatgaacatcccaagaaacttaaaggatttgggtgtcaagaccgaagatttcggtatcttggctgagaacgctatgaaggatgcttgccacgtgaccaacccagttcaattcaccaaagaacaagttgttgctatcttgaagcaagcctacgaatattaa

SEQ ID NO: 4046 - DNA, 171 bp, Saccharomyces pastorianus
atgacaggagacataacctcgtgcgaagcagaaaatttgctgcagttgaaaacaggtttaggtgccatagtgtctaccgtgatagaagaattcaccctgtttatggatatcgctgagagaattgccgtgctacatcaaaaaacaaaaacactggcatcagcggccatatga

SEQ ID NO: 4047 - DNA, 864 bp, Saccharomyces pastorianus
atgtttggatttaataaggcatcatcaacacctgcgggtgggctttttagccagaacagtggggccagcagtggaaatacgaataccggattttcctttggtggaaatcaagctggacaaaacacaactccaggggcaggtgggctttttggtgcaaagcctgtcggtgcgagtatgcctggaacaacgggtgggttaggtgcgtcgtttggccaacagcagcaacaaccacaggccaatgcgtttggaggcagtagcactacaggaggcggtctctttggtagcaaacttggtaacacaacaagtaccagtggcggtttatttggcgctggtacgaataattctggccagggtgctaataccaacgccagtggtggattttttggctccaacgcagcgcccacaagcggaagtttattcggtaataataacaattcaagcagtgcaagcagtggcctattcggttctaaacctgccggtagtacttccttgttcgggaatacaagcgcttccacggctcctacacaaggccaagggctttttggagcgaaaccagccggtacatctctatttggtaacaacccagctaacacaaccacaggtggaggattgtttggttccaaacctgcaggaacaacctccttgtttggctcgtcaaataacaacaacatgggtacatcaggaggactgttcggaaatcagcagcaaccacaacagcaagcgcagtccgcgttgcagagtctttcccagctccccatcaccccaatgacccgaatttctgagctaccaccccaaattcgtcaagaaattgagcaattagaccaatatattcaaaagcaagtacagatcgacaagctggtccgc

SEQ ID NO: 4048 - DNA, 1677 bp, Saccharomyces pastorianus
atggacatttttagagtgttgactaggggtgcttctgtaaagaaaaattctggttcaaaggccaaagcggcagattacagtgccataaatgacaaggaagcaaatcataaggaaaaggatagtgaaacacaaatcgtgaaagagcttgatttcttccggaacaaaaaaataatcagcaaggtggaaaatgagaagggggaagaaacaaaagaagatgtttcgaatgaacgagatgatggcggcaatgatgatcaagatgtgttaaaaccaacaattactaatgcagccgaggcatctgccttaagaaaatcgtacaaaggtaatgtatcgggcgcggatgtaccatttccaataggctcatttgaagatctgatttctagattttcatttgataaacgtttactaaacaatctggttgaaaacggattcactgaacccaccccaattcaaagtgagtgtattcccatcgccctaaacaacagggatgtcttggcatgcggtccaaccgggtccggtaagacattggcattcttaatcccgttagttcaacagatcattgacgacaagaacaccccagggctgaaagggttgatcatttctcctacaaaggaattagcaaatcaaatttacatcgaatgttttaaactgtctcacaaaatattcttggaaaagaaaagacctttgcaaattgctctgttatccaaatctttaagtgctaaattgaagaacaaggtaattagtgataagaaatatgatatcatcatttccacaccactgagactaattgacgttgtgaagaacgaagctcttgacctttccaaagtgaagcatttgatttttgatgaggccgataaattgttcgacaaaacatttgttgaacaaagtgatgatattctaagtgcttgcaaggaaccagctctgcgcaaggcgatgttttctgccacgattccatcaagcgtggaagagatcgcacaaagcattatgatggatcctgcaagagttatcattggtcataaagaagctgcaaatacagatattgaacaaaaattggtattctgtggtaatgaagagggtaaactaatcgctatcagacaattggttcaagagggtgagtttaagccgcctattatgatttttctggaatctattacaagagctaaagcattatatcatgaattgatgtacgacagaataaacgtagacgtgattcatgcggaaagaacagcattacaaagagatagaattattgaacgatttaagtctggtgagttatggtgtttgatttgtacagatgttttagcccgtggtatcgatttcaaaggtgtgaatctggtcattaattatgatgttccaggatcttctcaggcttatgttcatagaattggtagaacaggtagaggtggacggtcaggtaaggccataacgctttatacaaagcaagattcagtagctatcaaaccgataataaacgtcatgaaacaaagtggttgcgaagtatcagaatggatggacaagatggccaaactgaccaaaagagagaaggaaagcataaagaatggtaaagcacatacggaaagaaaacagatcaccactgtgcctaagattgatagatccaaaagaagacgtcagcaagaaatgattgcagcatccaaaagaagaaaaaacgaagaactatga

SEQ ID NO: 4049 - DNA, 78 bp, Saccharomyces pastorianus
atgacaaaatcgtttggtaacattgatttaaataaaatgcccaaaaaaaccaacgaagaaacgtatggatggtcatga

SEQ ID NO: 4050 - DNA, 1110 bp, Saccharomyces pastorianus
atgggcagtggtaatttttcagatgagttagaaaaagaaaacttccaaaggcaaatccatatagatttgagtacccaccgagacatgagatctcaaaatgatgacaacactgggcaaaagaacaatgtgaattttgggaaacaaaaatcaccacacgataaagaaagtgtaactcgaagccacacaacaagtaacatatttaatgaagaagagttgcatgaagggtttaagaagatgggagaaataaataatagctcgaggcttgcccccgactccaactttgacatggaggattcccaattaaaaaactgggaaagtttttggtgcaatacagaaggttacaaaactaaacacattcaaccttttcatttcacaagcgggttagaggagataaaggaaccagttatggaggtgaatatttcaacgtcaccgtacaaagggcaaagacccaattctgctcccactgaatgctcagctgctactaccacatttaccaaaacacagcttgaggtgagctttttgaaaactaatctacttacatatatcaaaaaggagattgacatttgcctgacaagtataccatttttcgatgatgcaattcaaatgcaaaagaaattcttagaatatagagacatcgagttggatgaagaatatgaactgaagattttaggagagcttttgaatgaattgaatttttttcacttgcaggaaaactgtttactcaatagagagctagcagttcgcaaattctccaaccaatctgaaacccaaaatcttccctctcttaaaagtttcagagcctccctaattcctatgatcaactcacactctccctcaagaatgtcgaaaaggaatggaaaatcgttcgaggagagctatgagtttacaaccaactcttcaaatttctgggagaaagcagaatttcaaaactcagcaagtgggacacccaattgtttccccggtaataatctatatcaaacaaaaccttttatgccctttgaaaaccaaaatgagccttcttttaatagaatgaatgtagattgcaagcagcattttaactccggaagaagtattcaaaagggattagaggcgagtcttacaggggactaa

SEQ ID NO: 4051 - DNA, 108 bp, Saccharomyces pastorianus
atgaaaacagtactactaatgagtaatagcagtaatatgtcagacacccctaaacgttcggttttaaagatactttggaagaacggtatatatatagcacacatttga

SEQ ID NO: 4052 - DNA, 369 bp, Saccharomyces pastorianus
atgtcgtccgtcttggcgccatcgctttgtaggggtgactccaagctagacagagtcgttgtcatgtccacatacgacgaggggctcaggtcaataagatcgacgctgttcaggcccagagaagcctccaagtctaatacccgaagatttttaacggtcgccgcttcaggactgactgagctatggcacgatgctgccttctgcttcctactagtctttctcttggtgtggcacttacagggctcgccttcgtcgcaacggcaccgcgactcatcttcctcgctgcccaccgccagccgtcgcttggaagcacacatgcatccgccagaagggttgaaattcttggtcctcctcagctccttacaatga

SEQ ID NO: 4053 - DNA, 873 bp, Saccharomyces pastorianus
atgtcatcatttagtgaggatttagctcgtcacgttatcacacaagtagcaatgtccataaaacatatgcattacatgggtatagttcaccgcgatattaaaccagaaaacttactattcgagccaatcccattttacggcgttgacggggacgaattcaaactaggtgtcggcggaggcggtattggtttggtcaagttaacagatttcggattagccaagataatttctcataatactgctaaaactccttgtgggacaatagaatacactgcaccagaaatattcaactttgaggaatactcaatgaaagttgacatgtggggtattggttgcgtgctgtacacgatgttgtgcggctaccctccatttaacgaaaaagaccaatcaaagctagtgaagaaaatatctgaaggggactaccaattctcagcgccctggtgggatggcataagtttaggagcgaaaaatgcagtttcacacttactagaagttgacccgcgcaaaagatatgatatcggtgaatttttgaatgatccttggttgaatacgtacgattgcttgaggccgtcaactttagacgaccagccggcgtctgaatacgcttacgctaccgttgaggatatattaaatggctcgttcgataagaggacaacagagaacttacattccgcccttgaacagagttacgaacttcaagaacaagatgataccgaatcccataagagtgcaagctcacagtatattttcatgccagacaataatgaacctttaagaaacagctcatttgatgaactcgatgggccttttagtttagacctaaaaaggtcttctgtgtaccaaagaaggaaaagtaaagtgtccttttggtag

SEQ ID NO: 4054 - DNA, 654 bp, Saccharomyces pastorianus
atgtcaaagggtaccacgaaaaaccaaagttttatagcggacggtctctgttttcgcccgcagacacctgatgccacttattctgaagctgacaataataaaatatataggatagcgagtaatctcgataatgcgcacagcacgtattccactgattgccgtaggtcttctctctcagtgaacatcgataccccttctggagagagtgacaatgaggaagataacttcctggacagcgacattcaagaagtcggatattttagtgacgtctttccaaacgaattcgagttgaacgatgagtctgactcgtctacttactattccgttatggaatctgaatttcctgaacaatctgaattatgcaattacaaactacttaatcaaataggagacggcgcattttccagagtattcaaggcagtaaacgttgccggcattgaacaaattccggttgccatcaaagtaatcaaaaagaaaagcatttttggcgaatacgaaaaatatggcaacggtgcagaagacggcgataggattaagccatgcaacagagaaagtattttgaacgaaattgccattcataggatggtttccgagaacaacccctactctgttaagtttataagtttccaagaatctaccacttattttatctag

SEQ ID NO: 4055 - DNA, 810 bp, Saccharomyces pastorianus
atggctgaaacaattgaggcactgaagaacatttcaaaggtggaaaatggaagcgtatgggctggtgtttttgcagttaaaattcaagaggatttgcttgctgacgactttacattcgaagtgctaacaagagtgttaccattggactcgcaagctcaaatctttaataggaagtcgtttcatgatagatgtactattttatgcaatcggcttctgcaattgtttggctgttctattgttacgggcttagattatcaagcgttgaggttcgacaggggcagctttggtaagccattcttgggcaatgatcgatctattccttttagcatgacaacaggtgaacagtgtgtagctatgtccttggtgaagggcgcgagcacagatgaatatcagaacattggtatcgatattgcttctacgcgtaattatggtgggaatgaagaactggagttatttaaagagatttttagtgatgaggaatttaagggtttacaaagagcgtctgatccatgtgtgatattcacttacctgtggtccctgaaagaatcgtatacaaagtttaccggaacagggcttaatacaaatttggcaacgatagattttggtgcgatcactgtctttcccgttaacggagcttcattggacattaccttagataacgttccactggttttttattctcgatggttcaacagcgaaatcataactacttgcataccaaagtcgatcagcaatgaccttaacatgggcatcccaaaattatataacgttcccttatctatgttaattgattatttcatcaagacgtga

SEQ ID NO: 4056 - DNA, 519 bp, Saccharomyces pastorianus
atggagccattgctatcgacagtttgctctctcacttttttccatgccggaacggtgtttgcctcgttggcagcattatcaccgttctccttctcttcgtcattctcttcttgcatgcccatcttggctaggatttcggacgcagatgggatcgcgtctataccaggtatgccattaggagacatggaaaatggtctattgtcatgcatgtcagttggttcccggttttttatcaaactcttgagcgaatccatttctctttggatattgtttagttcctgcatgttgctgttgtctgaaacaaacttgtcaatggtgctttgtaggttggacatctcgagcttaactagtctaaattcgtcttcgatcttttctttgtttctcgtagtttgcactagtacttgttgcagttcggaaattgtgtcacctagctctttcaacttattgctttcttgctctctaagctctgtctgttctgtttcgatggcattgaggactttatcaattttggcaaactga

SEQ ID NO: 4057 - DNA, 1458 bp, Saccharomyces pastorianus
atgcaatttagaaaagtttgtaatcatccagatctttttgaaagagctgacgtcgattctccattttccttcactacttttggtaaaactacttcaatgctaactgcatctgtggccaacaataacagtactgttgtaagcaacagcaatatgaacctctctagtatgagcagtaataatatttcgaatggaaaattcactgatctgatttactcttcaaggaatccaattaagtataatttaccaaggttagtttatgatgatttgattctaccaaactataacaataacgttgatatagttcagaaaatacaaaatgtgaaattcaatattttcaacacatcaataaattatgaattgtgtttattcttgtccaaattaaccggagaaagctctctgaatgaatttttcaggatatccaatacgccactactgaaaaaaataatagaatttacagaccaaccacacaatcctaatagtttgatggtcaaaagtaaaactaaagaattattgagactttccaaaaatacaccttcgaaaggtgtattggcatcattattaaacatcaaacaactaacctatgaagatgagtacttgaatagtatacaacgtggttatcatccaaatgtttctgctcctccaattactattgaagttcttggttccagtcacatttctaatagcataaacaatgatctatttggcccaatagtgactcaggcactatccgatattccgacagcaacgcaatacaacatgcacgtcaacaaaaaaataccgattgaaagctttccaaggacaggattattccctgaaccattaaataagcatttttcatcaaacatatcgatgccgtctatggatagattcattaccgaatcagcaaagctaagaaaattggatgaattattagtgaaattgaaagcggaaggtcacagagttctgatttatttccaaatgaccaaaatgatggatttgatggaagagtatttaacctataaacagtacaaccatattagactggatggttcatcgaaattggaagatcgtcgtgatttggttcatgattggcaaactaacccagagatttttgtatttcttttgagtacaagagcgggtgggttaggtattaacttaacggctgctgatacagttatattctatgattctgattggaaccctactattgactcacaggctatggatagagcacatagattgggtcaaactagacaagtgacggtatacagactgcttgttcgtggcaccatcgaagaaagaatgagagatagagccaaacagaaggaacaggttcaacaagttgtgatggaaggcaagacccaagaaaagaacattaaaaccattgaagttggtgaaaatgattctgatgtaactccagaaagtgataagaacataattcagaatgaaatcaaagccagagcaagtgcattggcatga

SEQ ID NO: 4058 - DNA, 1089 bp, Saccharomyces pastorianus
atgtcgctagccgttttgctcaacaaggaagacaaagacatatctgatttctcaaagctcactgcggatgaacttcccacgagcaatggcaatgagggagtagccgatgctggacctcgcaaagtgctagataagagacaggcgtacctgtcccgattaaacagcgagtttgatcgcatcaagaaaagagactcgatagagcagctctaccaggactggaagtttgtcaatctacaggagtttgagttgatatctgaatggaatcagcagtccaaggactggcaattcgacaacactagtgattccatcgatctgcatttcaagaagctgtaccgtgatatgagttcgatcaacaaggaatggtcggagtaccagacgttcaagaacactaatctttcggacataatcaacgaaaaggatgctgacgaagatgaggacgaagacgaagatgacgtggaagatggtgacgaggcggtggaacaggaagaccaaagccctaccaaacacgtcaatggtaaaaatttgcatgcaaatggtgctcaaaaatcaaaaaagaaggattccacggctgccctggggagagctataaagaaggaacaagacaatgtcgatgcggtctcggctgtcgatggcgacgataacgaaggtgacggtgatggtgacgataacgacgacgaaaatgatgacgatgacgatgacgatgacgatgacgatgacgatgacgacgacgacaacgacaacgacaacgatgatgacgaggaagaagaagacgaaatggaggagcttgaagaggaggacttcgccgcttttgaagagcaagatgacaatgacgacgaagacttcaatcctgacggcgagaagaggagaaagaggtcttcgtcatcttcgtcatctaccaagttgtcaatgaactcgctatctcttataacatccaagaaaataaataaaaatatcactatcgacagcgatagaccgaaaatcgtacgtgagcttatcaaaatgtgtaataagaacaaacaccaaaagatcaagaagaggaggttcaccaaatgtattgtcacagactacaatacaatagactcagagtta

SEQ ID NO: 4059 - DNA, 1122 bp, Saccharomyces pastorianus
atgaagatgtatgctaaagtagctcgggccatccaaaggcactatgacaacacttacacgaccatttggaaagatatggcgcgtaaagattctgcaaaaatgtcaagattggttcaacaaatgcaatccatcagatcgacgaatttcaggaaaacctcgtcactctgtgctagagaagcgaaaaaatggcaatccaagaacttcaaacaaatcaaggatttccaaacaagagctagaagaggtattagagaaatgtccaatttctggaagaagaatgaacgtgaagaaagggacctaaagaagaaaatagaaaaggaggccatggaacaggccaagaaggaggaagaagagaaagaatctaagaggcaagccaaaaaactaaatttcctcttaactcagacagaactgtattcgcattttattggaaggaaaatcaaaacagacgaactggaagggaatggtgcttccaacaatggttctcaaaatcataaaaatatcgatatttcagcattagttccaaacaaaaatgatttccactctattgatttcgataacgaaaatgatgaacaactaagacaaagagctgcagagaatgcttcgaatgctctggctgaaacaagagcgaaagccaagcaatttgatgctcacgcaaacgcacaggggggtgacgatgaagatgacgatgaagatgagttgaatttccaaaatccaacctctttaggtgaaataactattgagcaacccaaaattttagcatgcactttgaaagaataccaactgaaggggttgaactggctagccaacctgtatgaccaaggtatcaatggtatcttggcagatgaaatggggttgggtaaaaccgtacaatctatttctgttctagctcatttggcggaaaatcataacatttgggggccctttctggtggtcacacctgcctccactctacataattgggtcaacgaaatatccaaatttcggcctgaattcaaaattttgcggtattgggggaacgccaatgaccgtaaagttctgagaaaattttgggataggaaaaacttgaggtataataggaatgctccattccatgttatgatacttcgtaccagatgtcgtcactga

SEQ ID NO: 4060 - DNA, 441 bp, Saccharomyces pastorianus
atggaaaaattgctaagctttcattgtcgtaatagactattattaactggtacacctatccagaacagtatgcaagaattatgggcacttttacattttatcatgccttccctttttgactctcatgatgaatttaatgaatggttctccaaggacattgaatctcatgccgaagcaaatacaaaattgaaccagcagcaattacgtcgtttgcatatgatcttgaagccgtttatgttaagacgtgtgaaaaagaacgtgcaatccgaattgggtgacaagattgaaatcgacgttttatgtaatttgactcaaagacaagccaagttataccaagtgttgaaatctcaaatttctacaaattatgatgccattgagaatgccgccacaaacgactctactctaattcaacctccagttcgggttccgatcaaaatttaa

SEQ ID NO: 4061 - DNA, 858 bp, Saccharomyces pastorianus
atgacttgctcgttgatctttatgaacttgacgtcatcctacctcgattacatcttagctgtggattctttgaatgagacaagaactaaagagcaagaattataccaaaccatggctaaactgcaacatgtcaatctagtgtacaaaaaaatcagatctctatctgagaattttatcttcattcagctagctgacattgtcaataccacggaatctaagaagtacaactctttatttcaaaatgtggaaaacgattacgaaaaggttatgaacacagatatgcaaaattcaattgtccataggattcaaaaattgctgaaggaaacgcttcgaaattacttcaagattgcaacgtggtcgacactagaaatgcctgtcgatgaatatgatgatgataatgatgacggcgccactgtaccaagtgctgaattggtgaatccaataaacgttttaacaagattgatcaacaagctagattcattagatatcccattacctatatttttgaaggttaaaaacgaactgttgaatgtcattgtcaattatttcatagagtcaatcttaaagttgaacaaattcaacctaaatggtttgaaccagtttctacacgattttgaatctttaaagaacgttttaagcttaccaccacacgccatcaaccataaatctatgagtttacacgaacttataaaaatattgaaaataaaatacgatcgaaacaatcagcagctcctagatccagaatatatcaaaatgggtgatttcgcatctttaagagaaatatactctatcaagtacctaagagacacggagatccaggacgcactttacagaattatatatggtaatataatataa

SEQ ID NO: 4062 - DNA, 2091 bp, Saccharomyces pastorianus
atgaatacaaatagcgtgtggcgttcaaggatgtctcttacgctaaccaatgaaattctatttcactacaagtcctcggtgaaggtaggtgagctagagagatatgtcattacttataatctatatgaaggtgaagcgatcccctcagatttgaatttagactctttatggctaaaagtaaggaacatgaacccgctgtcgtacagagctgcgtatctcatgggtcccttcatgctgtattgcgatgttaagactgccgagtatcaccattctcaaaaaataatagcttcagtggactaccccaaatttgaaccgaacgtacaggctcaacaagatttcgttgctgaactttcagtacataacataaggcagcagtacatatggattgcagatatcatgagccaaatattgtttactacgaacacaaacattacatacgaagtcacagttggcacaaccagagagtcagtagaaaatccacacgatctgccgtcttatttgggctcctatagccctaagttaacagtaaacaggcttacaaccttggatttatggaaccttcctgttcaaatcacaactccgaaaagaaagaagcatctcgtgcttttaactcatggtttgcactctaatgtgtctacggatctagtttatatcatggaacaagtatacaaatcccagaaaaactatcctaatgagcaaatagtcgtaaagggttacagggggaacgtctgtcaaactgagaagggagttaagtacttaggtactcgcctagccgaatacattatccaagaactgtacgatgaatcagtctgcaagatttcctttataggacattcattgggcggcctgatccaagctttttcaattgcatacatctacgaggtttacccttggtttttccagaaagtaaaaccaataaatttcataactttagcctcaccacttttaggtattgttacagataatcctgcttatattaaagtactgctatcatttggggttatcggtaagacgggtcaagatttgggtttggaaaatgaatccgagggggggaagccactgatatatttgttgtctggtgaaccgttaacagggatcctgcgtagatttaaaagaagaaccgtatatgcaaacgccatcaatgacggaattgtaccactgtatacagcatcactgttatacttagactatgatgatattttggaacaactacagaagattaaagagaatagcaaaaaaccccctccgatgaacaatgttacggtaaacgaaaaccgagatttcttcaataagaattttatttcacctttgactaaaatgctgagtatatgggcgccacaaaaatttcctacagaagaaggttcaaagattcctaaagtttctttttttgaatccgcaagttcaattctattgccgccattacctgaaaaagcatatataatggatccagactctagagatcctgtgattattcatgacaaaatatatacagaggatgatattccgcaatctaaattcaatatcgaggatggattcttcgataaaaagaatattcttctccaagctttttttgcaagaaagaaagaacgtgcaaaataccggaatctagaagaaactattgctagaagatggcacacggggatgtcatggagaaaggttgtcgtcgctttgaaaccggacgctcataataatatcatagttcgaagaaagtttcctaacgcgtacggatggcccgtaatcgatcatttaatagacgtccattttaacggtgatgacggagacagtgacggtgacggtgacgacaattgttttcctcaagatattgaagccattcaaaaggcaacaaatgagggagcaaataaatatgagaaggtggaaagcattcccaaagaatatgaatggttgaataaagtggaaacaaacggcgtctttgatgaaggtcctacagggatgatatctactgtgggggaaatagtagaagcgctggctaaaagaggcttcagtgctatgaccgacagagggaatactccggaggatcccaatgacgagattcttcgttttgaagaaatgaatagtgacttggttcaatga

SEQ ID NO: 4063 - DNA, 1851 bp, Saccharomyces pastorianus
atgcctcgaaaatccaatagaacgaagcaagaagttagaagagctccaatcttttggatattcctagctttcagagtgctgaacgcagccttgacaagaaccttctttcaggcagatgagttttggcaagcgttggagcctgcgcactggaaagcctttaaatacggggaactcacttgggaatggaaatttggagttcgtagctatatgtttccgatgatctttgagctaacctacagattggtttcactatcggtaataattctccattacacccttaaagctttttcaactataggttccgatttacttattctactcttaccaaattatgaattaacctggcagattgaacaagacttacagagacttcctttggatgcctcacggtcatttgaatactacggcgtgatatatgcaccaaaaattgtcatggctgtactagcatccactggagaatattatattataagatttgttcagaaaatctatttactgacacttgataagaaaaaggacgagaaggaagataagggacttagtggtttgtcggaaattacgaaatttgccctacttctaagcctaactaactttttcaattgcttttttatttcgaggacatttatcaactcttttgaaatggtgctcacctctattgcgctttatcattgggattggacaggggggcaaagggtgaaagagtcatcgttcacaaaagcgcttatttttgcatttttggcatgtttgcaaaggcctagcaatgggctcatctggatagttcccggccttttcctgctgctaaatttggtgtccaagaagcagtatcacttactgtctgtcacactatcgaaagtcattcgatcgttttcgctagtattccttgcgaataccattattgatatgtatttttatagggaactgaccttcccgatcttccgctttctaaaattcaattttacaacaccattagcgaaattttatggggtggctccctggcatttccatattttgcaaagtctgcccattatactaggcgcatctattcctattttcatatttggatttttttcccagctcagcaggaaaaagtttcccaactggtacttaaatccatttttccaggttaattgtactattttgttgaacctaatagtatactctagcttacctcataaagaatttaggttcatctttccattacagccgctctttatattaatatcatcgtttggtttatcaagacttagtacggagtatcgaaacaagctgaccagcttaaaacttctgctctggctcgttccctttatatcagtgtttgctgcattactgttaaatacattccacgaatcagggtccatcgaagtcatgaagtttctgcacgaagagccagaaatagatagcttgggatttataatgccctgtcattcgacaccgggtcaaagttatctacacaggaatgatatttcagatctgtggtcaattacttgcgatcctccattgcacctacttgaagacccaaaagcctcttcgaagcttgaggtttatatggacgaaagtgaccatttgtatgaagacatacccaaattcatctatagaaacttcccaccgatattccgtaaaaacctaagaagcccagacaagatatttagccatgaatggccaacatatttggttgttttcgagcacatggaaaacacttacctaaaagattttctgaaggattcgtcgtatgtcgaatacaataggtttttcaactcccttgctcattgggattcaagaagatcaggtgacataattgtttactataaactaccttttgatcttaaagatatgtcggtagtaaaaagctga

SEQ ID NO: 4064 - DNA, 1797 bp, Saccharomyces pastorianus
atgtcacttttcttatatttccaatcggtagtcgtggtcgcaatgcagcatgtccatcgggttccacccattgctgctgcttgggcggaaaatctggtttggtcaatggggttgattagaatctcattcatgcaaagaattttccgttggtatgtacagtccacaggcggcacgccaagtttgtatttgacctctacttccatgtctgtcttggctcaaagaagctgggactatttaatggaattttccttaatgaaaagagccaccaacgtcttatatggaaattctaatacattgatttttagaggtatcaagagactgggatataaaatgaagattgaaaacacatccatcgtttgtaccggtttcaccttcttcgttttatgtggttatgtacttgctggatttatcgtgatcgtgaaatgctgtgtggaattggccgttagattgggttggattgaaaagacaagattttgggagtttaggaaacagtggaaaataatattaaagggcgctttattaagatatatatacatcggtttcgttcagttaacaatcctaagtttctgggaattcaccgagagagactcagctggtgttatcgttatcgcttgtctattcattcttctgtcatgtggattaatgctttgggctgcgtggagaaccgtgttttttgcaagaagatctgttgcaatgtacaataacccagctgctttattatatggtgatgaatatgtgttacacaaatacggatttttctatacaatgtttaacgccaatcactattggtggaacattgtccttttgtcccacatatttgtaaaatcattattggttggatttgctcaagcttccggtcaaactcaagttctcttcatgtttatactggatctgctttattttatcgccatcatctactataagccctatctggatcgtccaacaaacataatgaacattttgatttccaccgtcacagtggttaattccttcctttttatgtttttttcagatctgtttaaccaaagctacaaggtatcagccatcatgggatggattttttttatcatgaatgctgcattctcgttcattttattattaatgatattggcatttgccggtatgatactcttctcaaagaatcctgatctaagattcaaacctgcaaaggatgatagaacctccttccaaaggaacactatgaaaccagaaggtaccgtcaacagatctgtagccaacgaattacttgctttaggcaacgttgcaagggatcataacgacaattcggattacaaatcaaataatactggaatgaacgatgagccaaaacaagtgcaagatgaaaccactcccacaacgttcacctcaagtgatgagaacaaagcctctttgacagaaaaaatatttagcaaattcacaaggcagaagaacaacaatgcaagtacagatgttttaaaggatgaaaattctaatcaacaaacatttccccacaacctaacaaatctttcgcgcgaaaacctgtcaacattaacaatgggttccaaatcatacccaggacacacaaggacacagtctgacgcacataatggattgataaactcttttgaggaagaagacacaagctcaactgcagacccattccacgactccactgaaggagaccttttagatacctcaagctcagatggaggattcggatcacaaaactttgttagagatgacagtatgaatagtttaggaaataatcaacaaccagtaaggaaaccaccaggattttttgatgaaggtttcatgtga

SEQ ID NO: 4065 - DNA, 243 bp, Saccharomyces pastorianus
atgaaatttttacaaaccttcaaatcgtgttccataattgggctgataatatcactgaccagtaacataggtctagtagaggcgaaaaggaagctagtagcgacgtcattagtcacatgtatggaaaactcccaactgtcagcaaacagttttgatgtcgtctttgacccggacgacaggtcgctacactacaaccttgacatgacaacccagatgacctgcagcatgcagctggcactgccg

SEQ ID NO: 4066 - DNA, 2256 bp, Saccharomyces pastorianus
atgtgcgtagcattcaatccaaaggaccctactacatttgcctccggttgtttagatcgaacagttaaagtttggtcgttgggccagtcaacaccaaatttcactttaactacggggcaagaaaggggcgttaactacgttgattactacccattacctgacaagccttatatgatcactgcgtcggatgacttgaccatcaagatctgggactaccaaacaaagtcatgcgtagccactttagaaggtcacatgtctaatgtttcgtttgctgttttccacccaactttaccaatcataatttctggttctgaagatggtactttgaagatctggaactcttccacttacaaggtggagaaaactttaaacgttggtttagaaagaagttggtgtattgccactcatccaactggacgtaaaaactacattgcgtccgggtttgataacgggttcactgtgctttcgttaggtaatgatgttccaactttatcgcttgatcctgttggtaagttggtatggtcaggtggtaaaaatgcagcagtttccgacatattcactgctgttataagaggcaacgaagatgtcgaacaagatgaaccattatccttacaaactaaagaacttgggtccgtcgatgttttccctcagtctttagctcattctccaaacggtaggttcgttacagttgttggggacggtgaatacgttatttatacagctttggcttggagaaacaaagcttttggtaaatgccaagactttgtttggggccctgactccaacagttatgccttaattgacgagaccggacaaacaaaatactataagaattttaaggaagttacatcatggtctatcccattacactcagcagtcgataggctattttcaggtgctttgttgggtcttaaatccgaaggctttgtttatttcttcgactgggacaacggtgcgctggtcagaagaattgatgttaatgctaaggatgtgatttggtccgataacggtgaattgctcatgatcatcaacactaacgacagcggtgacgaagccagtggttacactttattattcaacagagatgcttacctcgaagcagcaaaagacggcaacattgacgactcagaaggtgttgacgaagcattcgacgtattgtatgaattaagcgaatctgttacatcgggtaaatgggttggcgatgtctttattttcaccacagcaaccaataggctaaattacttcgtcggtggtaagacttataatttggctcattacacaaaagaaatgtacctattaggctatttggctcgtgacaacaaagtatacttagctgatagagaggtgcatgtttatggttacgaaatatctttagaggttctcgagtttcaaacattaactttaagaggagaaattgaagaagctatcgaaaatgttctcccaaatgtcgaaggtaaggactctttaaccaagattgctagatttttggaaggtcaagagtattatgaagaagcactaaacatatccccagatcaagatcaaaagttcgaattagccttgaaagttggtcaacttacgctggctcatgatttgttgacagacgagagtgctgatatgagatggagatcactaggtgacgcatctttacaaagattcaatttcaaacttgctattgaagctttcacaaaagcacacgacctagaatccttattcttattgcattcatctttcaatgataaagagggattagttactttagctaaagatgctgaaactgctggtaaattcaatttggcattcaatgcttattgggttgctggtgatatagaaggtgctaaagaacttttaatcaaatccgagaggttctcagaagcagctttattaggttcgacatatggtctaggggataatgaagttaatgatattgtcaagaaatggaaagaaagtttagtactcaatggaaagaaaactgtatcagaaagaatatgcgagaccgaagggttaccaagctcatcaaaggcagctgatgcacaacctctaattgatttagattctgctccaacatcgaaacatgcccaagaaattcaaaatactgaaatcgaagaaggcgagtttgtagaatcaaacataaaagaacctgaaggagaaaaggaggtagaaacttcacaaccaaaagaagaagatgaacaagggcaacaggaaaaggctgccgctgcagaagaagagaacgagagcaagtcggagaaagacgaataa

SEQ ID NO: 4067 - DNA, 1716 bp, Saccharomyces pastorianus
atgtacacagagtttattgactttttcattaacaaaattgtacctaaggacatatcagctactcaactgcccaaacagctttggaggaatttttgtcgaaatttttcatttgacgacaaaacaaatgcactatgggtgctcatagatcttgtatctcatttctctcctgatataaaggcagctgtagatgactctatggaattatgtggtcaaattcgtagtgagagatttaaagttgcgagggagctgaagtcagaagcagtcgtattgggtaatcttcagaacgagctgcaggcaattcaagagaagttgaccaaaaaagacgaaaatgcacaatctactgataatctggataaacaacatgatgtcgaaaccaataatgaacttttggatccttctgtcattaaagaaaagcaagagctgaccatggaacaagaaaaaaaagtggaagctctacaatcggataaaaattatctcgacaactgccttttcgaaaacgatttgcagagattaaaaccgctcggcttggatcgatatgggaacagatatttttggttggaccacaatggtgttccatgtcatgagcttcctgttgatattgaggagacgtccaagagtatcagtgatttcagctaccagtccggccgtttgctaattcagggccctagagcttcatctgcgaaattctttttaaatgtcagtgatgaacaattgagtgattggcagaatatcagcagttccaaaggagcatctaaggcaaccaaagaagtgtttggtatattcaaaactgactccgggtcttatagttacgttgaaaacgggatagagaccgaattattggatagcaatggtcgcgtaaacccactcattgagttgacaccgattcaaaagaaaatcatggatgaaactccttcaaggctgctgctgtcaccagaccaatggtactgtatcgataagtatgaagacttgtcaaaaataatagattggttagacaactggggtcgcaaagagcacgatcttttaagacaaatcagacctgtactacagcggattaaaacttccgttagcctccgcgaccatacattatcattgggagcatttactaagagcgaagaaaagttgttaaaggaattagaaaataatgagtttaccgaaaatgaattgaacattgacaacatggacattaataataacaataaaaataacaataataataacggtgtcaaaagtgaagctgatattctagctgatgcggaagaggaaaaggaggctgcgttggatgaaaaactggaggccattgccgacgaacttgtgaaactagatgatagctccaagacacggaaagtgcttaatagaatccaagaactagaaaaccagagggacaagctcttgaaacagaagagaacaataataaattctcaaagaccaggagcaagaattttggctcgctcggaaaggaaaagaaccaaagtctctcggagcaataagttgaatagacagatcgaaatacttactgatctaatcaattacagacatttcaaggccatggaagatgtgataggctggaagaatacattggctaattcgatatggggatcttcacttcgcaagaatgcatcaggtaataaaaaaaatggcactattgaaacggttgatgacaaactaaaagatatagtgggccaaacgtctagaactgtaacacctgctccaaattaa

SEQ ID NO: 4068 - DNA, 4209 bp, Saccharomyces pastorianus
atgtctagcgaagagcagcatagaagaagagaggctactaaaaatgttaattacaatgaaaaggaagtggatgctgaattagctaagaggatacaaatactggaaaaaagtagcaatgaatccaggggtagcaataatcaaagccccaaaaacagtagaagctccagcagcctatctgggaggaatgagaagtttaaataccaaaaattccttcatgataagaatacctgttggaattttattccaacattacctccttcgtttagaaaaaatagcaggttttcaaacgtattggatctggatgatgccatgattgatttagagaaaatggttcttttcaactcggactccgtacttctatctgcaaatgacacaatttatatgatatcagagccagccggcgagccgtattatattggcagagtcgtcaatttcgtcagtaaaccagaattttcaaataccattaaagatgctacgaagactacttttatctttcctgccaaatttttccaagttaggatgaattggtattatcgccccagggatattcaagaagaagtaaatacttttaacccgaggttggtatacgcgtcactacatcaggacatatgtccaatatcatcatatagaggcaaatgtaccatactgcataaagatgaagttttagatgcccttccgaatgaaaaagaaagtattatacgaccgaatattttttattttgatgaacttttcgatagatacactttaaaatattatagagtttttagtactgacaaaatactgaacaaatggaacagcagatcgccgtttctttatgttttaaacaagaggtttcgatatgtctatacagaaccgaaatatccgttggaaaacattttgagaaagtacgtctttcaagatcaagacgtcaataaaataagacatgaggactacaattgggacaaaaggtgccagttttgtaaagaatggtgtctccagaaagaaagtcttctgtgcgacgaatgtggtgtctgtgcacacctgtgctgcatggaccccccactcgatagaaaaccgaataaagatgttgcttggacatgcttcagctgtcttcaaatgcaagagaataccgaagagtcacatcgcaaatttaaggaagaacaggcgacagagttgagctttatccgtttcgtgagagaaacaatcgaagaagtctctaataaagctattaaagaaaatgttggttataacgctgaaaattgctggtttcaatattttgggatatattccatttcacatattggcgacatcttgaatgaatctgttttcttaccatatcccttcaaaccttctagagtgggtatgaaatatcagtggtcgggctgtatcaataataagccctggaagcagagaccgtattcactgacagatgcagaagaagagcgaggttcaatcaaaacgtctcaattagcatgggtatttgaaccgtcaaaaataactacacagaaattaaatgaatatgttgaacaatgtaaaaaggaattatgtcccgttttagaagtaaaaggggagatttgtaacttcatcgatgtaatcctaaaaaatctgctatcaacaagttatgacacagcagaagcgtttgaaaaatccaaaaaggaactttctagagaatctttgaacgagccgacatttacaattgaggaaatacataaattcgaaacggctgtgggaaaatttggaagtgaattacgtcccgtatgtgagtatgttggcactcaacccatgtcgatgatcgtaagattttattataactggaagaaaactgaaaggggttttacagtgagagggaaactcagcaaattatcacaaagtaaaataaagaagaatgcacacgttgacgaggatgagctggtaaccaaatatatagacgactcttcctttgataccgaaaaactctctttaacagaaacttcttttcaatgcatgttttgtaaaatagattactctccaatgtggtataaagttactggcggttcagatgaagaaaacattaagataagaatgcaaacaggcgttaacgaaaaaacagaaatttcagaaaaattgccagctaatagtaaaaaaaatgagagattaggcgccctttgtattcgttgcgcacgtatgtggcgaagatacgcaattaaatgggtatacccgcttgaaacactaaaaaagataacaggcaccagtcagaatagtttttatgcagcaatagaaggaataatcgaagagagcaacattaacaaattcaccttgtctccatttcaagctcacagtaaactactggaatgggagcttgttcaggattcggagctgatcataaggcagagaatgaaagtgtatgaaaatccaagttcattcatgagaatgaagcgctattcgatgacatttcacgcacaactttacaaaatggttttgagaacatattgcaagaacgaatttggcccggaaagaatgcaatcagagcttaagtcgtttttgaaagataagaaaaacgtagataaagttcttagagtagatggttcagagggaacaagtaataaggaagatgggtatcctgtaaatataattcagcaattgccgaatattatcaataaatttaacacagccaagaacctcgaaaatgaaaacagtttcatcgataatgatagcagcgacagtgctgctaataccacgagtccttcaaatgaaatgataaaaattccaatgaaagcaggaaacgattccttaggttccgtttccgtagataaaggctttaaatttgtcaagtttgataataaaatattccaacggttacgaaatagtctaaaaccgctgaatcataagcagccaaaaaacaacggaccttcaacaaaaaaagctagaatgattagcgatactgtagatagtccgtcaaagtgtacaaagagtcaggattacaattacccagttattctacattgtaaggatacttctgtcatccttcaaaaataccacgattataatctaccgagcagagtacccgatgaaaactcaagtttgaagtattctaaaaataaaatcaaaagtcccgatccaccacaggataaatatggctcgagagggttttgctgtgtctgtaaagagaacttcaatgcctatgagaactttgagctactatgtggcaattgcgggctaactgttcattacttttgttatggtgtcatattatccaagcatatacgggagtactctgacctgaaaaagtataaatggctatgcgacccttgttcaaatgacctgaatcctatactgtcaaccacgtaccgatgtacaatgtgtcctactaaagagaatgactatgataaatgtaagagtcaatcttcaaaattatttcctgacgcattaaaatgcacgagctcaggaacatggattcatttggtttgttcgctttttgacgagaatatcaagtatggatgcggacaagcaatgcaaccagcccttaataccactgctgtgcttattgaaaacaataggttcacctgcggcatatgcagaataagcggaggtggattggtcaagtgtgaccaatgctcctataggtatcatgttacatgtgcgcaaagtagcgctgactttaagcttttgtttaaaaagaggaacatttcttcaaatacttcacattcttgtattagagatactaaacttaatgaaagttatacattaaagcctgtattattatgtgataaacacgacgtcaattcaaatggaaatgagtactttcaattggcatataagcctcaacataccctttcgtatatggaacagtattgcagatattataaacataccagcggtcgcaccttggccgaatcgagatatttggaacagctagcaacgttatatggtggaataatgagggatccaggcgaatctataactaatcctagagcgtgcgtactccctaccgaaaaaatttgctcatgctgtggtacatctaaaactatatattggtatgaaggagatatttgccattcttgtaacttaaactcaggcgttttagaggctgactacgaaagtgtggatgataacagtgccaaaactaatgatatttcaattgatatatctcaaaaattgatggaagggcttgacccagccattcttggtatgaatactcataaaattgttactggtaaaaaaaaaaagcacaacaatcaagcaaataggtag

SEQ ID NO: 4069 - DNA, 1353 bp, Saccharomyces pastorianus
atgctacgttcatcgtcctccaaatttacggggcagagactgttcaccacagctcgtctcctccaggctgccaaaccagcaccaaaaggtaaaactcaagggttttccaaaaaaacatcatcaacatcgtcttactcttctgccaagagaatcaccccaggctcgctctacaaaaactggacgaataccacacatactgcccaattacaacaaactgccgttcctttaccattacccatcttcaatttcgaacacatttccaagacgttgaacaaagtcgtatcattctccaacaaacaatataaatcccttcaccatttgggttcattcaagaaatctcaatttaacgaactatttcaaaaaccggtctctttagttcgtgaagatgcaactaacagttttttaaaaaaattgatttctcatccaataaaaaaattcataatcaccggagaatcaggtgtgggaaaaagtgtgctgttatcccaagtacacgcgtttgctgtggactctaagcaaatcatcattaacatctcataccctgatctgttcttaaatggtagaaatgacttttcctatgatgaggacttaaaactttatattcaaccaatgtttttgaaaacacttataaggaaaatactcaaggctaatgaccccttactattaaaatccatcgagctgtctcaagactataaattctcgaatgtaaacccaaagaatgcctctatcaaaccatacgttactttaaacaaagagaagaatacagttttcgatttgctatccgtcatgacccactcacataatcgtggaaaactaatggaagccatcatcaatgagttagccatccagtccaaagtgcccatcatgttcacggtagataatttctcgaagttcttaactacctctttttctgcatacagaaatatgcagaataaacaagtgtattccttggatctgcaaatgggtaaattgatcatggacatcatttcaggggaaacaaagttcgccaatagagaaagctctaccattctggccatctctggtgtagatagaacaaacaaaactttacctgtggccctgggcaaaatccctgccgacccttatgttaccagacaccactacgaacctaaatttgtagaattgttgcaaaaaggcaaagtcaccgaattcgaggttcctaaactgaataagcaggaagttaatgagttaatggaatactataaaacgtctaatatcttgttaagcaaggatgccacggaaaagaattgggaccacttgatcgatgagaagtatttcctgagcggcaacggtaatccaagagaattattgaagagtttagttctttcccataggtga

SEQ ID NO: 4070 - DNA, 855 bp, Saccharomyces pastorianus
atgcccggacacgaactggacgacgtgataaaccagcgtttgaacctgtacgatgtgctagaactgcccactcccctcgacgcccgcaccatctacgatgacctgccccaaataaaacgcaagtacaggtctttggccttgcgctaccatccggacaagcatccgaacgacccattgatcatacacaagttccacctgctgtcaacagcaaccaacatcctcaccaacacagacgtacggccgcgttacgaccgctggctcatcgagcaacaacgcaggacaaacgacattcaaaggaacagactcatagaaaagctacaacgctccgaatccgagacagcaaccgccacaccgccgcaacacgcaaacgtctcgcaagtccagcgctatggcgaactactgagaaaactaaaacacttcaataaaccatacggcgactggaaacatctggaccaacaagatcaagagaagccccagaaccatccttactacgattgctctactttgagaattgtcctcgacaacttcccgcattcaaacgccaaatcaagctgtgttgctcatctgcgaacccatgtgttcgccgcgctcagctctcacgagatccacgacatctacttctccgaaagaaatgactacttcaagggcgactctataataatatacacagtgtttgacacccccatcacggcacaacacatattcaggagctggtcaagtggcaacgtcacccccacggtccgcggcatatcgccgctgatcccactacactattattcggacttcaacctacaaacggaattgaacgacgacatcgcgaggttggtttccaatgaacctattcctcttgactga

SEQ ID NO: 4071 - DNA, 594 bp, Saccharomyces pastorianus
atgcgtgtgcgtgcgtgcgtgttcactagggctctctctctcccttttggttttttcaagctgccttttgtatttcctcgcgcttttcccgctaacgtgttcttaaagaaggaaaaggaaaaggaaaaggaaaaaagaacgcaagtggaaacaagcccaaactcgcagctctgtgaagaaagacgcctcccgccctccaccatgccagatgccaacaacgacaccagcggcgcggcgacgcccggcctcccggaccagaacccgctgcccaccaggttcgaggtggaactcgagttcgtccagtccttggctaacatccaatacgtaacgtacttgctcacccaacaacagatatggaagtctcccaacttcaaaaactacttgaaatacctcgagtactggtgcaacccgccctactcgcaatgcatagtgtacccgaactgcctcttcatcttgaagctgctgaacgggttcatggagtccgccatcgtcaatgaagacggcctactggaggggctggacgagctgcccaagatcatccagttgcaaggcccgcaatggatgaacgaaatggtcgagagatgggccaactaa

SEQ ID NO: 4072 - DNA, 273 bp, Saccharomyces pastorianus
atgcggtgtgggggccggctgtggcgcgctctctctctagccgtcggtcacgctgtcgctcgcgcgctgctgcgcttggcgcggtgcatcgcgtgcgaccacccgatcgtgctgctgttggcgttgctggtcacgtggctgtggcagctgctgctgactgcggtggcgtcgcgcttccacaccgtgcgcgagcacctgtccgggctgctcgccgcgtacatagtgacaggcattgtgtatgcccgcgacgcagccgcgctgcgttcgctatga

SEQ ID NO: 4073 - DNA, 1236 bp, Saccharomyces pastorianus
atgttctacgacgtcgacaacttcatcgcgtggtgtgcgcaggttagggccgcgggcatggacgtgcccatcatccccggcatcatgcccattaccacgtacgcggcgttcttgagaagggcccaatggggccaggtctccattccacagtcgtttctggcggagttggagcccatcaaggacgatgacgaactcgtccgtgacatcggcaccaacttgatcgtgcaaatgtgccagaagctgctccacagcgggtacgtttcgcatctgcacatctacaccatgaacctggaaaaggcgccgctgatgattttggagagactgaacatcttgcccacggagtccgagttcaacgctcacccgttggccgttctgccctggaggaagtctttgaacccgaagcgtaaaaacgaagaggtcagacccatcttctggaagagaagaccttactcctacgtcgcgagaacctcgcagtgggccgtggacgagttccccaacggtagattcggtgactcgtcttcgcccgcgttcggtgatctggatctgtgcggctcggacctgattagacaatccgccaacaggtgtctggagctgtgggccaccccgacttccatccacgacgttgcttgtctggttatcagctacttgaacgggaatttgaagtgcttgccctggagcgacgtccccatcaacgacgaagtcaacccgatcctgtcccacttggtcgagttgaaccagcactccataatcaccatcaactcccaaccccaggtcaacggcattcggtccaacgacaacgtccacggctggggccccaaggacggctacgtttaccaaaagcagtacctggagttcatgttgcccaagaccaagttgcccaagctgatcgaaacactgaaaaacaacgagttcctgacctacttcgccatcgactctcaaggcgacctgctaagcaatcacccagacaactccaagtctaacgccgtcacctgggggattttccccggcagagaaatcctacagcccaccattgtcgagaagatctccttcttggcatggaaggaggagttctaccacattttggacgaatggaaactgaacatggacaacaacgacaagcctcagagctcccggttcatccagtccctgatcgacgattattgcctggtcaacatcgtcgacaacgactacatttctcccgaagaccagatccactccatcttattagctttataa

SEQ ID NO: 4074 - DNA, 525 bp, Saccharomyces pastorianus
atgaacatcaagccagtccaaaagcaaaccagagccggtcaaagaaccagatttaaggctgttgtcgttgtcggtgactctaacggtcacgttggtttgggtatcaagacctctaaggaagtcgctggtgccatcagagctggtatcatcattgccaagttgtctgttattccaatcagaagaggttactggggttccaacttgggtcaaccacattctttggccaccaagaccaccggtaagtgtggttccgtcactgttagattgatcccagccccaagaggttccggtatcgtcgcttctccagctgttaagaagttgttgcaattggctggtgttgaagatgtctacactcaatccaacggtaagactagaactctagaaaacaccttgaaggcttctttcgttgccattggtaacacttacggcttcttgactccaaacttgtgggccgaacaaccattgccagtttctccattggacatctactccgatgaagctactgctcaaaagaagagattttaa

SEQ ID NO: 4075 - DNA, 246 bp, Saccharomyces pastorianus
atgtctgctccagaggctcaacaacaacaaaagagaggtggtttcggtggccgtaacaagggtcgtcaaaacagaagaggaccaagaaacgttgaagaaaagggatgggtcccagttaccaagctaggtagattagtcaaggctggtaagatcaccaccattgaagaaatcttctgcactcttggccagtcaaggaataccaaatcattgacactttgttgccaaacttgcaagatgaagttatga

SEQ ID NO: 4076 - DNA, 393 bp, Saccharomyces pastorianus
atgtggttgacccaagttggaaccccagtaacctcttctgattggaataacagacaacttggcaatgatgataccagctctgatggcaccagcgacttccttagaggtcttgatacccaaaccaacgtgaccgttagagtcaccgacaacgacaacagccttaaatctggttctttgaccggctctggtttgcttttggactggcttgatgttcataacttcatcttgcaagtttggcaacaaagtgtcaatgatttggtattccttgactggccaagagtgcagaagatttcttcaatggtggtgatcttaccagccttgactaatctacctagcttggtaactgggacccatcccttttcttcaacgtttcttggtcctcttctgttttga

SEQ ID NO: 4077 - DNA, 99 bp, Saccharomyces pastorianus
atgttcataacttcatcttgcaagtttggcaacaaagtgtcaatgatttggtattccttgactggccaagagtgcagaagatttcttcaatggtggtga

SEQ ID NO: 4078 - DNA, 363 bp, Saccharomyces pastorianus
atgcaagaacgttacgtcgttgttgtatgcaacttgaagcctgttaacatgagaggtatcaagtccacggccatggtcttgtgtggttctaacgacgataaagtcgagtttgtggaaccaccaaaaggttccaaggctggtgacaaggtattctttgaaggattcggtgatgaagctccaatgaaacagttgaatccaaagaagaaaatctgggaacaattacaacctcatttcaccaccgatagcggtctggaggttatctttaaagacgaagaagaaaaagaccatccagtaagaaagttgactaacgccaagggcgaatcattcaaggttgccactattgctgatgctcaagtccgttaa

SEQ ID NO: 4079 - DNA, 384 bp, Saccharomyces pastorianus
atgacatccaccatttcagtctccattgccgccttcataatgggtatggcaatgaattataacaaaatgaatctgttaatagtattttcgttcatatacatgggggtcttcacgatggggttaaatttgttgccgttcataataatgagagaaatttccagccctcaagacatggtccttgctcaaagatacggcaccatctgcaattgggtaggaactttcatcgttgcatacactttcccgattattcacgacattctttcaggttatgtttttgtaatttttgctgtcacagctgcttcaatgagtgtctacatttggaaaagggtcccagagactaagaaacatggagcccactataatgacatacgggtcagtcattga

SEQ ID NO: 4080 - DNA, 351 bp, Saccharomyces pastorianus
atggccggtggtcaacatcatcacagaattaacatggataaataccatccaggttacttcggtaaggtcggtatgagatacttccacaagcaacaagctcatttctggaagccagtcttgaacttggacaaattgtggactttgatcccagaagacaagagagaccaatacttgaagtctgcttccaaggaatctgctccagtcattgacaccttggctgccggttacggtaagatcttaggtaagggtagaattccaaacgtcccagttatcgtcaaggccagatttgtctccaagttggctgaagaaaagatcagagctgctggtggtgttgttgaattgatcgcttaa

SEQ ID NO: 4081 - DNA, 741 bp, Saccharomyces pastorianus
atgtatataaacaaagggtttgagaagaaaacagataaacaaacaaataaaaagcaaaacatccttcaaaaatcaaaagatcgaaggaacagaatgactatgaacaatatttggaagccagaagaaaacattcctgcaaatattctagcggttctttcgaaacctcatcccaattatcagttagcgttcttaaacatcgttcaacttctgaaaacgcaaaggagaacaggttgggttgaccatgatatcgatccatgtgaaagtatatccgatcacatgtatagaatgggcttaacttccatgttgattacgaacaaagatatagatcgtaacaaatgtatcagaattgccctcgttcatgatttcgcggagtcacttgtgggtgacataactcctaacgaccccatgacgaaggaggagaaacatcgcagagagtttgaaactgtcaaatacttatgtgagactgtgattaaaccgtgtagtgaaactgcatcggaggaaatccttgatgattggttagcatacgaaaaacagacttgtttggaagggagatatgtcaaagatatcgataagtatgaaatgctggtacaatgttttgagtatgaacagaagtataatggtaagaaagatttggaacaattttggagcgccatcagtgacattaagacagaggaagtcaaaggatggacccagcgtctattagaagaccggaaagcattttttgatagtttgaaaaagtaa

SEQ ID NO: 4082 - DNA, 915 bp, Saccharomyces pastorianus
atggcaatatggcacgccattgtagggctgttgggcgagagaaaatatgcactaaacgttacaagctctctcattgaaccccaaaagggagaaaaggatttgaaagcgaaggttaatagagaagagttggctatcattcataatacaactataatatcccactcttgcaaacacatgatggctgaagtatctaatgatccacttttgacctatgttttgaacagcaaacagttaacaaatttagatcgtctacgaaagaaggcagttacaaaacaactggaattaagtgcggggcataagaattcagaggagttttcaaagtatcaaaatatctatcaaacagaagcattcgagtgtctacaaaataagcatgatacacacaaaataatggaatgtcagtacgaatcataccagagaaattgcaaaacaaaaagatacagtattgacctagactctgtacatgcaacagacgcgtatccacaagaggaagatccaaatggagatttccttgaaagaaacgaggacgatgaaggcgttagggaattgaggaaaaggttattaggaaaacagcaaagcaacaatttagggcatgactctgttaaatcagtagacaggcaaattgaagatcaagataacttacaacaagacttaattcaagatatgagtaaacttgttgggagcctgaagcagggtgccgtggcatttcaatcagcacttgatgaagataagcaagttcttggggccgcagaaattggtattcaagttgcatcgcaaggtctgatggacgttagtggtaaattgagaaaatatgacaagagcaaactgagttatctattttacatttcagttttcattttcatgatcctcggtttgatgctaacatttataataattcagctctttccagcgctctga

SEQ ID NO: 4083 - DNA, 831 bp, Saccharomyces pastorianus
atgtcaagagccatgggcactagtatagtagacgtaaataaaaacacggcgctacccccaatccaagctttgtttgagtcgttgaacatggaaaatgaactgaatgcaaagccgaacttcgaggagcgccggttataccaaactagccctttgtttattcctcgaacaaacagcacagttggttgtcaagttaacccagttccagtagcatcccctgtgttttttattggccactctccaatggcgattggccaaaacaacaacaacgctgctcttaatcagagcgtaccttcatttccggttttatacaaaactccggatattgcgtccaatggcgaaagagactatataattgctgttggagcgcctcccatatcttcgatggctgagtatgagcatccgcccgtctatagtcattatcaagatcagagacaaggtcaagcctaccctgtaaattcaaaccacacagtgataggcagctatgcgatgcctcagcctgttgggatttccagtaataaggtattttctagtagcacaaatagaaaagccgctgtcaggcccaatactaaaccatccgtaaaggaaaaaagaaacaagggccacgggaaaagatcaaatttacctggagctaccgttcatattttaaataaatggttactggagcacataaacaacccatatccaacccttcaggagaaaagagaactcttagcgcaaacaggtctcactaaactccaaatttcaaactggtttatcaacgctagaagaagaaaggtcttctctggccaaaatgatataaattgtttcaaaaggaagttcagctctccttaa

SEQ ID NO: 4084 - DNA, 1683 bp, Saccharomyces pastorianus
atgatgaatagatcgaatggaaaaatttgcagctctaccaacttacaaacttctttgaaatctttgacggataaaaggtatttagacaacaatgtgccgcaagagcatttggaagagtacttggaatctttgtgtataggggaaaacatcgaaggttttagttcttctgaaagtattaaacgtaatatgcctcaaaaatttaaccgatttttactttcacaactcataaaagaagaagcgcagactgtgaatcataacatcacactcaaccaatgtttcggtttggaaacagaaataagaacacattccgcctgtgatcactatgatacttccgttaaacttctgccatcattaccgatagctggaatcaacaaaagtgtaatcaagcaattgaataaaaagaataacggccaaaatattttaccgtatattgaatatgccatgaaaaattctattcaaaaaaacagcatctgtcctatctgtggcaaaaccgatatcataacacaggagaatacagttaagaacttgccctcagtgttatcgctggaactgtcattactggacactgagctgtctaatataagatcatccaagaattggttgatcaacgagttttatggaagcatcataaagaacaaggccattttgcgaccagcagcgtccgagttgaaaggcacgggtcatatattcaaatatgaattgaacggctatgtagccaaaatcaccgataacaataatgagacacgtctagtaacctacgtcagaaaatatgatttaagggaaaataacttcaaatggctcatgtttaatgattatctcgtagtcgaaatatcagaagaagaagcacttaagatgtcatatccttggaagacaccagaaataatcatatattgcgatgcggaagagcttcggaaacccttcttttctgtggatacgtattctatcaactatgatattctctatcgtgattattttgcaaatggaataagagataccgcaagatccgagtataagctcttgacacatgatgaagctcccaaatctggatccttggttgccattgatgccgagtttgtctcgttgcaaagcgaactatgcgaaattgatcatcaagggatcagaagtgttataagacctaaaaggacagcccttgccagaatatccattataaggggcgaagaaggggatttgtatggaacaccattcgttgatgattacgtggtaaatacaaaccacatagaagattacttaacaagatacagtggtattcttcccggtgatctagatcctgagaagagtactaaaagactcgtgaagaggaatgttgtatatcgaaaagtctggctgctgatgcagcttggctgtatatttgtcggacatggtttgaacaatgatttcaaacacatcaacattaatgttccaagaaatcaaattcgcgacaccgccatatacttcttgcaaggaaaaagatacctttcgttgcgttacctggcatacgtcttgttaggaatgaacatccaagaagggaatcatgattcaattgaggacgcctacactgccttaattctctacaagaagtatctcgacttgaagaggaaagctatttttgaaaaggtgttgaacagcgtatatgaagagggcagagcccataatttcaaagttccagaaacgtcaaagacatag

SEQ ID NO: 4085 - DNA, 177 bp, Saccharomyces pastorianus
atgtacgccgcaacgaataaatatgaagtaccaccagcgtatagtagactgccattgacgacaggcaggtttggtacggataactttgattttactccctttaataacactgaatattccggattagatccagacgtcgataaccattataccaatgctatcatacagttataccgt

SEQ ID NO: 4086 - DNA, 1353 bp, Saccharomyces pastorianus
atgaataattggcaacattttttcaacaaccctgttgatctttctgaacacttgaaaaagccgtattttcgttttgataacagagacaaggaagttactacaatcagcttcgatgaaaaggcaaatctggtatggagtggagatagctacggttgcatatcctcgtacgatccaaactttcaactttatacacgatataggggacacataggcggtagttccgtcaaggatattctcagtcatcgagatggtattttatctatcagcgaagattccttacattttgcaaatagaagaggtgttactaagctgaatttaacgagtatcgatattgctgcgtttagcgaattaaatactatgtgctacgcccctcattcgctacagaataacatttactgtggtggtgacaatacaaattggggcattgcctcaattgacttgaacaaaggttgcttggactcacttctgaattactcgtctaaagctaagttgcttcgctctaataataagatcttatctgttggaagacaaaccgggtctgtagatttgatagatccaacttctaatcgaacaatcaaatccttcaacgcccactctgcgtctatatccggaatggacttacgtgataataccttagttacagtaggaaaatccaaaagattttataacttatatgctgacccatttgtgaatgtctacgacctaagaacaatgcgtcaacttcctcctgtttctttttctaagggaactacaatggggtctggcggcgcagactttgttcaattacatcctttgcttcctactgttatgatcgttggctctagttctggttcttttgattttatcgatctttcaaatccaactttgagaacacagtacgttcacccttgtcagtcaatcaaagagttttctttatcacctaatggtgacgtattagggatactagaggctgataaccatctagacacatggaggagatcttcaaataatatggggatgtttaccaatactcctgaaatgctggcatatccagactacttcaatgatattaagtctgaaagccctatatcaatagacgacgaaacatatccattgagctcagtggggatgccttactatcttgataaattattatctgcatggcctcatgtagttttcaaaagtgaaggcactataccacagctatcaggtaagcctcctttaccatcaagcggtagactaaaaagtaacactgctgtaatttcaagtcaaaatgagaaattgagcacacaagaatttcccctgttacggtatgatcgtaccaaatatggaatgagaaacactgtgccggattatgtatgcttaagagattga

SEQ ID NO: 4087 - DNA, 723 bp, Saccharomyces pastorianus
atgcgttccattaagttgacaattgcaaataaatcacgcgatttgttgacattaagaaacgaggtagcagccatcgacaagaaaatggacaagcggatattgtttacacgctttgacataccaaaattgcgagatagtctcaaaattctagagtcattaacgggcgtacgttttctgaaattttcaaaagcgacactttcagtagagtttcttcaattggataatctgagagtagatgttaatttaacaacctttagaaacgatcctatcaagtctatgaatgtcattaatgataaaaaagcggactctactagttattattttttcagaatacttttgcagagtgttgagcctggagaccaagagaacgtattttccaacttgtttattgccatgaaaaagtggagcccattattaaagtatataaaattactgaagctcttgtttccagttaaaattgttgaaagcgaacatcatgaagcgcttctacaatttaaagattatgatagaaggaacaagaatgcagtcttttaccgcatatccttatcatcctttgcccagggaatattctcagaaaatgggcagattccgatgaaagttcgcataacttctcaacaagactattcgccatcacgggatgtactttccgatagaataattcacaaaataagtggaatcctcccttcattcactaaaagtagaatacatcttgaatttacataa

SEQ ID NO: 4088 - DNA, 1968 bp, Saccharomyces pastorianus
atgaaatttaaattagacgatggcggtggaagtgcaggaaaagataaagatgcgggcccagggaagggcattctcaaacagaactcgaactcacaaatgactgcgaactttctggaaagctcaggaatccgtattcccaccagaataatgacgaaaaaggacgtcctagatgggaacaatacgacatctaggatcaacacctctaatttgcaaagcaaagcaaatagaagagtttcttttgctcctgatgttacattgcacagttttacttttgtacctgaacaaagcaatgaagccaaagaacccagacgtaggaaaaccacgaataatagccccacgaaaaaatttagtcaagatgacccttttgtaacgtctactcaaatcgatgatgttcgaaggcaagaaaccgacgttaatgaagatgccgaggcctctggaatggagtttacagagcctctactgacaacacgcgattttaacaaggtttcgcaggacgatcttacttcaatggaaatgacagatattttcccccaaagtatgaggccagagggcctggatataggaggagacatgaatgagtcgtctcagcaagttgacgaagctgaaaacatacgggaagaaaccatggaattaactggcatacattatgtccacaatttaggtgacactttagaggagacggacgaaggagaacctatagaactcacggcctacgagactaacccgtttatttcaaatagtgctgtgaaatcctcaaaccatgacttggataaaagtgatggtgaagaaaaaggtgcaccgaaacctgaaaaccagatgaattcctctcagccgatggaaatgactgaagtgtttcatagcgacatacagggtgatgttcataccagtgatgatggtaatgagatggaactgacacaaattcaaacacgttctaatcatagaagtccccgcagccataatgaggaactttcctataagaagcatatggcaacgcccaacaaaaggcgtaagctggatgctgtttctcattatgcggtctctgttacgacaccagataaggagggggcggatgagaacgatttggagatgatggaaaagatgtcaccgatcacgtttagtgatgttgataataaggttgggactaaatcccattgtgcgcctataaccgaaagtgacgttaagaacgttgatattgaaattaataatgtttatccaaaagatgcggaaggcaagaatgaggacggcaataaagtgcctgaactaatagaacctccagaaactgacaaaaagacgcaagctgatatggtctttcccacacaagactattctttacgagagtttattgatgaagtgggagtagggtttttagacactaaactaatagacggcctggataagaaagttaactttccgctcaacaggtctaatctcacagagactcaacgaatagagaatgcattctctgcttactatatcgatatacccattttagaagtagaagcattcagatgtaaagagctttggagaagcgttaatgaatctaagaacaaattcaaggactttgaggcccaaattgatcaatctcatccccctcttttgctccaagagtatttttcttcaagtaatgaaataaagcagttaatgagggatcaacttcagttggttaaaggatactctaagttagaggcagcgatggaatggtacgaatggaggaaaaaacaactgaacgggttggaattggttctagcggaaaatttgagtattttgaaaggagaatgcgataagttaaatgaagaacttggaaaggtcaatgctataaaagacaaaatacgaaaacttaatgaatcaataacggaagagataagatctttgaaaaattcaccatctggctcttacaagccgactttaatgaacaggatcaaaattgaggcttttaagcgagaattaattaagcattccatatcttga

SEQ ID NO: 4089 - DNA, 99 bp, Saccharomyces pastorianus
atgggtgaaagtttcttggacagctaccctgatagtcctgcttcaacagccgtactcaacgtcgtggaagctcttcgagatgcagtaggggatatttag

SEQ ID NO: 4090 - DNA, 975 bp, Saccharomyces pastorianus
atgacggagatattgccacatgtaaatgatgaagtgctaccagcggagtatgaactgaatcaaccagaaccagagcattgtcctggtccagaatcagagatggcaggtaaatccgatgcctgcggtggttgttccaataaagacatttgtgaaagtcttccgaagggccctgatccggacattccattaattacagataatttatcaggaattgaacataaaatattagttctatctggtaagggtggtgttggtaaatcaacttttgctacaatgttgagttgggcactctcggctgacgaagacttacaagtaggtgctatggatctagatatatgcggaccctcactgccacatatgctgggttgtgttaatgagaccgtgcacgaatcgaattccggttggacacccgtctatgtagccgataacctagccaccatgtccatccaatatatgctcccagaagacgactcagctattatatggagaggttcgaaaaaaaacttgttgataaagaaatttttgaaagacgttgattgggatagactagattatttggtgatcgacactccgcctggaacgtccgatgaacacatatcaataaacaaatacatgaaggagtctggaatagatggtgcccttgtggtcactactcctcaagaagtggcactgctagacgtacgaaaagagatagatttctgtagaaaggctggcattaatattcttggattagtggagaatatgagtggatttgtatgtccaaactgtaaaggggaatctcaaatatttaagcctactacaggtggtggtgaagcgctttgtaaggaattgggaattcaatttttgggtccgttcccttggatccaaggattggcaagagttgcgacatgggtgaaagtttcttggacagctaccctgatagtcctgcttcaacagccgtactcaacgtcgtggaagctcttcgagatgcagtag

SEQ ID NO: 4091 - DNA, 432 bp, Saccharomyces pastorianus
atgaaattgtcttctgtgatttccactattgccctagccgccgtttctgtcgccgctgcttccagcgacgatgtcgccaaggtcccagccgaggccgttatcgggtacctggatctaggaggtgatcatgacatcgctgttctaccattcagcaattctactgccagtggcctattattcatcaatacgaccattgttgacgcggctcaaagggaagaaaatagtactttggcaaaaagagaagccgtcgccgatgcttggcactggctgaagttgagacctggtcaaccaatgtacaagagggatgctgaagcaaatgcagaagcagaagcttggcactggctgcaattgaggcctggccaaccaatgtacaaaagagaagctgacgcttggcattggttgcaactaaggccaggccaaccaatgtactaa

SEQ ID NO: 4092 - DNA, 303 bp, Saccharomyces pastorianus
atgactaaatggaacggtactattttgggcccgcctcacagtaatcatgaaaacaggatctattctctttccatagagtgtggcccaaactatccagattctccaccaaaggttacattcatttccaagataaatctaccatgtgtgaatcaaactacaggcgaggtccaaccggactttcacactctgcgtgactggaaaagggcatacaccatggaaaccctattacttgatcttagaaaggaaatggcaactccagctaataagaaattgcgccaaccaaaagaaggtgagaccttttaa

SEQ ID NO: 4093 - DNA, 1521 bp, Saccharomyces pastorianus
atggaaaggatgatgattatccacgtggaagcttcaaagatgataaattcccatccaaactattctacagaagagttcaatgagcttaccgaaatgaataagattgttcaagaccaagttcaatataccaaagaattagaagtagcgaacatgcaacaggctaatgagctgaaaaaattgaaacagtcgcaagatttctctaccttttggaaactagaaaatgaaaaattgcaaaataagctaaagcaattccacgtactagaaggccaatttgaagatttacaattagaaaacattgatttgaaatcgaaattaacgaactgggaaatttataatgataacgatgataacgatgatgataaggctaaaaataatctgcaaagtaatcccgaagagattattcgcgactggaaactgaccaaaaaggaatgcttaattttgacagacaaaaatgataaactaaggctagataataacaacttaaaacttctgaatgatgaaatggctttggagagaaatcaaatattagatttgaacaataattatgagaatagcatagtaaatctgaagagattaaaccacgaactagaacaacaaaagagcttgtcctttgaagaatgtcgattattgcgagaacagttagatgatttgtattctgcacagaataatgttttgtcagaaacaaatgattgtaaaactcatattccggacgcgaatttaaacgaagacatgaacaatttattggataactacaaaaataaaactgaagatctaacgagtgaattgaaaaaattaaacgatcagttgttatcaaattccaatgatgtggaaactcaaaggaaaaagaggaagttaacaaacgatcaaataggcttaaattattctcaaagacttaacgaattgcaacttgaaaatttaaacgtttcgagagaactaagtaaagcggaaactactatccatctattaaaaaaaaaattagaaaaattgaccagtttaaaggagaaaagaattcgcatattacaactgcgcgatggtccattcattagtgaccaatttatcaagaagaataaactacatctcttacagaaggaaaattcagacttattggagcaattgaaacagaaaaactctaacatcgaaacaataccaatttctgtctatgattcattgaacttcgaattgaaacaaattgagcaagaaacattcaagtcaaataagaggttttccaggcttaagcaggtctttaataaaaaatcattagagtttattgatgtcgtgaattcattactaggttttaaattggaattccagcaagatggtcgagttaagatattttcttgtttcaaacctgaaagacatttgattgctgacttaaacgaaaatactctgaaatcaaatcttgattcagatatagaaggctgggatgatctcatgaacttatgggttgaagatagaggtcaactcccctgttttttagcaactataacattgcgcctttgggaacagcaacagaccaaataa

SEQ ID NO: 4094 - DNA, 495 bp, Saccharomyces pastorianus
atgagcaatagcggtgggtcatctccatttctagaaagtcctaaaggttcacctagtatggacaataagagtatgcacaatgatggacaaggtaaccgtcagattcaagcgctgcaattcaaattaaacactttacaaaatgaatatgagattgaaaaattgcagttacagaagcagacgaatattctggaaaagaaatacaaggccacgattggtgaattagagaaatcattaaatgatacgaaatatctgtatgatagtaatgctaaattggaatacgaactacatggtttaaaggaaagcttaatcaagtctacaagcgacaaggacaaacttatacaggaattacaaacaactctgcaaaaaaaagatttaaacatggagaacttaaaacaggaatacgattccaagctatcgaaagtgacgaaccaatgtgaccatttcacgctggaatcggaaagctcacgttccctatcgaagaaatatgaaaatgaa

SEQ ID NO: 4095 - DNA, 669 bp, Saccharomyces pastorianus
atgtggaactactccatggcctcgacactaacaaaatcgcaatattcagggtacacaaaggccatcaataaaatgtcctcagatatccagaagcatcacatcgcaaaactaagtgatagaacaaacgacagcgatggagatgccttccataaagtcatcgaaccaacagttcagaagagggaggaccctgagacagtagcggctaggaatatcgaagtagcagccatgaaacccgttagaaaagcaaccacacccactcagaaagacgcctccttgtcatccaaaagcgtttctaatgctcggcctttaaacccaaagagtgtactgggcactagaggcttttcaacaagcacactcaaccctccaccacagacaacaccaagtgaaaccacttccaaggtcagaggtgaaatcgcttttagcgggactccacacaccaagtttgatgatgaattcaacgaatttcaatctttttcaagcacgggcaccacgcatcgaagtccctcgtcacccaatgtctggacgaccagcactccgagtcccgtcccaacgtctacaagcaataacaacctgccacctgggttttcgatttctttgcaaccaaacaaaaaaaaggaaagctcaactgaaattccctctaataataatacgtacggttccttaatatag

SEQ ID NO: 4096 - DNA, 1668 bp, Saccharomyces pastorianus
atgatgttttggtcctcaaagacaggcatcacgtccaagtactccttctcatcatcaccaacttttactgctgaaccatggagcgtttataccggtcgtcccaaatcgtcgtcttcatcatcgccttctaaagtgtcaatattcatgttcgacaagaaacagttcgagaactatttattgcattacaatatcatcaaatccaaatctggatccagagataaagtactcatacaagaagcttatgaaatattaagaaaccaggctaacaatctggcaaggctcaaacacccgaatattttgacactaattgaaccgttagaagaacacagcaagaattttatgtttgttactgagtttgtcaccggctcgttggagaccgtgtttagagagactgatgacgaagagaaaaacttcttgcaaggccatgttaaggataatattgtggttcaacgaggaatattgcaactagtgaatgcccttgactttattcataaccgtgcaagcttcgttgacttaaacattcaacctagggcaattttcataaatgaaaactcagactggaaaatttccggcttgggctacttggtgaagataccaccgggaacaaacacctctgaatattttctaccacaatatgatccaagagtacccccctttatgcatttgcaattgaattatacagctccagagattatatttgagaacaccctggcatacaaaaatgactatttttcattaggttcgctgatatattttctgtatagtggtaaagatttatttcgaaccgagaattcaaccaccgaatacaaatcggaatacagtaaattcgaaaaaaaaatcaataccatgtcatgggataatatctttaataagattccaccaaaattgagacattgtttgccgaaactgatgaacagagatatttattccaggtacgataatataacgttaattttggactccgagtttttccaggaccctttaataaagactttgaattttttagatgatttgcccacgaagaataatgaagaaaagtatgtttttctagaaggtctaataaacttactaccagactttcccccagcgttgttacaaaagaaattcctgccaattttattggaattgttgaaccagttctgtgcagaaaaaatagtaaacgataaatgtgtaaacaaaaatttggatttaatagttaagatagggtccactttatctcaactatcctttcaagagaagatttatccaattttactaagtgctacgaatttcccaatccttcttagaaaagccaccgtttgcttgatcgatagtttagatacgttaaagcaaaaagtcaaacgttctgatttcttggagagcgtactaaaaccactatttagctatgtcttacaggactcagaaagtgaggttgctttgatatcacaagaaaaacttctattgcaaatcccgttagctttagaggtgctagattttcccactgtaaaacagttcttgttaccgttgctttcagggctatttaccaagacaaccagtttaacagtgaaaaacacatgtgtgacatgtttccaaattatgatagagcagaaatccatcgattcttacacgtgctcggacactattcttcctttgttcaaatcgatgaaaactagagatccaagaatttaa

SEQ ID NO: 4097 - DNA, 978 bp, Saccharomyces pastorianus
atgagagcagataataagataatgggagatacaagaacctttgttttcgccatagaggatacagaaaccacacaaggtctatgtaaaataattggtcgatccagtcgtaatgataagaagaggctgagtgggccaaataatctttatttcgatgaacctgaattagggaagagacatgccatgttatgtatcaagacaccaaaaccaaaaattcaaagtgttccttccatagaacaaatacgaatctgtattcgagacttggatagtgaaagtggtattgttaatttagaatctgatggaccacatgatgaagtcgatttaaaaagtggcgatatatttggcttgattgcagttgttaaccgctctttacacgatagccaaaatttagccgccaagttgatttttcaaatcaaactcgagtattttgatgaggaaagggaactaatcaggtgcactattgcaaatgtaacatttcggaacaattccgtattgccctcttccccggtttattcaaaacttgcggacgatagtgaatcaagttggtatggtctatctgaagctagtattcaaactggaagtattcaggagtgttgcgagactggggctataaagactcgaggaggcaggttttccgtccttaaattaagggaagaagacagcaaatcgcaccagaaggctgatggtagccttagagggaagcttttgcaaacaaactctttccaagaagaaaccaatacagataccacagaaaaagaagaagaagaggacagaaagaaggtagaagaagaagaagaagtggaagaggacttagaatttgaaatcattagagtaaaaaagataagaagcagggccaagacggaatacatgctcatttcctcttctaaaatcaagagaaatgcgacttcacctggacaatccaacagcgcgtggatattactaataatcatcctgattctagatcgcctactgtcaaattag

SEQ ID NO: 4098 - DNA, 1695 bp, Saccharomyces pastorianus
  modified_base (794)..(862): a, c, g, t, unknown, or other
atgagtgggagcggtgtttcattggacagtactgcaggtgtcaacagcaacaacagcagtaacagttttttcaataacagtcatttgttgcagggaaaaacgctaaggttaatgaatgaagcagccttgggagataagaatgatgttactgcaattttgggtgaactagagcagataaagtataatcaaattgcgatttccaaagatttgttaagaataaacaaggataatgaattgttgtggaaggagaacatgatggcaagagaaagacacagaacacaacaacaagctctagagaaaatgttccgatttctaacatccatagtaccacacttggatccaaaaatgatcatggatgggcttggcgatccaaaaaccaataatgaaaacctcaatagcacgaataatatcgggctaaatcacgacaatacaggcactatagatgaacttcagtccaacgactccttcataaacgatgaccataattcatacatcaacgctgcggccaactcccgtaataacatgggcaccaataatgacgttgacagcaacaagagcggtagcatcaatactagtaatagaaagagaaatgtagacgaaagtatcaaacacaacaacgacatactaaatgacattatattcaacactaacctcgccaataatctcacaaactacaattcaagcaataatgctggctcaccattgagaccatacaaacaaagataccttttgaaaaatagagcaaattcggcgacgtccagtgaaactccaagcctagcaccattcgatctcgnnnnnnnnnnnnnnnnnnnnnnnnnnnnnnnnnnnnnnnnnnnnnnnnnnnnnnnnnnnnnnnnnnnnncagagattccgtttgacgacgaagatgaagaaacaaacttcaagaatttctctacacgaaatcccgccagtcaagtgaacgaaaacgcctttgatccaagcaggtttacgatgctttctgatgaagatctgaagaaggactcgcatgcccatagcatcgcagatgacaataagcacaatgaaagcgatctattcctggataacgtgcatcgcaatatagacgaacaagatgcgaggcttcagaacttggaaaacatggttcatatactctcaccagggtatcctaataaaccgtacagcaagaacccccccacagcgcactccaattctaatatagagattaataccaatgtcaatagccctggtttcaatttgcaggattacttaacgggagaatccaactctcccaattctgttcattctatcccttcgaacactggcgggtctaccccattgcccatgcctactgacaacgacaacgaacacgggagtgccagtgccagcgccagtgcaggcagaagcggaagtggactgacgtctttcctggcggtagacgaccacaccctaaacgacgacaatgacggcggtggcaccagcgcgtcccccgatataaaatttggcgccacacacagcagcaaaacaagcgataccctgccaagctttaatgaccacggtagtcccgcccagatggctaggcctactgagaacgctaagaagagatacgtggaggaaataccggagccggctatcgtcgagatccaagacccggccgagtacaacgaccagcgccagctcaaacgagccaagaagtcgcacacagacccaggtcactaa

SEQ ID NO: 4099 - DNA, 828 bp, Saccharomyces pastorianus
atgaacaatattgcaaatactggggcgaccaatgagtcaaacatcagcgatgcttcccgtatagagtctttaccaagcttgaatgatgacgacattgagaaaatcttacaaccgaatgatattttcaccaatgatcgtaccgaggggagcactacgtcctccactgctattgaagatatcattaatccatccctggatccgcaaattggaacgtcaccggctccctctccttcctttttcaatgactcaaggaagccatccactagcacacatctagtaaggaggggcacaccattgggaatcttccaaaccaacctatacaaccacaataacagagagaatagcaattccaataatactttgttgtcttctaagctactcacgcatccaccggttccttacggccaaacccccaatctattgcaacaacattccgtatatagggcgccagcttctagtggagctactaacgtacagccccgccaagccacgagaagatatcagtcgcacaagtcgagacctgcttttgttaataagttatggagcatgctaaatgatgattccaatacaaaactaatacagtgggcattagacgggaaatcttttattgttacaaacagagaggaattcgttcatgaaattttacccaagtattttaaacattcaaacttcgcttcttttgttaggcaactaaacatgtatggatggcataaagttcaagatgtcaagtcaggttccattcaaagtagttcagacgataaatggcaatttgagaacgaaaatttcatcagagacagagaagatttgctggaaaaaatcatcagataa

SEQ ID NO: 4100 - DNA, 123 bp, Saccharomyces pastorianus
atggtgattggggtggttaacgctggtgtaatgcgcgttttcatccagatagaggaggatctcttcgctagtatacttagggacatgctgtgtgcttgtgtgactggtcttgtttgttgctaa

SEQ ID NO: 4101 - DNA, 342 bp, Saccharomyces pastorianus
atgttttctttcaagacctttggagcagcctcgacgaatttcttagcttcaactagtgagagacctagtaaacctttgacttctttgatgactttagccttggtctttgcgtcgaaagaatccaacttcacagtgaacacagttttggcctccggcttggcttcttcttcagcaccggcacctgcttcaccagctgagcctgctgcgttaccagcaccgacaccggcacctcctgccataaatccgcccataggcatggtcatctctgggatgtttaatgcagtcttcaattcggtaatcaaactagaggtttccaaaagagtcaattgtgagatatcctga

SEQ ID NO: 4102 - DNA, 1515 bp, Saccharomyces pastorianus
atgagtggtaacgatagaaagatcaagatagctttcattcacccggatcttggtatcggcggtgcagaaaggttagttgtcgatgccgcgttgggtttgcaacaacaaggtcataacgtcaccatttacaccagccattgtgacaaatcgcattgtttcgaagaaatcaaaagcggtcaattgaaagtcgaggtctatggtgatttcttgccaacacactttctaggccgtttctttattgtttttgccacaatcagacaactttatttagtaatgcaattaatctttaacaaaaaagtgaatgcctaccaactatttataatcgatcagctatcgacgtgcatcccacttttgcatatatttagttctgccactttgatgttttattgccatttccctgatcaattattggctcaaagaactgggttattgaagaaattatatagacttccatttgatctaatagaacagttttcaataagcgctgcggatactgtcgtcgtgaattcaaatttcacaaagaacacctatcacaaaacatttaactttttatccaatgatccagacgttatttatccatgtgtagatttatcacccatggaaatagaaggtattgataaagaattcatcaagactatactaaatgaaggtgatagattttatttgagtataaaccgttttgaaaagaaaaaggatattgcgttggccataaaggcctttgcactatctgaagaccaaagtaatgaaaacgttaaattggttatttgcggtggctatgatgaaagagtcgctgaaaatgtggaataccttaaggaactgcaaggtttggccgacgaatatgagttgtctcacacaaccgtgtattaccaagaaataaagcgcgcttctgatttagaatcattcaaagccagccatacaaaaatcatatttttgacctccatttcatcatccttgaaggacttattgttggaaaaaacagacatgttattgtatacacctgcatatgaacattttggtatagttccgttagaagcaatgaaattggggaagccagtactggctgtaaataatggcggtccattggagactatcgagccgtatgtcgctggcgaaaatgaagcacacgccacggggtggctaaggcctgctgttcccattcaatgggctactgccattgaccaaagcaggcaggttttgaaaaatgacaaggtggacttcaagaagagtggtccattgagagttaaaaaatacttttctagagaagcaatgacccagtcatttgaagaaaacattgataaagtcatatggaaggaaaagaaatattacccttgggaaatgcttggagtttcgctctttaatttcctcttgcacatgacatttataagggtcctccctaatgatccatggcccttcctggttatggctgccgttatggtattttattttaagaactacttatggggtatttactgggggtttatatttgctttgtcatatccttatgaagaagtgtaa

SEQ ID NO: 4103 - DNA, 1746 bp, Saccharomyces pastorianus
atggttaacaacggcttcagtgcagcttcccagcttgaaacaaagctgataagcccaatggcacttgtatttaatttagcggctttgccacgatggagtagtcccgttgtgcttaggatggggctgcgctcttatgctgggggccccagaacaaagcataaaaagttctccccacagcctccagtgcccgcaagcaatggtaacaagaacaggaaacagaataaaaggggcaggaagaatgatgccaaggccaagactgaacaggcgtttaactttggtcagtacggagggttgaaaaaagacgtcgacgtcgacgttaatacgaccggtaaactcattcagaaaatatcaaatttcgaccaattgctcatattgccatctgtcagggatgctatgaaagaaatcatctctaaggagtcgttgaaaatccaggacaacaacactaagaacaccagcgagaacatcataccgagtcccatccaagcggtggccattaagaaaatctccaagactttgatgagccccaaattacaactgcatgccatcgccgcagaaaccggctcaggcaagaccatggcctacttgatacctttgatagattatttgaagagacaggagctggaaacgccggaactgtgggagacactcaaagaaaaagctttgatcaggtccattatactagtgcccacgcacgaattagtggaccaagtgtatgaaaccgtctccaagacaaactcctcattggggctgaactccttcaaatgggacaagaccacctcgtaccgcgacctattggaccacatcaaaaacagaatagacattctggtcaccactccggcaaagctactgaacctgttcagcattaggatgatctctaggcccgacaaaatactgtccaaagtggggtttgtggtattagatgaagctgacacccttttggatagatcctggcttgaagaaacccactccgccataaagaaaattcccaacatcaatcaccttatcttttgctccgccaccattcctcaagaattcaacaagacaatgcaaagacttttccccacggtggtccccatcatgacgcctagattgcataaactgccgttcggtctggattttaaagttataaactctgcattgagccccttcaagggttccaagattaaggcgttggcgcaaactctctacgccatttccaacgatgacactgaacccgggtttgagaaaagatgtgttatctttgtcaatgagaaaaaggatgtccctgaaatcatcgatactttaaatagcaagttcggacataatgccgtcggtctaactggtgatgatacaaccgaagaaagatctgaaaaaatcactccctttctgtcttcaccaagaccaatctcgcagttaaggcctccagagccgtctccagagccccccttgaagcgactggaaattcctgattccaacatcgtcattggtgaattgaaaaaggcaaattcagatgccattatacccaaaaagaagtccctgcacgtgcttgtagctacagacctaatggccagaggcctcaacttcaaaggcgtacggaacgttgttctctacgacgtgccgaaaacatccatcgatctgatacacagagtgggcagaactgctcgaatgaaacaaggtggtcgtgtgtttatgctgattgacaataggacaaaatcttgggctaaagcccttccaaaaattatcaagaaacaccaaaggttatcataa

SEQ ID NO: 4104 - DNA, 1197 bp, Saccharomyces pastorianus
atgaaagcaacacagtttactaacagaccaccctacaccagcaccagcacaagcacaagcaaagagagtgcgcccacgcccgcggtcaagaggaggcccagcaagcacaaggtcgctatgcttgtcggctaccgtgggggcggatactacggaatgcagtacaaccccccgcacaaaaccatcgagggcgagatactcgccaagctattcgacgtgggcgccatttctgagcacaactcaacgtcgccgaagaaaaactcattcatggccgcggcaagaacagacaagggcgtgcatgccgtggtaaatctgttgtcgctgaagatctcactgcagcaagacacggttgcgagactgaacgccgcactgccgcccgagatccgcgtgtggggtatccagccgaccaataagaagttcaacgcccgctcggcatgcgactcccgctggtacgaatacctgatcccggactttgtgctcgtggggcctccacagggctctgccttgcatcaaaacgtggggggatgttactgcgacgacggttcgcaggacgtgtgggatgcatttggggggcaggtgcgagacagattcggcgcgcaaccagatgaggacgagcctttaacgcgcgactacgtggatctcttgagcaccgccctcggcggctaccgcccgccgagggcaaagctgctcgctctcgaggccgcgatgcagcagtacgtgggtacgcacaacttccacaacttcaccacgggcaagcttgccgctgatccgagcgccaagcggtacatcaaggaagtcgtagtagcaccggccgcaccgcagtggacaagcgtgcggatccacggccagtcgttcatgctgcaccagatccggcggatggtggcacttgcggtgctggtcgctcgctgtcagttgccgcccagtgtcgtgcgcgaccacctcgtcgccgcgacaaggaaacacatcccgagggctcccgctgcaggcctgctgctggagggtcccgtgttcgcgcagtacaacagcaagctgcgccggctgttgtaccgcgaaattcgcccggacagcgaggccgtcgagcacatgcgccgcttccgggaatgccagatctacactgcggtggcgcgcgaagaaacgcagcgtcacgtgttttgccactttgtacgacgcacgaatcgtctggccgcgccgctaatctag

SEQ ID NO: 4105 - DNA, 138 bp, Saccharomyces pastorianus
atgaaaatggaaatgatcatctcttctccatcagacggccaagtcaaagaagtctttgtcaccgatggtgaaaatgtggactcttccgatttgttggtcttattggaagatgaaattcccgctgagactaaggcttga

SEQ ID NO: 4106 - DNA, 3372 bp, Saccharomyces pastorianus
atgtcgcaaatgaaattcgccggcctaagagataactttaatctcttgggtgagaaaaataagatcctggtggccaacagaggagaaatccccattagaatcttccgtactgctcatgaactgtccatgcagaccgtagctatatattcgcatgaagatcgtctctccacacacaagcaaaaggcggacgaagcatatgtgattggtgaagcgggccagtatacccccgtgggcgcttacttggccattgatgagattatctcgattgcccagagacaccaagtggattttatccatccaggttacgggttcttgtctgaaaactcggaatttgccgacaaagtggcgaaggcaggcatcacgtggattggcccaccagcggaagtcattgactccgtgggagacaaggtctcggccagaaacctggctgcgaaggcccatgtgcccaccgtccccggtactccgggccccatcgagaccgtgcaagaagcacaggacttcgtcgataaatatggctaccccgtcatcatcaaggccgcctttggcggtggtggtagaggtatgagagtggtgagagaaggtgacgacgttggcgatgcgttccagcgtgccacatccgaggcccgcaccgccttcggcaacggtacctgtttcgtggagagattcctggacaggccaaaacatatcgaagtccaattgctggccgataaccacggtaacgtggttcatcttttcgaaagagactgttccgtgcaaagaagacaccagaaggtggttgaagtcgctccagcaaagaccttgcctcgcgaagtccgtgacgccattctcacagacgctgtcaggttggcaaaggaatgtggctatagaaacgccggtactgccgagttcttggtcgacaaccaaaacagacattatttcatcgaaatcaacccaagaatccaagtcgagcacaccatcaccgaagaaatcacaggcatagacattgtagccgcccagatccagatcgctgccggtgcctctttgccccaattgggcttgtttcaagacaagatcaccacccgtggctttgccatccaatgtcgtatcaccacagaagaccctgccaagaatttccaacccgacaccggtagaatagaagtctaccgctccgccggtggtaacggtgtcagactggacggtggtaatgcatacgcggggacgatcatctcgccccattacgattccatgctggtcaaatgttcatgttccggttccacttacgaaatcgttcgtagaaaaatgatccgtgccttgatcgaattcagaatcagaggtgtcaagaccaacattcccttccttttgacccttttgacacacccggttttcattgacggtagctactggacaacgttcatcgatgataccccacaactgttccaaatggtctcttccaaaaacagagcccaaaagttgctgcactatctagctgatttggctgtcaatggttcctctatcaagggccaaattggtttgcccaagttgaagtcgaaccctagtgtccctcacatacacgattctaagggcaacgttatcgacgttgtgaagactgctccaccttccggatggagacaagtgctactggaaaagggaccagctgagtttgccaaacaagtaagacaattcagcggtaccctattgatggataccacttggagagacgctcatcaatccttgttggccacaagagtcagaacccatgatctggccacaatcgctccaactaccgcccatgccctagcaggcgcctttgctttagaatgttggggtggtgccacttttgatgtcgctatgagattcttgcatgaagatccgtgggaacgtttaagaaaattaagaaccttggtgcccaacattccattccaaatgttgttgcgtggtgccaatggtgtcgcctactcctccttaccagataacgccattgaccatttcgtcaagcaagccaaggacaacggtgttgacatcttcagagtcttcgatgccttgaatgacttggaccaactaaaggtcggtgtagatgccgtcaagaaggccggtggtgtcgtggaagccacagtctgcttttccggtgatatgcttcaaccaggtaagaaatataaccttgactactatttggagattgctgaaaaaatcgttcaaatgggtactcatatcttaggtatcaaggatatggcaggaaccatgaagccagccgccgctaaactgttgataggatctattagggctaaataccctgatcttccaatccatgtccatacacatgattcggctggtacagctgttgcatctatggctgcatgtgcgcttgcaggtgctgatgttgttgatgtagccatcaactcgatgtctggtttgacctcccaaccatccatcaacgctttgctagcttctttggaaggtaacattgacacaggtatcaacgttgaacaagtccgtgaattagacgcctactgggctgaaatgagattgctatattcgtgctttgaagctgatttgaagggtccagatccagaagtttaccaacatgaaattccaggtggtcaattgactaacttgttattccaagctcaacaattgggtcttggtgaacaatgggccgaaactaagagagcctacagagaagctaactacctgttaggcgatatcgttaaggtcaccccaacttccaaggttgttggtgacttggcccaattcatggtttcaaacaagctaaactcagatgacgtcaaacgtctagctaactctttggatttccctgactctgttatggacttctttgaaggtttgatcggtcaaccatacggcggattcccagaaccattaagatctgatgtgctaagaaacaagagaagaaagttgacatgtcgtccaggtttggagttagagtcatttgatctggaaaaaattagagaagatttacaaaacagatttggcgatgtagacgaatgtgacgttgcctcttacaatatgtatccaagagtttatgaagacttccaaaagatgaaagagaaatacggtgacttgtcagtactaccaaccaaatgtttcttgtctccgctagatacagatgaagaaatcgaagttattatcgaacaaggtaaaactttgatcatcaagttacaagctgtcggtgacttaaacaagaaaaccggtgaaagggaagtctactttgacttgaatggtgaaatgagaaaaatccgcgttgctgatagatcacagaagatcgaaactgtcacccaatcaaaggcggacatccacgatccattgcacattggttggtcaactggtgggtgtcagtcgtggaggatagtagttcttaatggcgctctggtgtag

SEQ ID NO: 4107 - DNA, 681 bp, Saccharomyces pastorianus
atggtaactacttcatcttgctctggtagagttagtgtgtttttggaaggtacaaagtcatataatggagaggtgaagataggcggtaaaggtcaaggtggcaagtggctatatgtcactcacgaccatgaaaaggttgttggctggctggacgagttgatgtcaaagaatgagtatgctcttgaaacatgtggcaagcatataccatccgaacaaattacgggaactactagatatattttgtataaatatgagccgttcatattgcatgtcaaatgtagagacttccagatagcttcgaagctctataacgctgcaatgtcttgtggcttcagagaaagtgggattgggtcaaataatctcgttgcaattagaataaacattaaactggatgtgccaatcggctatttggatgagagttcagaaactttgatgttgtttgttagcccagaatatgtaagtattttggattctttatcgttaagcaaatttgatgagaatgctagaaaaatgcaaacattatatgataaaatcgacaatgaacttataaactgcataccggctccaaataccaagactaaagtagcattagctgaaacaaaagaagaaagaagagaacgaaaaaaaaaggaaggtatggaaagacaacgtcaattaaaaagcacacaaaatcaactctaa

SEQ ID NO: 4108 - DNA, 858 bp, Saccharomyces pastorianus
atgttgcataaggtccttgagaataaggcggacccgctggtttcattaatgatggtagagaaggttcctgattcgacgtatgacatggtttttgggttaacaaaacaaatcaaagaaatcaaagaagtcattgaactgcccgtaaaacacccggaactgtttgaaagtctgggtattgctcatccaaaaggtgtcatcctatatggtccacccggtacagggaaaaccttgttggcaagagccgtcgctcatcacaccgactgtaagttcatcagagtcagtggtgccgaactggtccagaagtatatcggtgagggttcccgtatggttcgtgaactgtttgtgatggccagagaacatgctccttccattatcttcatggatgaaatcgattcgatcgggtccacccgtgtggagggctctggtggtggtgattccgaagtccaaagaacaatgttggagttgctaaaccagttagatgggttcgaaacctccaagaatatcaaaatcatcatggccacaaacagattggatatcttagatccagtgcttttaagaccaggtagaatagatagaaagatcgagttccctcctccaagtgtcgcagctagagctgaaatcttaagaatccactctagaaaaatgaacttgacccgtggtatcaacctaaggaaagttgctgaaaagatgaacggttgttctggtgccgatgttaaaggtgtgtgtacagaagctggtatgtttgccctaagagaaagaagaatacacgtcacccaagaggatttcgaattggctgtcggcaaggttatgaacaagaaccaagaaacagccatttctgtcgcaaagttgttcaagtga

SEQ ID NO: 4109 - DNA, 162 bp, Saccharomyces pastorianus
atgacagctgccgtaacctcctcgaaaatgatactggaaacccacgaaagtggtatcaagccttattttgaacaaaagatccaagagacagacataaagatccgctccaaaacagagaactgtgcgccgactagaggctcaccgaaatgcattgaacgataa

SEQ ID NO: 4110 - DNA, 1539 bp, Saccharomyces pastorianus
atgctggcccataacaacgtccggcaatttcgcattgacataaacgagccgcacagtgtgtggaagcccgatgaatgcataaccggtgagacagtcatcgacatcaagagagacatcactaatgtggccattaagctctctctggtgtgtgaggtacgagtgaagaccggcaatagtccaacctccaagaataaaagagtagagaagattttagaaaagtcaacctttctttacgggcaagagtacataaaggcagctcccgcggagaaaaaaccggccatcgacaagtctaccgttctcaacggtctaagcaagggcgaacacagattccccttcagaataaaaataccaaggggcaagggcatgttgagctccatcaaattcgaaagaggctccatcgcatacttcctgaactgcaccttggagtcccttaataacgttaatgctctgaaaaaaccagaggcgaggtgcgaacgtgagttctcggtcatagtgcccttggacgtctcgaggctgcccaaacagaagaccaagacggtggtgctgcagtccgcatccatggtccaaaacaaaaagggcaaatcctcggaggacgcatcctcctcctacacacaattaacccataagtccaacaattccaattcttccagcagtacggtaaactcctccaagacatcctccccaccaaacaaaacagtgaccatatccgtcgacataccgcacgccgggttcgtgatcggcgagacgatccccatcgacgtgaagatcgaacactataaacccttctaccacccagcgggcctcaccaccaccttggtgagaatctgcagggtgggcggtgcgggcaaagacgaccccatggagacttttagaaaggacatctgccagagtatctcccctatatacatcaatcctgaaacgctccagttccagcccagaattcatttgaaagtgcccctagacgcattttcgacactcacctccgtgagcaagttcttctccttccaatactacatcgaagtcatggtcaatttgtccaagaaaaacgtggtctatacggaatccaacagggtagtaggaacccccgtcgaggagcagaacggctcgggcgtagaacacaacatcaaccgcattcaaaggaaaatgctacgcatggtcaatccagaaactttggaaaacgtctccgagggctatgaatccagtatattcttcaaagacatggtcaacgtagaaaaactgaaaaggctcagaaacgtcacaggcatgtccatcgaaactgtcataggaacgacaagatccgagcagcaacagtacgatacgaacctccctcgccagcccgccaccactaccgcgcaagatccagtaccggacttgagagactggctagccccactgaatgcatacgaatgcgacgatgtccccgttccaaagtattcccccaatgatagagttaacgtagcgtcggaagacaagcaggagctggagcaaaaaagactacaacaactagaaagtgaccctccgtcctgtgatgactattag

SEQ ID NO: 4111 - DNA, 99 bp, Saccharomyces pastorianus
atgcttcacaagtacagaaagtggttaatggttcatccgcggatcttgtttgcaattggtagtaggacaccttcttttctttacatttaccacatgtaa

SEQ ID NO: 4112 - DNA, 465 bp, Saccharomyces pastorianus
atgttgagaggattatggaaacaaggttttggcgtcgctcgttcgatgaaattctcgaatggacccatcactaattacacccagagtttgaggagaacttctccagtatatgctaaaagaaactatgctcagtcttgggacaacaggcaacctaacgacaagatcgatgcgcacatcaaagttcaaaaactcatggacgaaataaactcaaagcctaacgttctggagaaactagaagaggttagtaacataatgatcgagaaaaaacttgttaatttagatgggacttctgccactgaagagaacacgatgaagccatggcaaatgatcaagattctaatggacaaagatttaaggcatgcaatgaaggaattcaaatcagagctgcaaaaatctggcattcaattaggaccggaccaattaggaccattaatgaccgttttaggattggaaaagaaaaaataa

SEQ ID NO: 4113 - DNA, 138 bp, Saccharomyces pastorianus
atgttgtccaagactaaggtctactacttccaaggtggtaacaacgaattgggtactgccgtcggtaagttattcagagtcggtgttgtctctattttggaagctggtgactctgatatcttgaccactttggcttaa

SEQ ID NO: 4114 - DNA, 105 bp, Saccharomyces pastorianus
atggacctggatgttacaattttatcgacttataatgattactggaaagaacctggtcaatacggtatcgaacaatcattcggtgtcattgaatatctgccataa

SEQ ID NO: 4115 - DNA, 558 bp, Saccharomyces pastorianus
atgatttcagctacagagtttctatcatcgctattatgcttaacctatctagcctctgctctgccagtcctgcccaagagagaaattgtaacaagagtccacacagcaagcacaactaacgtagtaacagatttctactctactaccactcaggttattgttgcccccaccgttgaattcttaatcagcgatagtgttaccttcaccacaactttaattccagaaggtgtcaacccaaccgctgaaccaactacgactatcactaaagttctcgtaaaaaaggttcaagaaactacgcccgctctgcaaccaacctctactttgcaaccaacttctactttgcaactagcttctacacaacaaattaacgactccccttccagtacaacttcaaccgaaaacgcacagcaaccaagtactacttccgcttccacttctacacaaaacatggtcagcggtgttggtgaaattaatgtcgcaggtgattcgcaaacccaacatcattctcatcaagctgctgcgacaactgatgtgaaccaacaaacaacgacgacttcc

SEQ ID NO: 4116 - DNA, 705 bp, Saccharomyces pastorianus
atgatgattaccctagagcgcaaccacctgatgtcgcagaagagaatggtagatgccttggcatgggtgggggtgatgacaaggtccatgaaacaaatcggtcatgttctaaagttgacagacgacgagacaaaatacgcagagattgaacacaatgtaatcgaaaatttagacttacttcattggagtgagaaggacaattgctactgtgacatcagcatcgatttcgaagatgaagaaattaaagaattcgtgtgccatgagggttatatctctttgttgccatttgcattaaagcttatccccaaagactcgcccaaactggggaaaattgttgccttgatgagtgactcaaacaaaatattttccgaattcgggctgctgtcgttatcaagacaagacgaatattttggtaaggacgaaaattactggagagggccagtttggatgaacatcaattacttgtgccttgatgcaatgagatactactaccctgaggtcactcttggcgtggctggtgaggctagtgatgccaagaagctgtaccaaagcttaaagactaatctcagtaacaacgtctataaagtttggaaagaacaggggtactgttatgaaaactacagtcccgtagacggtcacggtacgggcgctgagcatttcactggttggacagcactggttgtgaacattctgggccgtttttga

SEQ ID NO: 4117 - DNA, 1401 bp, Saccharomyces pastorianus
atgtttaattcaagattaaagttgcttagggtattctgggtagttgctaatatagctctcctggtatctggaaccgtcaatgttgataaattggaagaattcgaagaataccaaaagtttacgaatgagtccctattatgggcaccttacagatcgaattgttactttggcattacacctagatatgtcaacgaaagcccgctagtgatgggtattatgtggtttaacagtttgaaccaggacggattgcagtcattaagacattttgctacacctcaagataaattacaaaagtacggctgggaagtttatgatccaagaattggtggcaaagagatctttattgatgaaaaaaataatttgaacctaactgtgtattttgtaaagagcaggaatggggaaaattggtcagtaagagttcacggtgaacctttggaccctcagctaccttccacggcctctatagtattgtatttcagccaaaatggtggtgaaatagacggaaagtcttcattagcattgatagatcaggatggtcccaatgatttgaaatttttcggctattctcaagaattgggagagtatgatctgacggtgagggacaactttggtcaatatttcaacaatccggcacatgacactatggaagtagcaccaggaagtgactgttccaagacaagtcatttatctcttcaagtcccaggtagtgaagtttggaaagctcgcgatatttttcagtctctggtaagcgattctatacgtgatatacttgaaaccgaagacaagcaagaacgtccagctgatttgataccgagtattttgaccattagaaatatatataacttcaaccctgggaattttcattatgtacaaaagacatttgatttgtccaaagagggggggtttgagtttgataccacatataataagcttgaaacaactcagagtatttccactagggaacaaatcacagaattgatcacatggtcactaaacgaaataaatgcacgctttgacaaaaagtttaattttgaacaagggtccgatttaatcgggagtgttgatgataagaggaaatttgccttggaaacactatcaaacctgttaggagggattggctacttccatgggaagcaactaattgatcgtgaaaccgagttcgacgagagtcaatttgccgagataaaattgctgaatgcaaaagaggagggtccattcgatttatttaccagcattccgagccgtgggttttttccacgtggattctactgggacgaaggtttccatcttttacaaattatggaatacgatttcgatcttgcctttgaaatattgactagctggtttgaaatgattgacgacgatagcgggtggattgctagagaaattatcatggggtga

SEQ ID NO: 4118 - DNA, 2169 bp, Saccharomyces pastorianus
atggtagagagtcccattaacgagaccaaagcacattcaaaagctatgtcggaacaactcagacaaacatttgctaacgccaagaaagaaaacaggaacgctctggtcacgttcatgactgcagggtacccaacggtcaacgacaccgtccccatcctcaagggtttccaagatggtggtgtggatatcatcgaattgggtatgcctttctccgatcctattgcagacgggcccaccatccaactgtccaacacggtcgccttgcagaacggtgtcactctgcctcaaactctagaaatggtctctcaagccagaaatgaaggtgtcaccgtacccatcatcttgatgggttactataatccaatcttaaactacggtgaagagagatttattcaggatgccgctaaagctggtgccaacgggtttatcatcgttgatttgccaccggaagaggccttgaaagtcagaaactacgtcaatgatagcggactgagcttaattcctttagtggcgccttccactaccgacgatagactggaattgctatcccacattgccaattcgtttgtttatgttgtttcaagaatgggtaccaccggtgcacaaagtgctgtcgctagtgatttgaatgaacttgtctccagagtcagaaaatacaccaaggaaactcctttggccgtcgggtttggtgtctccacaagagaacattttaaatctgtcggtagcgtctcggacggtgttgtgattgggtccaagattgtcacgctgtgtggagatgctccagagggcaagagatatgatgtcgctaaggaatacgtagagggaattctagatggtgccaagcacaaggttttgtccaaagatgaatttttcgccttccaaaaggattctttgaagactgcaaatgtcaagaaggaaatactagacgaattcgaagaaaaccataagcatccaattagatttggtgattttggtggccaatacgttccagaagccttgcatgcatgtctgagagagttggaacaaggtttcgatgaagctgttgctgaccctacattctgggaagatttcaagtctttgtactcctacatcggccgtccttcttcactacacaaagctgagagattgactgaacattgccaaggtgctcaaatttggttgaagagagaagacctaaatcataccgggtctcacaagattaataacgccttggcacaagttcttttagccaagaggttgggtaagaaaaatatcatcgctgaaaccggtgctggtcagcatggtgtagccactgcgactgcatgtgctaagttcgggttgacttgtaccgtcttcatgggtgcagaagatgtccgtcgtcaagctttgaacgtctttagaatgagaatccttggtgccaaggtgattgccgttactaatggtaccaagactttgagagacgccacttcagaagcattcagattttgggtcactaacttgaaaaccacatattacgttgtcggctctgctattggtcctcatccatacccaactttagttagaactttccaaagtgtaattggtaaggaaaccaaggaacaattcgccgccatgaacaacggtaaactacctgatgctgtcgttgcatgtgtcggtggcggttccaactccacgggtatgttctcgccatttgaacatgatgcctctgttaagctattgggtgtagaagctggtggtgatggtgtagatacaaagttccactctgctactctaaccgttggtagaccaggtgtcttccacggtgtcaagacctatgtcctgcaagacaacgacggtcaagtccatgacactcactctgtttccgctgggttagattacccaggtgttggtccagaattggcatactggaagtccactggccgtgctgaattcattgcagccaccgatgctcaagctctactcggattcaaactattgtctcagttagaaggtatcattcctgctttggaatcctctcatgctgtttatggtgcttgtgagttggccaagacaatgaagcctgatcagcatttgatcatcaatatctccggtagaggtgataaagatgttcaaagtgttgccgaagtcttgccaaaattgggtccaatgattaactgggatctgagattcgaagaagacccatctgcttaa

SEQ ID NO: 4119 - DNA, 96 bp, Saccharomyces pastorianus
atgggcatgaacaccgtgaacagcaatggcaaggaactggattctctggacctcaacaacctggagctgggtggcctgaatatggacttcttgtga

SEQ ID NO: 4120 - DNA, 1587 bp, Saccharomyces pastorianus
atggtgtcgatattaaggaagagttgtacggaggagaatgtccgcagcagtcacagcagtcaagctggcgacggtatgggagacggcaggaatccctcgagcggcaaggagattgggaggagtttgcccttcacggacgaccagcggtcgaaccctgagttggacccgacccgtgatgtggtagatgccgccaggaacaagaagaagagcaaagctgtgttcagcgagccggaaaacgatgcagacgaggacgacgaggtgcgccagaagaatttgaccacgcaggcgctgcggaagctgtcgtcgttcaagatgaacgccagctccaacctgcggttgagtagcgacaccagggcgagggagtcctcgtcctcgtcaacgtcgtccgtgtcttcgtcgtctgcatcagtgcccaaaaccgagtatatcgctgacaagctcaccacaacgaattccaattccatgactcaactgagattcggcaataagaacgtgatcatcgactcggtgaaccacgcggctgctgcaaagccaccgcatcagcagatgctaagaaagccctcgctggagttcttgccacagcccgcctcgacctccaacctgaacttcaactctaacaggaacaagtcaactgtaagacagattaacaacccaaaaaaaccactatacatccctgctgtgctaagaaaagtatcggagacgaacataaccaatgacgacttactgaacgccacgttgtcatcttactacaaaaaggcctccaatttggacaacaacttgtctccaaaggcgccccagtcagccagcgctcagaacgcaaacaatctgaggatcatatcgtcgcaatccagcgtgcaatcaaacacgtcgtcgatcttggaaaactacaaaaacaagatatcttcgtacctgttccccaactccatcccgaacaacaacagaatcaacctaatacccaccatctcgaacagaaactcctccagagtaaacccgcccactatggaccactggatcccggacagcaagcggaactcatgccgctactgccacaaaccatttactctgtgggaaagaaagcatcattgtagacactgcggggacatcttctgccagaaccacctgcgccactggctgtatctggactcacaggcgaacttcataatgattaacgagttgagtcgcggtggcctcaacgacggcggcacgttgtgcaagatatgcgacgactgcctggtcgagtacgagaacctatccagttctaatcctagtgcaaacgagaccaataacaacaacagcaacaacggcaacagcgacggcgccgacaatgaagacgaaagcgataataggaagaaggtccgcaactactacaagaacagacagatgaactcccttttcaggccaagaaagggcgctccggcccaaccccatgccggggtcgaccaggacacgataacgcccatccaggtgagatcgtacgaggacgacacggaaaacgagaatgctggggaagaagaagaggaaggaaacgatgttctgggcagcgtgatcggctctgtgcccgcaaactggaactggagcagtttctaa

SEQ ID NO: 4121 - DNA, 435 bp, Saccharomyces pastorianus
atgactgcgttgcacagtgtggccaaaacacccgcgatcaaggaagaggaggaggacggcgacgagcgggccggtggggggatgcccctggggcccaagaaccatgactaccgaggcatggatggcgatggtgatggcgaaggtgatgcggacacggtgacgtctcccatcacgttcgagaagcagaaggtggtgcccaggacatcggcacactcggaacagagcattttgagtagcatctcgctcaagtcgatggtgaaccagcaccggcagcaggaaggctcgacgggtgctggagccggggccgggactgggactgtgaatgggactgggactgggaatgggagtacgactgcgtcgcactcacattctgcgtatgtcgacaggaagcagaagatccagtcgccggcgatggtgtcgatattaaggaagagt

SEQ ID NO: 4122 - DNA, 288 bp, Saccharomyces pastorianus
atgagaaactcgttactgtacaagatgtcctacaaggatttcccacaattgttcaacggtggtcaagctaccgacagagtacgtcaacaaatgatcacctcacaagacgtccctccattagactactttgatgaagtgtttacgtccgaaaactggatggtcagaatatatcaattaaagaaagatgacgtccaaggtaggtctttgaaagacgttggtgacctaaccagagcttctacaaagtcaagaaggtctatcaagagacctgagctaggtctaagagtataa

SEQ ID NO: 4123 - DNA, 669 bp, Saccharomyces pastorianus
atggttagactgatgttgactttgacacccgttatctgtgtgtgcggtgctgtggcgttgtccaagatttttgacgtctatttggatttcaaagctagcgaccgcaaatccgtcgccaagccaagtgccatactagccaaattgattgtttccggatcgttcgtcttctacttgtaccttttcgtcttccattccacttgggtaacgaaaaccgcatactcttctccatccgttgttttgccatcgcaaaccccagacggtaagctggctttgatcgacgatttcagagaagcctattactggctaagaatgaactccgatgaggacagcaaagtcgcagcatggtgggattacggttaccaaattggtggtatggccgacagaacgactttggtcgacaacaacacctggaacaacactcatatcgccattgttggtaaggctatggcctccccagaggaaaagtcgtacgaaatcctaaaggaactcgatgtcgactacgtcctggtcatcttcggtggcctaattgggttcggtggtgatgacatcaacaaattcctgtggatgatcagaattagtgaaggtatctggcctgacgagatcaagaacgtgacttctataccccagaaggtgaatacagagtggattcaagggcctcggagactatga

SEQ ID NO: 4124 - DNA, 1050 bp, Saccharomyces pastorianus
atgggatctgaccggtcgtgtgttttgtctgtgttccagaccgtcctcaagctcgtcatcttcgtggcgatcttcggggctgccatctcgtcacgtttgtttgccgtcatcaagttcgagtccatcatccatgagtttgacccctggtttaatttccgggccaccaaatacctggtcaacaactcgttttataagtttttgaactggttcgacgaccgtacctggtaccccctcggtagggtcaccggaggtaccttgtacccgggcctgatgaccaccagtgcgttcatttggcacgcattgcgcaactggcttgggctacccatcgatattaggaacgtttgtgtcttgtttgcgccactgttttccggggccaccgcctgggctacctacgagtttaccaaggaaatcaaagacgccagtgccgggctcctggctgcgggcttcatcgccattgtccccggctacatttctagatctgtggctggatcctacgacaacgaggccatcgccatcactctgttgatggtcactttcatgttctggataaaggctcagaagaccggctccatcatgcatgccaccgctgccgcgctatgctacttctatatggtctccgcctggggtggctacgtattcatcaccaacctgatcccactccacgtcttcctactgatcttgatgggtagatactcgtccaagctgtattccgcctacactacatggtacgccatcgggaccgttgcatccatgcaaatccccttcgtcggcttcttgcccatcagatccaacgatcacatggccgcattgggagtcttcggcttgattcagatcgtcgcctttggtgacttcatcaaggctcaagttagcacggctaaattcaaagtcatcatgatggtctctttgatgttgatcctggtcctcggtgtcgttggcctttccgccttgacttacatggggctgattgctcccttggacgggcagattctattcgctatgggacaccaactacgccaagatccacatccccatcatcgcctctgtttctga

SEQ ID NO: 4125 - DNA, 2241 bp, Saccharomyces pastorianus
atggattttgaaacttcgttcgaggaattcgtcgaggataaacggttcattgcattagaagtatctgataatgatgacgattacgacactgatctgactactgaaacgggagacgagctcgacagctcggtcattccacgtatgaggagctccaaagcatctttgaacactaccggtcacagtataccaagaaagaacaccaccaattcaaaaaaacgatggtctttattgtctaatcattctactgtttcatcatccaaatcaaagaaaagatggtcagtactttcttcaagctttactagtgagactcacaaggacagggatccgaggggcacttcacagcaaaaaagaaagtctttacaaagttactctagtttggatacggtagcctctaatacttctctttctgcttcctcctctttgaaacgatcatctacagggttatccctcaggcagctgtttaccaagatagttatcaatgatgaaacgccacaacctggaattgggatcccaggaggtaaggaaaatctgcctccaacttcgaataagaaaattttgcccatcgcaccaattggttcagaacaaaacagacttagaacgccactaaagccgctaaataatcaagcgagaagatcaactttacaacaacaacaacagcaacagcaacaccagcaccagcaccagcaaccacaatctctagtaaatgcgtcattttcctcaagaaggtcatcaatttcgtccactgcttcttcctctagcgcttctaaatggaagttctggaaaaaagatagaagtatgccgcctccaatgcttcaagcagatcatcattccatgaattcattttcagtagtgaaccgtcgtgattcggcgacacctgttgacccaaggattaaggttaagcacaagtcatccttctcagaattccataaagccattttcaactcaaatacatattcagaaagtagtgatactgtctcatctatggaaacgtccttaaaaacaaaagcatcttcttcgagtttatctttgggcgtgttaaagaacagaaattcacaatcaagtttaaagcacaagagttcacatgcatctttgcaaaaattcaagagaaacaaggcgaagtcttccataatggcaccacccacaacaactagtagtagcaatgatgattcttgtagctatagctccaagagttctactttgagtcaccggatctcattacctgtaccggatcaagtgtcccgtgataaaatacagaataaactaaggaattcaaactcgttactctcactaaactccacaacttcttcgcccatgaacaaaaatgaccatgacgaatcgcttttaagacaaattttacaaaattgtgatatcaaaaagattttgaatcctgcaaagggagatatattgcctttgattaatgatgtaagtcatttgtcgtcgatccaattaacttcacatatttggcaaattggcgaggtgatctgtaagaaaatcgcattaggctctatcaatgatattacgtgggatacgaaattcttgtctttacaagaattggaaaaatacagaattatgaagcaaaaatttggcggaattcctcaattgttaaagagttttgttgttaaagaggcaaacaatacactgtgtttatatttactgttcaaagatcatggtacgccaatttcgttgatttcgttgaaaaactggaagcagattttaaagattttttggtcctgcgttggtataatcaataacttggaaacaaatctgaaatttgagcatcgaaatttaacgttagataatattttaatggatggtaatggaaacataactattattgattttaaatgtagtagattgcaaacccctcaggaagacgtcttatgcttacggttggaccatccactctttttcccgaatgggaaagacaagaacaaaataaatgaataccaataccagtttgagtttgaaatttaccaaagtatgcgaatcttattgaacatggattcgaaagtctttgaaccaatgacgaatttatattggttatattacttgtcacgaattctattaagattgggtgacagaaaacttggtaaaaatgatttaaacagggacaaattggctaaagtggtgagtcatttggaaatgaacttagcggttcataagaggggaggacagatattcaagagattagaggcaacggacattaaaaacacaggagacttgttgaaactatacaaataa

SEQ ID NO: 4126 - DNA, 399 bp, Saccharomyces pastorianus
atggaagaagaagaagaaatacgtccattaaactatccagacggtggagcgagtaggccaataagtctgcttgagacgacaaacaatttaaaaagctctttgaaaaagctttctcaaaaggcgaaagcatcacacatttctagcgaccggatccaccattttagaaagtggaaaaacaaaaacggattactttcggaggagcactcagagtcttgtccagaggtggactttctatgtttcagtaacagcctacaatctgccgcttcacattcgacggtgtccatctctcataaacttccagaactgtattggaacgaagagcaatgtcaattggagatggaaatcttaaagtctctaaagttaaatcctataaacaagcgtagcgctttaaataattag

SEQ ID NO: 4127 - DNA, 246 bp, Saccharomyces pastorianus
atgtttaccttattcggttggtggtctgaaaactggactgatatcgtcactgttgtccgtgtctggatctggtctattggtatcttctgtgtcttgggtggtttctactacgaaatgtctacatccgaagcctttgacagaatgatgaacggtaagccagcaaaggaaacaaagtccacaagaagtgtcgaagatttcttagctgccatgcaaagagtctctactcaacacgaaaaggaagcttaa

SEQ ID NO: 4128 - DNA, 2271 bp, Saccharomyces pastorianus
atgaagaaattcgaaactaaactagggcgaatgataactaataataaaaccaggataagcgtcccagaaaagctgggtctttcggggcagtcttttgagcaatcgtgggaaatagttaaacatgccattgatcatatatatatagatgacatggccgatctctcattcgaacaagtatacaggacaatttacacaattgttctaaacagaaaaggaccaatgctttatgataatttgaaaacatacacaatagaaaaactacttttttttagggaaacagtattcaagaacaatgcacctgattatgaaattctcgaaacaatggcaggattatgggagacgctatgtaattgttttaaaattactggggatttgatgatgtacatggacaaagtttattgcaagccgaataggtgcttggaggtatatgatatgtgtcttgatctttttagaaccgaaatactccaaaagcgttcctcttctcttatttcagcattgatttcagatatagatggaattcgtagttcagggtccatggacccaaaacatactagcatgtggaaagtgttaataggaatgatggaaacgttgcatgacaatagagacaactttttcttgactgattttgaaccagttttaatcagcgcaacagaaagatactatactgatgctatcaatattaaatcgctaacgccgcttgagggactggaaaaaataaggaaactgaagcagttcgaaaatgtattagattcttcttttttgaatgcagattctcacaacaagttaaaaaaagtcttaggaaatgtcctcatatggggaaaattgagtgatgtcatagaggatttgacacatgaagcaatgaagctctcggatgaaaggctgcttcaagaaatctatgatttatctggtgaaaggaaatataaaactactattattgagtctattaaatcatatattcggcgaattgccacagcagttccttttaaggatggtagtcgtaaaaaagggcagaatgcgattacttggtcatcagaaattttaagcatattccgtaagcaacgcttatttctgggtaatactaaatttggttctgtccaagtcaatagttcagttacgtacaaattcattggtatgacaatacttcacgatgtttttgagacctacttttctgaagaaggggcgttgccatcagagtatatttccacctacgttgactactgtatgaagcaaacaaacgataacgatgccgaggttgctaaaatcaaggaagatttgcttgacagtaccaaattgatagaattgctatccgaaaaggatatttttgaaagtacttataaaaagcaactctccagaagactgttgcagcagaaatctatactagaaattgaaaagtggatggtgcaaatgataaaggatgctctagggactttttttactttgaaactagagataatgttacgggatatttccttgtcttcaagaattttgcaagcatttaaatcctcaagtaccagcagcatagaatatatgaattttgtaccagaggttttaacaaggacaagttggccttttcaaagtaccaacccaattgatgagagtattgcattgcctcctaggatgtctcaaatgttaatgggcttcgacgagtattactccttaaaatacaaggaaagagtattaaaatgggcccatcatttaagtgtgattgagattggatgtcagtttaataacggttactacgaaataagtttttctgtttacgccggagctattttccttctttttgagaattatgaagaactaacattagaagagatccgtgaacttacccatattcctgaggaagatgtaaaatctcttgtaatgtcaatgtcagcagttcctaaatgtaggattttgaaaaggtcgtcgaattcaggaaatgctaaattttccgtaaattattttttttctgctccaaataggaaagtgaaggtgccaattattgccggtcctgcttcattccataaatcggacaacttagctagccaaagtttggtagactcctatgaaaatgaaagcattatggaggttaatgctgctattgtccgtatcatgaagacagaaggaaagttaagccaccaacagctactgcagagagctacgaagcatatggagcgtcgttttcatcttacgtccagtacgttcaaacgaagccttcaacttttattggaaaaagagtacatacagagagacgcagacgacacctcttgttatcattaccttcactga

SEQ ID NO: 4129 - DNA, 753 bp, Saccharomyces pastorianus
atggatttagatttaagtagtatcttaaaggctgagatttctaagaaacaaaaggagcttagaaactccaacaatgttcaaccattatcccatggaatatcccaggaacatgaaagagtggacgcagacgaaataccccagaaggcagaacaagatgagagtacaaacgaggaagtaccatcggattaccagctcgatgacgatattgtagaagtcattggtaaattaggaaatcggccagaaagaatacaagaagccataactcaagataagactacttcttcaacgatagatccatcacaaatcggttccacaaaagacgaaactgttctgtcaatgaaatgtaatctttatattcacgaaatactagttcattggaaggcgttcttggaagagtaccatccggagttgtttttagatactaagaaggcgctcttcccgttattattgcaactgcgacggggccagctccccacggatttgttaatctccctcgctactgttctttatcatttacagcaacctagtcagaccaaccttgccattcaatcctacatgaaactcagtatcgggaatgtggcctggcctattggtgtgaccagcgtgggcatccacgcccgtagtgctcattccaagattcaaggcggccaaagtgctgctaatataatgactgacgagaagacaaggctatggatcaccagtatcaaaagattaataacctttgaagattggtttgccaaacaaccacgctag

SEQ ID NO: 4130 - DNA, 1185 bp, Saccharomyces pastorianus
atgaaagaccgagccaaagtcgtaccagaggccaagccagagaacgctgaacgcctctataacattttccaagacatcgaaggtcacacagatgaaggtaattcaaagagtgagcaattggacgattcttccatacagtacaaagtcgatactaatactctgagcgatttgccccacgatgcccttgaccaattgtgcaaggatatagttgagtttagaaccaaagttgtcagcatagagaaggaaaagaaaatgaaaagtacgtatgaggaaaacaggcgccaaagacaccaaatgcagaaggtttttgaccaaataaagaaaaacacgtcaggcgccaagggcaatagcaacatagacgaggatgacgccaatatggaagaggacgaagaggacgacatggaggatgaccttgccctagagaaaaggagagaagaaagagagctagaagaatcaaaccgccgatacgaagagttgctccgccatctacacaacgacgtggagcccaagataaaatccaccagagccgatatcatcaccgctgcgaactatgaggagcatttggagaaaaatcgctcgctatatttgaaagagctgctacatcttgccaacgacgtccactacgaccaccacagatctttcaaggagcaagaggaaagaagggataaagaggacagaaccaaaaacggtaatgcacgggagccgccatcatccgaccaagcatccagcggcgaacccccatctgcagagaacctcggtgcgcttgtcctccccgaggacaccaccctaaagaacaggaacattggcgcccacaagaatgtgtccgagggcccagagcacgtcaaaatcaaattcgagttcaagaaggccatagacaactcggcggaaagctccagtgatggcgaggatgccgacgagggcgcggcagaggaccttttgccctttacggcggaagaactggacgcaagattggcaaaactgaaggaatcgcggtgcgttgacgagctggtgcgtgagttccttggcgtatatgagagcgagctagtcgactacattctcgagaacatccgcacgcaccagagcaagcgggcccttgtacacgagctgagggaaaccttcgatgaagacggggaaacgatagctgccagactgtggagtcgtggagaatttcagcgtgggacctga

SEQ ID NO: 4131 - DNA, 630 bp, Saccharomyces pastorianus
atgagagattttgttttcgtatcaccacagttgtatttgtcatcacagaaagattggaaaagtgactgtgccaaagctggatacattcctatccttaaaaatgatctacaacatttccagaactcactaaaacacattgtagatgccaggaatcatgtctcagggacagcaccgaacagcagcaatgatgcggttatgaagaactctgatcataacagcgcctccaacatacttaaggacagtacaacaggaagtgacggtgctgctaacaagagcgatgtaaccgcctctcactatcaggtgctcaaacagtttctccccatttccttagatcaacaaattcatacagtatctcttcagggcgtctcatcatcattctctcgcgcacagatagaatcagtattgggcagttgtttgaatttggccttagtgaacattcaaagtaactcgccattaaagattgaagcttggtcatccttttcctcattcttggacacccaagacgtttttgtgcggttcaacaaggtcgatgatgatgaagcctttgtgaaaacactaaaatactgggaagaattattcgattttgccaaaaagtacatggagaattcagagatcgacaagctgatccgg

SEQ ID NO: 4132 - DNA, 1341 bp, Saccharomyces pastorianus
atgggctatagcagtcagacaactgcggctacttcatcacaaccctcatctgtcaccgaggcaaggagtagttctacttctacttcatcttcattggaaatagtaacatctgctcctgtccaatcatcggaggcaccatctccggtgcttacaccatctacatcctcagtgaatgaagtgccagcaaatacggacgttcaaacgagtttgacaatggaatccacgactgttttacaaccatcagtgaccagtagtaccagtactttcgaaagctcggtcacgtcgagtaacaacaattggtggattccaactaagctaatcacccaggtaccagagaccgcatcctcggcatccactaccactggcggaacacaaaccatgactttgcctcatgcgattgcggctgctactcaaatacccgaacctgagggatatagcttaatcacagttggatttcagaaagctctaaactacgaatttgtcgtgtctgaaccaaaatcatcggcccaaatttttgcgtacttgcctgaagcgctaaacacgccctttaaggatgtattcacgaatattacagtcctacaaatagtgccacttcaggatgattcgttcagctacttggtgagtgttgccgaaatctatttcccaacagcggaaatagaaacgttgtcaaatttgatcacgaacacctcaagctctttttacacagacggcatgggcacggccaaatctatggccgcaatggttgatccatccatccctctaactggcctattacatagcagcagtagcggctcaactggatcctcttctggcggatcctcttccggttcttcaaattcgggatcttcaaattcaggatctagctctagttctggcagctcttcatcttcaggaaactaccaagacgcaggtaccttggaatattcatcaaaatctaattccagtgtatctagttccagcaaatcgaagaaaaaaatcattggcttagttgttggtgttgttgtcggagggtgcttgtacattttgttaatgattttcgctttcaaatatttcatcaaaagacgccttcaaaaccaacaagctatcaagaatccagagacttccagtattagttcaagcgaatttggtggcgagaagaatttcaataatgaaaagagaatgagtgttcaagaatctgtaacacaatccatgcggatccagaactggatggatgacagttactatggtaacgggttgacaaatgatgactcggcaccagctagaaacaacacatcaacctctatacccaaaatttcaaggcccatcgccagccaaaactccttaggttggaacgaagtttaa

SEQ ID NO: 4133 - DNA, 1866 bp, Saccharomyces pastorianus
atgcagttttcattcgcttctctcctctcgacgctcttgatgagtaggctattggtcgaggctagtcccttcgatcatatatttggtaacgggacatatggagcccaaagtcagagtcaaagctctcttaccagtgtagcttcccaagacaccaccatctccatcgcttctgaaacagagtcttctcagactacccattcccatcgttctgccacactagtcacagctaccatctcgtctctcccatctacttggtacggtgcggattccacttcccagcttcctgcttcctctagtacaccatatgcctatgctagtaaccaagacacttggagttcatctgtcaacgcgcaaccagcagccagcgcagatgattcattcactgcagagtctagtacgactaccagctttaccactactggttttaatgctgcctccgatgtttccgccactaacgtttacactgttgcgagcgcaaaccctatttcaactgctgttcaatttaccaccacccccgtggtagcatcgagcacatcttcaacttctgaaattccaatcatttccaccagcacgactccttcggccgatagttatatggttccatcgtcagaagcatccgttgtagtttcaacaagtcccggaaactcagagagttttgacgaggcttcgactactgaatcaacaccccttgtcgcctcaggtatcagtactactccactgcagacctcaacagttattgatggttccagtgcttctggtgcaatgagcccatctgtatcagatattcctctacaaacttcaacagagataaccagtaccgacagttcaatcacaacgagcctatccggagcagctgtaccactgcaaacgagtggctccagcagtttcagcgtagtcagcccatctgaatcgtccattccaccacaaggttcatcagatattacaagctccagtgactcaactatggtagcctcatcgccatcatccactctactacaaacagccagttctagcagtttcagcgtagtcagcccatctgaatcatccatcccattgcaaagtccatcagacattgctagttccgctagtacaactgcctcatctttgtcgactattccactacaaactagtagttccaactccatcagcccatctttgtcagctacatcatctccaatcgataccagcagctcgaagacatccattaccacctcaatttcggaagcactatcaagtttcatatcaacaacttctacagcggaaacttcccaaactcaactttcatccacctctagtttgtcttcggtgtctcaaatctcaactgccacaagtgtattacctagtagccaaatcactaccacgtcatcaccataccctactgcaagcacttcatctacgattattccatcctctataccatcttcatctgcgggaagttcggttagcaccgtttcacagagctcgaccggagttcaaagtatctcgtcaccattatcttcaacgataatggaaagtgcgacatctagtcaaaagccatccaccacctctattttgtctgagaaatcgacctcaatttcttctaaattcctatctcaaacaaccaagcaatcgagttccaccacaacccccattttgtctcaaaaattgacctcaatctcttctgctttgttatctcaaacaaccaagcaatcgagttccaccacaacccccattttgtctcagaaatcgacctcaatttcttctgctttgctatctcaaacaaccaaacaatcaagctctaccaccctacctaaatctacaacgtcatcggccgatgtcctctctcaggtttcaaagatctcattactagcacaagctcaaaattga

SEQ ID NO: 4134 - DNA, 990 bp, Saccharomyces pastorianus
  modified_base (53)..(53): a, c, g, t, unknown, or other
  modified_base (74)..(74): a, c, g, t, unknown, or other
atgtcaggactactacagaacaaggcgctgccttataaaagaattgttgagtnatcattccatcgaacacgatngccgtcgaatgtttcaacattagtgaaatttgagcaaaggcccgccattgttaatatccatgggcttttaggctcacatgtaatgtttcattctcttaacaaattcctttcaagaaagattgacgctgacatttttagtgttgatttaagaaaccacggcatttctcccaaggcgttcccttacgactatactacattgaccaatgatttggtgaacttcataaagacacatattggctcggaaaggcctatatatctgttagggttctcaatgggtgggaaaattgcattattaactaccttgttcaaaggtatcaatattcaaaaatgtatatctattgatttaccgccctatgaaactccagaattggaccctttaatagtacaaaactatgatctaataatgcagattattcgaagagatgttaaaattctaaagggttctcccaattggcagaaaaaggttctcgaactattcaaaactctagactgtaatcagaggaagtgtggcggatctgtggctctctactttgcctatggtttcctttctgtaaaatcgaataatattcacctggcacaaccacatcatatgcaactacaggatagtagagaatctgatccttatataaacttttcgatgcccctctccagtatgcctcacttgttagatgaagtaaaaaaatggcccgacttatcaggacaggataatttctttctaaagggaataaccgaacgtaaagttttattcatgaggggcttgcaatctagctttatcagcagcgattattctcttttgagggctaagtttccatgcgccgatgttaaggaatttgacactggacacaatttattattggaggattcagaagcttcattcaagtgcattttagactttttctgtgaacgacagcattag

SEQ ID NO: 4135 - DNA, 90 bp, Saccharomyces pastorianus
gatgcgctcgagaaactgcagaagctgaccgctgcgctcgaggacatcgaggaagtgacgtcgctgtacagcaacgccagcaacgcctga

SEQ ID NO: 4136 - DNA, 753 bp, Saccharomyces pastorianus
  modified_base (510)..(510): a, c, g, t, unknown, or other
  modified_base (633)..(633): a, c, g, t, unknown, or other
  modified_base (666)..(666): a, c, g, t, unknown, or other
atgttggtgagaaacagatgcttaagtaggctcttcaaggcgtatcgatcgttcagtgccctgaactctccggttgcttcgggtcacaacaagtggtcttctatcaagcacggtaaagccaagaatgacgcagaacggaacaagattaacaacaagtttgccaaccaaatagccatgtcggtcaagttgggcaacggcgtcacagacccgagcatgaacatccgactcgccaccagcatagaactagccaacaaaagcaacgttagcaagaaggtgattgaaaatgccatccggaagggatcaggaagcagcggctcgggaaaagaagcgaacgtgtctgaactatgtgtgtacgaaggcatgggacccggcggggtggccgtcgtggtggaggcgctcacggataacaagaacagaacaatagggctaataagaagcgcgttcaacaaagccaacggctccattaccccgacactgttcttctttgacaagaagggatacgtgacggtnacccccccgcatgaactggacaccgaggacaaggtgctagaaagggtgctagagatccagggcatcgaggacattgcatccgtggaggaggacgcagaagacgcagaggccgacgcagaaacngaacccgcgagccccacgtacgaggcggtaacngaacctgcagacactaacaaggtagcggccttgctcaaagagcaaggcttccacatcagagacctgggaatcggctacaacgcttag

SEQ ID NO: 4137 - DNA, 222 bp, Saccharomyces pastorianus
atgaaacaatttttaaatatattttcacatatctatccttgcaactggtgcgctaaagactttgaaaaatacataagagaaaacgctccaaaaatagaatcaagagaagagcttggaaggtggatgtgtgaggcccataataaagtcaatacgaaactgaaaaaacctaaattcgactgcaacttttgggaaaaaagatggagggacggctgggatgaataa

SEQ ID NO: 4138 - DNA, 321 bp, Saccharomyces pastorianus
atgttattctggttaaaaccatcccgccaaattcgtccacccatctactctttgaaacagacacgtttacgtaaacgtatggtcaggaaatattgcagcctgttctttctgattttacttatatttgttgcatgcattgttggacccgctgtagcttcatctcactttaaaaatattggttccggtttgaatggcactttccataacttggttcaaccgagaaatcaatcgaataacgatactggctcaaagatgtcaacttataaaagtcactactacactcatactccatccttaaagacatggtcaaccataaaataa

SEQ ID NO: 4139 - DNA, 135 bp, Saccharomyces pastorianus
atggcatggactcagccaacgagagagttaactgccaaagttatagaactttccgaatttgcagcggattttgtcttaggacatgtaattttaatttttcaactaccggttatttgtattccacaaatagattaa

SEQ ID NO: 4140 - DNA, 5154 bp, Saccharomyces pastorianus
atgaacgctgatcaacatccttaccaggatcaaacggtataccctcaggagcaaggggaaggtcaaggtcaagagcaggactacgaccagtatggccagcctttgtatcctcaacaaactgatggttactacgacccagctatggccgccggtaacgaagctgatatgtacggtcaacagccaccaaacgactcttatgaccaagaatacacaaacggcgaatactatggccaaccgccaaacatggctgcgcaagacggtgaaaacttctccgatttcagcagttacggcccccctggcacccctggctatgacagctatggtggccagtacaccccttctcaaatgagttacggagaacctaactcatctggtacttccacccccgtctatggtaactacgatccaaacgctattgctatggctttaccgaatgaaccttatcctgcttggactgcagactctcaatctcccgtctctatcgagcaaatagaagatatcttcatcgatttgacaaatagactagggttccaaagagactccatgagaaatgtcttcgaccactttatggttcttttggattcgaggtcttcgagaatgtcaccagatcaagctttgctatccctacatgccgattatatcggtggtgatactgccaattacaaaaaatggtatttcgctgctcaattagatttggatgacgatatcggtttcagaaatatgagtcttggtaagctatcaagaaaggcaagaaaggctaagaagaagaataagaaggccatggaagaggcggaccctgaagatgctgaagaaaccttaaataaaatcgaaggtgacaactctttagaagccgctgatttcagatggaaagcaaaaatgaaccagttgtccccactggaaagagttcgccaaatcgccctatacctattgtgttggggtgaagctaatcaagtcaggttcacagcagagtgtttgtgttttatttacaagtgtgctgctgattatttggattctcctctctgccaacaacgtcaagaacccatgccagaaggtgatttcttgaacagagtcataacaccgctatatcaattcattagaaatcaagtttacgaagttgttgatggtcgttttgtcaaacgtgaaagagaccacaacgaagtcattgggtacgatgacttaaatcaattgttttggtacccagaaggtattgctaagatcgtttttgaagatggaaccaagttgattgagttaccagtcgaagaacgttatttaagattaggcgatgttgtctggcgcgatgtcttttttaagacttataaggaaacccgtacctggttacatttgatcactaatttcaaccgtatttgggtcatgcatatttccatctattggatgtactgtgcttataatgcaccaaccttctacacccacaactatcaacaactggtcaacaataagcctttgggggcctataaatgggccaccgcggcattaggtggtactgtggcgtgcataattcagatcattgccactatatgtgaatggtcattcgttccaagaaaatgggctggtgctcaacatctatctcgtaggttctggttcttatgcgtcattcttgctatcaatctaggtccgcttatattcgttttcgcttacgataaagacaccgttaactccactgctgcacgtgttgtagctgccgttacatttttcattgccgttgctactgtcattttcttttccattatgccgttgggtgggttgtttacatcctatatgaagaaatctactagacgttatgtcgcatctcaaacttttactgctgcttttgctcctttgcatggcctagacagatggatgtcttatctagtctgggtcactgtttttgccgccaaatattcagaatcatatttctttttgattttatcattgagagatccaatgagaattttgtctaccacttcaatgagatgtacaggtgaacattggtggggcgacaagatttgtaaaatccaaccaaagattgtgctaggtttgatgattgccacagatttcatccttttcttcttggatacctacttatggtatatcattgtcaataccgttttctctgtcggtaaatctttctatttaggtatttctatcttaacaccatggagaaatatctttacgagattaccaaagagaatttactctaaaattttggctaccagcgatatggaaattaagtacaaaccaaaagttttaatttctcaagtttggaatgctgtcattatttccatgtacagagaacacttgttggcaattgatcatgtacaaaagttattgtatcatcaagttccatctgaaattgaaggtaaaagaactttgagagctccaaccttctttgtttctcaagatgacaacaatttcgaaaccgaatttttccccagagactcagaagctgaacgtcgtatttcatttttcgctcagtctctgtctacaccaattcccgaaccactaccagttgacaacatgccaactttcactgtgttaactcctcactacgccgaaagaattttattgtctttgagagaaattattcgtgaagatgatcaattctccagagtcactctattggaatacttaaaacagttacatcccgttgaatgggagtgctttgtcaaggataccaagattttggctgaggaaactgctgcatatgaaggaaatgaagatgatcccgaaaaagatgacgctttgaaatcccaaatcgatgatttgcccttttactgtattggtttcaaatctgctgcaccagaatatactttgcgtaccagaatttgggcttctttgagatcccaaactttgtaccgtaccgtttccggtttcatgaattactctagagccatcaaattgttataccgtgttgaaaatcctgaaattgttcaaatgtttggtggaaacgctgaaggtttggaaagagaattggaaaaaatggccagaagaaagttcaagtttttggtttctatgcaaagattggctaagttcaaacctcacgaattagaaaatgctgaatttttgttgagagcttacccagatttgcaaattgcttacttggacgaagaacctccattgaatgaaggtgaagaaccaagaatttactcttctctaatcgatggtcactgtgaaattttagacaatggtcgcagacgtcctaagtacagagttcaattatctggtaacccaattcttggtgatggtaagtctgataaccaaaatcatgctttaattttctacagaggtgaatatcttcaattaattgattctaaccaagacaactatttggaggaatgtttgaagatcagatccgttttggctgaatttgaagagttgaatgtcgaacaagttaacccatacgcccctggtttgaagtatcaagaccaatcaaacaatcatcctgttgctatcgtgggtgcaagagaatacattttctctgaaaactctggtgtcttgggtgatgttgctgctggtaaagaacagacttttggtacattatttgctcgtactttatctcaaattggtggtaaattgcattatggtcatcctgatttcatcaatgctacattcatgactacaagaggtggtgtttctaaagcacaaaaaggtttacatttaaatgaagatatttatgctggtatgaatgctttgcttcgtggtggtcgtattaagcattgtgaatattatcaatgtggtaaaggtagagatttgggtttcggtactattttgaatttcaccacaaagattggtgccggtatgggtgaacaaatgttatctcgtgaatactactacttgggtactcaattacctgttgatcgtttcttaacattctattatgcgcatccaggtttccatttgaacaacttgttcattcaattatcgttacagatgtttatgctaactttggtgaacctgcatgctttagcccatgaatccatcctgtgtatctataatagaaacacaccaatcacagatgttttgtatccaatcggatgttataactttcatcctgcaattgattgggtgagacgttatacattatctattttcattgttttctggattgcctttgtccccattgtcgtccaagaactgatcgaacgtggtctgtggaaagccactcaaagatttttccgtcatattctatctttgtcaccaatgttcgaagtgttcgccggtcaaatctattcttctgcactcctaagtgatttagcggttgggggagctcgttacatttcaacaggtcgtggtttcgctacgtcacgtatccctttctccatcctttactcgagattcgctggttcagctatttatatgggctcaagatcaatgttaatgttattatttggtactgttgcgcattggcaagctccattgttgtggttttgggcatctctatcttccttgatttttgcgcctttcgttttcaatccacatcaatttgcttgggaagattttttcttagattacagagatttcatcagatggctatcaagaggtaataataagtatcacaggaactcatggattggttatgtgaggatgtcaaggtcccgtatcactgggttcaaacgtaaaatggttggcgatgaatctgagaagtctgcgggcgatgcaagcagagctcatagaactaatttgatcacggctgagattataccgtgcgcaatttatgcagcaggttgttttatcgcctttacatttattaatgctcaaactggtgtcaaaactacagataatgataaagtgaactccgctttacgtgttatcatttgtactttggctccaatcgtcattgatattgctattcttttcctatgccttggcctttcttgttgttctgggccattattcggtatgtgctgtaagaaaacaggttctgtcatggcaggttttgctcacggtgttgctgttgttgtccacattctcttctttattgtcatgtgggttttggaaggtttcagttttgtcagaatgttgattggtgttgttacatgcatacaatgtcaaagactcattttccactgtatgaccgtattactgttgactcgtgaattcaaaaatgatcacgctaataccgcattttggaccggtaatggtattctactggtttag

SEQ ID NO: 4141 - DNA, 411 bp, Saccharomyces pastorianus
atgcctagtgcacattctcagttcatggggttttgcttcacctacaactctttgaaaatatatacctcatggagaaatttgagcgtctttgaaaaatgcatttttgctagtgggctagctttactgtcattctgcgtctgtttttctagagtttacttacactaccacaatttagaccaggtgattgtgggatttagcgtgggcgcattgaacggttcgctatatttttttatactcggcatcattagggagacgggcttgatcaactggtttttgaagctgcggatcgttaggttattctacatgacagactcgtacaacttggcgcctgtaacattgaaggagaattatgaaatgtactggcaaagaatagaaaaacagtcccccagcggtaaacccaaaaatgattag

SEQ ID NO: 4142 - DNA, 117 bp, Saccharomyces pastorianus
atgaatagtacagccgccgcgataaatcctaacccaaatgtcataccgttcgatgatacctacattctctacgattcgcatatttgctgtcattttaagttgctattcctccgttaa

SEQ ID NO: 4143 - DNA, 84 bp, Saccharomyces pastorianus
atgcgtccagaggaagaagaagaagtgcctatagaagtgcttaaagacatgctctacgatgaactgatgaagaccatggaatag

SEQ ID NO: 4144 - DNA, 114 bp, Saccharomyces pastorianus
atgctgcaattcaatcctgacaagagaataagcgctgcggaagccctgagacatccttacctggcgatgtatcacgattcagcgacgaaccagaataccctccgctcaacttag

SEQ ID NO: 4145 - DNA, 906 bp, Saccharomyces pastorianus
atggccagaaccataacattcgatattccctctcagtacaaactcgtagatttgataggcgagggagcatacggaacagtatgttcggcaattcacaaaccttctggtataaaagtagctatcaagaagatacagccatttagcaagaaacttttcgtaaccaggaccatacgtgagatcaaactgctacggtatttccacgaacacgaaaatataataagtatattagataaagtaagaccagtatccatcgacaagttgaacgctgtctacttagtcgaagaattgatggaaactgacttacaaaaagtgatcagtaaccagaataatggctcctctactttaagtgatgatcacattcaatatttcacttaccagattttgagggcgctcaaatctatccatagtgcacaggttatccatagagatataaagccatcgaacctgttactgaattcaaattgtgacttgaaggtttgcgattttgggctagctcggtgcttagctagtagtagtgattcaagagaaaccttggttgggttcatgacggaatacgtagcgacgcgatggtacagagcaccagaaattatgttaaccttccaagagtatacaactgcgatggatatttggtcatgtgggtgtatactggctgaaatgctttcagggaaacctttgttcccaggcagggactatcaccatcagttatggctaattttggaagtgctaggcaccccgtccttcgaagacttcaaccaaatcaaatccaagagagctaaagaatatatagcaaacttacccatgaggccgcctttaccgtgggagaacgtgtgggcaaaaacggatctaaatcctgatatgatagatttactaaacagatgctgcaattcaatcctgacaagagaataa

SEQ ID NO: 4146 - DNA, 360 bp, Saccharomyces pastorianus
atgttcgtaccaaggctggccggtggttacaacaatgaaggagatttgcatgaaagcttacaacacacaagacaatacgtctggcaagacctgcccgatatttacgatgtcttccacttgtgcaaaatcattgtggatacgctcctgagggtatcggatgccgaagagagatcaatggaaaaatttatgaacatggttgactctgcatggaacaaagacacctctacaaaagattccttttcttaccaaagtaaaattgacctgttctgggaacaatggtcaataaacactgaatcaataccatctaatttccagttaagaaattttgaaaagccctgcttggttcaggacagcaagtag

SEQ ID NO: 4147 - DNA, 738 bp, Saccharomyces pastorianus
atgtatacaaaattaagacctatacaatcaggaacttttagcacggtttacaaagcatggagtaccaagtacaatcgctacgtcgctttaaaaatcactcctaaatacaaaacttcagaaaaaaacatgctaaacgaatacaatgtaatgaagactttaagctctcacagccctcaccccaacatttgttcaatgcttgatttttacactgacgattcgtactacgtcatggttctagagtactgcgagtgcggtgacctttacgactttcttgatattgctaagagtcaaggcaccccttcatctccctctttggtccaaatcgacatgcaaaaaatcatcaggcaattgtattcagcaatacaatttgctcacagcttagggattgcacatagagacatcaaaccggaaaacgttcttttaaccatcaatggtgacgttaaattggccgattggggccatgctatccaagcctccaagtctaatgactaccaaatcggcacagataattatagagcaccagaaaccttttcaaaccgtatcgagacttcttcttttaagaggaagctggaccaatcatccgccccattgtacaacacttacaaggcagactattggtcgctgggtgctactatattctatttgctttttggtgattgtcttttcagagttttgaaaccaaagaagggtcaacatctaaaaaacttacatgaattcgaaaaggatcgacaagcttga

SEQ ID NO: 4148 - DNA, 153 bp, Saccharomyces pastorianus
atgaggtcactattaaaaaagttaagggccattgaaaccttaaaagaaaggcaagctgttggcgataagctagaggatacgcaaatccttaaaattcaaactgaagaaaaagttttgaaagatttggaaaaattaggctggaaagatgaataa

SEQ ID NO: 4149 - DNA, 1398 bp, Saccharomyces pastorianus
atgtcatctcaatttttcctaaagacatcccaagatatagagttgttccaaagctatcctacttttgagcaatccaatacaaattcaaaggacttccctgttatttcctcggttttatcgccatgtggcagatttttggctctatctacgaaggaaaacgtcaaggtcttcacgggtccatgtttagataccgttttattaacgatgaagcttaccgacgtatatgatttgcatttctctcccgctggtaactatttgagtacttgggaaagaacctctgtacaagacccaaatcacaagaacgtaaaagtctggtatttgaataaaccattcaagagtgactctactccagaagacatacatcctgcctatgagtaccaagccaaatctcaaagcggctggtttttgcaattttccaaattagacaactacgcattgaaactttttaaacacgacttgaaaattgtcaagttgggctcaacaaatgccgacagtttcgatttccaatctccatatgctgtgttgtctgatagtaacgaaacttctcaacacttcaccacttatttggtctctccggcagaacatccaacaatttgtactttcactccagaaaaaggtggtaaaccagcccaattgatcatctgggctctttcagaaggtaaaattactaaaaaaattgcatccaagacttttttcaaagccgattcctgccaattgaaatggaacccgttaggtaacgctatcttatgtttggccattactgattttgattcctcaaacaaatcctactatggtgagaatacactatatctactctctttccaaggtgtcaacggtaccttaggaggtaactctgtgcgtgtttccttgaccactggtcctgtccatgatttcacatggtccccaacttcaaggcaatttggtgtcattgctggctatatgccagctaccatttcctttttcgatttaagaggtaacgtcgttcattccttaccaaaacaagccaaaaacacgatgctattttctccttccggtcattatattcttattgccgggtttggtaacctacaaggttccgtagaaattctagatcgtcttgacaagttcaaatgcgtgagtaaattcgatgctacaaacacttctgtatgcaaatggtcgcccggaggagaattcatcatgacagccactacatcaccaagattgagagtggacaatggtgtcaaaatatggcatgtatctggctctttagtatttgttaaagaatttaaggagctattgaaagtggattggagactaccttgtaattataagaccttggaaagtagagatgaagcattgattgaagaccatgtcattagtaactgggaagcgttacctgaatcatcgacatcttactag

SEQ ID NO: 4150 - DNA, 840 bp, Saccharomyces pastorianus
atgaagattggattagaactatccagtcaaagacctaaggttgccattttaagagagcaaggtgtcaacggccaaatggaaatggcatggtgtttccaacaagctggattcaactcagtggatgttactatgacagatctattagaaggtagattccatttggatgactttattggtcttgctgcatgtggtgggttttcatatggtgatgttcttggtgctggtgcaggttgggctaaatctgttttgtatcatgaaggtgtccgttcacaattctctaaattcttcaatgaaagacaagatacatttgcttttggtgcttgtaatggttgtcaatttttgagtaggttaaaagatatcataccgggatgtgaaaactggccaagttttgaaagaaatatcagtgagcaatatgaagctcgtgtatgtatggtgcaaatatctcaagaaaaggataactctagcgaagaatccgttttcttgaacggcatggcgggatctaaattaccaattgctgtcgcacacggtgaaggtaaagccaccttctcgcaaggcggtgaccagttggacaaattcgaaaaagacgggttatgttgcataaggtacgtggacaattacggtaatgttaccgaaaggttcccattcaaccctaacggatctagtaatggtattgctggtatcaagtcgccaaatggtagagttcttgccatgatgcctcaccctgagagagtttgcagattggaggccaactcttggtacccagaaggcaaatatgaagaatggggcggatatggtccatggattagattattcagatctgccagaagatgggttggttaa

SEQ ID NO: 4151 - DNA, 3219 bp, Saccharomyces pastorianus
atgactgattacattttgccaggccctaaggccttatcccagttcagagttgacaacttgatcaaagatataaattcctatacaaacagcacttctgttatcaatgaactacgctcatgttacatccactatgtcaacggcatcgcccaaaatttgtctgaacaagatactaaattgctagaggtcttgttgacttatgattctgctctagacattgccaatgacccattagcaagacaactgaacgatgctgtcgctaacaatctgactagctcggctcttggtgaagacacgtatttgattagagttgttcctagaccaggtaccatttctccttggtcttcaaaggctaccaacattgctcatgtatgtgggttgcaagacagagtagaacgtattgaaagaggtgtagccttattgattaagaccgttccaggtttccctcttttggaaaatttaagtgacgtttcattgaaatgtgtttacgatagaatgacccagcaactgtttttgactgaacctccaaatacaatggacattttcacacatgacgagccaaaaccattggttcatgtcccattaactcccacggacacaaagcagtctccaaaagacattctttctaaagccaatgtaaaactaggtttggctttagattgtggagagatggagtatttgattcatgcctttgttgaaactatgaagagagacccaacggatgttgagctgtttatgtttgctcaagtgaactctgaacattgtcgtcacaaaatcttcaacgccgattggactattgatggattaaaacaacaatttaccttgtttcaaatgattagaaatacccataaattaaacccagaatatacgatcagtgcttattctgataacgcagcagtcttggacagtgagaatgatgcatttttctttgcaccaaattctactacaaaggaatggacctctttaaaggaaaaagtcccattgcttattaaggtggaaacccataatcacccaacagcagtttctcctttccctggtgccgccacaggttccggtggtgaaataagagatgaaggtgctacaggtagaggttctaaaaccaagtgtgggttaagtgggttctccgtaagtgaccttttgataccaggcaatgaacaaccttgggaattgaacattggtaagccttaccatattgcatccgcactagatattatgattgaggccccattaggttccgctgcattcaataacgaatttggtagaccttgtatcaacggttacttcagaaccttaaccactaaggttttgaatcatcaaggaaaggaggaaatcagaggatttcataaaccaattatgcttgctggtgggttaggaacagttagacctcagtttgctttgaaaaatactccaatcaccccaggttcttgtttaattgtccttggtggtcaatctatgttgatcggtctgggtggtggtgctgcttcctctattgcttccggtgaaggatccgctgatttagatttcgcttctgtgcaaagaggaaatccagaaatggagcgccgttgtcaacaagtgattgacgcttgtgtagccctaggcaacaacaatcctatccaatccatccatgatgttggtgctggtggattatccaatgccttgcctgagttagttcacgataatgatctaggtgccaaatttgacattagaaaggttctttcattagaacctggtatgtcaccaatggagatttggtgtaatgaatctcaagaacgttatgttcttggtgtctctcctcaagatttgtcaatttttgaagacatatgtcaaagagaaagagctccatttgctgttgttggtcatgctacagctgaacaaaatcttaccttgttgacacatcctcttttgaaaacaactccaattgatttggaaatgccaattttgtttggtaagcctccaaagatgtcaagagaagccataaccgagccactaagtttgccagaagcaaacctagccgaaattccatctttacaggatgccattgaaagagttttgaacttaccaactgtaggctctaaatcatttttaatcactatcggtgatagatctgttacaggtctaattgatagagatcaatttgtcggcccttggcaagtacctgttgccgatgttggtgtcactggtacatctctgggtgaaacaataatttctagtggtgaagcattggccatgggtgaaaaaccagtcaatgctttaatctcggctgctgcgtccgctaaattgtctgtagcagaatcgttattgaatatttttgcagctgacgtgaaatccctacaacatattaagctatccgctaactggatgtcaccagcctctcatcaaggtgaaggttcaaaattatacgaagccgttcaagcattgggtatggacttatgtcctgcattaggcattgctattcccgttggtaaggattctatgtctatgaaaatgaaatgggatgacaaggaagtcacagcaccattatcattaaacatcactgcatttgctccagtttctaatactagcaaaacatggactccattattggaggaaagcgctaaagattctgtccttgtattggttgatttatccgtcaaacaagaaactaaatcattgggtgcctctgctttgttacaagtttacaatcaagttggtaacaaatcacccactgttcatgataatgttatcttgaagggcttcttgaagagtttgattcaattgcaccaagaaaatgacaacatagtgttggcatatcacgatagatctgatggtggtttacttgtcactttactagaaatggcctttgcctctagatgtggtttggaaatcaacattgatggtgaaaatttggaaagtcaattgaccaacttatttaatgaagaattgggtgcagttttccaagtctctagtaagaacttgagtaagtttgaaaacatcttgaaggataacggagttgcgaaagaatatatttcagtggtaggtaagccatctttccaaagtcaagaaataaagattgttgattctaagggtggcgatgtaatttacaccaacacaagatctgaattagaacaaacttggagcaagacgtcatatgagatgcagaaattgagagacaatccaaagaccgcggaagaagagtttgccacaatcacggatgataaagaccccggttacaatatgctttga

SEQ ID NO: 4152 - DNA, 126 bp, Saccharomyces pastorianus
atggcggatcagctgtcgatcacatgttgcgggcatgtacgccatcaagtcgatggtaggcttccggccgaggtcgtggagctgttgcctcattacaaaccaagagatggtagtcaagttgaataa

SEQ ID NO: 4153 - DNA, 1212 bp, Saccharomyces pastorianus
atgctagagttgccagagaacggtgtcacaggaacgccattcgagggactcaacaacaatagcagcagcagtagcagcagtaataacaataaagacggatccggagggtcgtacttatttctactgaaaaggggtaactacgagctgcctttcaatgccatgctcccaccagaggtgtgcgagactatcgagggacttcaaagcggcagtatcctgtattcattcgaagccgtgatagatggccgccagttgtgggaaagcgacgtgaacacccacacgacgtccagtaatgccaccggcagcgcgagcgcaaacgcaaccggcataagaacgaagaacaaaatcatcgtcaagaagtacaaatacctcagaatccttcgaaccctgtcgatggacaacctggccatgcaagaggaaatcagcgtgggcaacacatggcacgacaaactccagtacgagacatcaatcccgagcagagccgtccccatcggcagcaccacccccgttaagatcaagatcttccccttcgagaagaacatccgcctggacaaaatcgaaatggccctaatccagtactacgcgatgaaagacggcagcgcgcagatctacgacgacgagttggccgtgatgaaaaccacccatctggcagatttcggcccgctgacggacaaacttgacgtggactgtcccttcactatcccggacaacctgaagcagatcactcaggactgctgcgtgcacgacaacctgatccgcgtcatgcacaaactgcaggtgcgtatcctattgcagcgccaagtagacggcgaatacaaaaacttggagatcaaggctcaattgcccgtgttgctgttcatctccccgcacctgcccatgaagggccgcttggttctgttcgacaagcacgatggcaagatccacttccggccgggcgagctagtacccctattcgcagacacctgccccgcgccgggtctgactccgggcccatcattggcctccactgttgccgccacggcgcacctcgtgctaccgccgccgcctaactaccacgaaagcaccagcgaccacctcgtgcccgcgctacagccgctcggcgccggctcggccacgctggtggtgccgtcctacgagcaggcgcaagcgcaggcgtctgcgcccgcctcgtcgcacgcgacagggtccgtgcccgcgtaccgcgatgacgactga

SEQ ID NO: 4154 - DNA, 132 bp, Saccharomyces pastorianus
atgttttcacttagttccttatctaatggtggtgggcattcagagcaaaaagaaaaagagaagataagctatttcgatatacgaataaactccccgtataaggacatagtgttgatccaggatcgccgttag

SEQ ID NO: 4155 - DNA, 1815 bp, Saccharomyces pastorianus
atgcaggtggagaagaagagcattttgaaaggccatcaagccagcatgtctgatcgtgacgtcgactatctgattacagcgctcacttccacgaagaggattcagtatgacgagcgtttgctggacgaattctcggctaatttggtgtactacatccccaggattaaatcacccgatattttgtaccgtttcgtccgagcacttttccaatcacatttcattgttcagttaccaccgctacgtctactacacgtcatcaaggacattttcctatggaaactagaggtttctgaacccaccctccccatcgacaggttctaccaagtttggaatgctgtcatggaaccgcatcgggccgcttggaacctgtcacagttgatgctactgggcggcatactggtcacgtacccgaggttcaaatctttgaacgagaggtacttcatcgacgaatctcggaacaaaacggcggtttactacaaaaactggaaacagaatacattcttacccatttgggcccagttctggaatgatcccgctatcactgccaagcccttgattcagaaatatttgctcgtttcaatggttttgctgttcaatcgcccgaacacgaaacttcctttgtgcggagtcagagtatcatgggatgtagtcactggaaaattactagacctcttggcggagtacacacatgccattgagcagccgatggaaaagttcaccgtcaactctgtcctatcaacgaacctcaaccatttggccaattgcttgagcaccctgttgacgctgtcaaatgaacctgctatactgagttcactgcacaggctgggcaaaatatgtcagtatttgtctgatgccctgaagttgtccagacaagaacaactagatctcaagttgcaggatttattcatcttagtaatccttactttgaaagaaatatctgccatgaacatgaaaatctcatttgctcacaaagacgatttttattccatgatttgcttgagtcttttcaatattcacgttttgactgagaaaatcggtacagctggatttcccagctatcactacgtttacgacaatttgataacatactttattgtattggacgatctacccaaaatcaccccaatcctgaatcgtatgaggggggataacatcaaaaataatccgaataaactaattttttatatcaacttcttgaacaagattaccagttattattcatggcgcgtccatttacccttcattttggaattcatcgagcctctactacatttcaacagcttcctcgagggaggcatgactgaccctttggaaatcgagatcaaggaatctatacacacattggcaatcacttccttaactatagatccctcccattcttcacagattgcacaatggcaagtgtcccgcattattaactatttgaaaatgtccatggaccagtatattgcagaaagattgtcggcccctcagattctcattatatttaacagtctatccatgcaatttccgctattacatagctatgataagcatttactgagggactctttgcacgaaacatacatcaggattctaaatacaaggaaactggagaaaaagaaggtactgatggaatgtttgattgtacaaatactttttgtcaacgatccgcatcatttgatcacttggttaaacatttgcttccatctgatcagtgctcataataaaaaactactcctacaattatgggagatgatttcaagttccgaatcctccttggccatcgactggtggtatgcaacggtaataccgtcgcaatcttctaaattgtag

SEQ ID NO: 4156 - DNA, 939 bp, Saccharomyces pastorianus
atgtttaaaagcgtggtgtggaaacgtttttcatctactagcggaactgcaaggggaaagttagacgaattcttgatataccacaagacagatgccaggttaaagccatttatttaccgtcccaagaatgctcagatcttgctaactaaagatatcagagaccccaagaccaaggaaccattggagccaagaccccccgtaaagccgttatcgagacaaacgttaaatgattttatttattcagttgaacccaattcgacggaattgttggactggtttaaagagtggactggcacctcaattagaaaacgtgctgtttggacctatatctcaccaatccatgttcagaaaatgttaactgcgtctttttttaaaatcggtaaatatgcacatatggtgggactcttatatggtatggaacacaagtttctcaaagcccaaaacccatccgtgtttgacatcgaacatttcttcaatatcaatctcatgtgctccttgcaccgtaataagctaagaaactataaagacgtagacatcgctcaaaagaaactgctcgttgcatggagaaaagtactagatcggaaaaataatacagggctagcaaacacccttgtggcgacattgggcagacaaattggctttactccagaactacctggcttggaacctgtccaaattagcctaccagaaatgcctacttccttaagtagcgccgaaacaaaggaattattagacagattcgaaggagtattcttgattgccagaacactcttagatattgatcaacacaacgctcaatatccggaattacagaagtttataagccaataccagagcgcattgggtgaatctcatgacccttacgacacgtacttgaaatcattggaacacctagaagcgcaagctcctcaagaaattgccgaagaaaaagcagaatag

SEQ ID NO: 4157 - DNA, 153 bp, Saccharomyces pastorianus
atggatttctacgttgtcattaacagaccaggtgccagagtcgccagaagaaagagatgtaagggtaccgttggtaactctcaccaaaccactaaggaagatactgtctcttggttcaagcaaaagtacgacgccgatgtgctcgataaataa

SEQ ID NO: 4158 - DNA, 252 bp, Saccharomyces pastorianus
atgtctgctaaagcccaaaacactatgcgtgatcttaagatcgagaaattggtcttgaacatctccgtcggtgaatctggtgacagattgaccagagcctccaaggttctagagcaattgtctggtcaaactccagttcaatccaaggctagatacaccgtcagaactttcggtatcagaagaaacgaaaagatcgccgttcacgtcactgtcagaggtccaaggctgaagaaatcttggaaagaggtttga

SEQ ID NO: 4159 - DNA, 1683 bp, Saccharomyces pastorianus
atgtttggtaaaaaggaagaaaagcctgagaaagtttacactttgcaaaatgggttcccatactctcatcacccatacgcctcccaatactcaagacccgacggccctatcttgctgcaagacttccatctattggagaatatcgctagctttgacagagaaagagtaccagagcgtgtagtccacgccaaaggtggtggttgtagattagaattcgaattgacggattctttgagcgacattacatacgctgctccttaccaagaagtgggttacaaatgccccggccttgtccgtttctccactgttggtggtgaaagtggtaccccggacactgcaagagacccaagaggtgtttctttcaaattctacactaaatggggcaaccacgactgggtctttaataacacacccgtattctttttaagggatgccatcaagttccctgcattcattcacacccaaaagagagacccccaaagtcacctgaatcaattcgaggacactaccctttactgggattatttgactatgaaccccgagtcgattcaccaaatcacatatatgtttggtgagagaggtactcctgcctcttggtctgacatgaacgcttactccggccactcatatatcatggtcaacaaagaggggaaggacacttatgtacagtttcacgtcctgtcggatactggtttcgaaacattgaccggcgacaaagctgctgaactatctggttctcatccagactataaccaggctaagttgttcacacaaatgcaaaacggtgaaaagccaaaattcacctgttatgtacaaacaatgactcctgaacaagccgccaagttcaaatactcggttaatgacttgaccaagatctggccgcacaaagaattcccattgagaaaattcggtaccatcacgttgactactaacgttgacaactactttcaagaaatcgagcaagtagcattcagtccaaccaacacttgtattccaggtattaaaccttccaatgattcagttctacaggctagactcttctcttacccagacacgcaacgacacagactaggggccaactatcagcaactgcctgtcaacagaccaagaaatcttggatgtccatactctaaggaggactcccaatactctgccgaacagtgtccattcaaggctgctaactttcaaagagacggcccaatgagttactataactttggtcctgaaccaaactatctctccagtttaccaaaccaaactctcaaattcaaaaatgaacaaaacgatgaagtgtctgacgaattcaaaggaatagttctagatgaagttaccaaggcttctttgaaaaaacaagaagaagaccaaatcagaaatgaacatatcgtcgatgctaagatcaatcaatattattacgtctacggtatgagtccccttgacttcgaacaacctagagctttatttgaaaaagtttacgaccctgaacaaaagaagctattcgttcataacgttgtttgccatgcttgtaagattaaagatcctaatgtgaaaaagagagttacccaatactttggtttgttgaacgaggacttgggtaaagtcatcgctgagggcctggaggttgaatgggaacctgtcgaccttcaaggttacgccaagacttggagcattgcaagtgcaaactaa

SEQ ID NO: 4160 - DNA, 2127 bp, Saccharomyces pastorianus
atgtcttctaagatgttcggtagacatgcggaaagtataatttactatttgtctttccatataatcttcttttcatttgctgcaagtctgctttctccacagaggccaatagctgaaaataaatcacccaaaaaaggtataaattctaacaaaacagaagtgaatcgtatacaagggttacaaaggatgagaatttcgtcttcatcttccgcatctggcttggttacaaacagtactgattcaaacattttagaggaccaaactccgatgataccaaatgatccagggggccttaataacgacaaccaatctgcccattcacttcaacaaaataactcgcccctacctccatcatcacatagtaatttattgagccctgcaaattccgatcacaatgaggctgtttctaactttccttatttcacagctatggtaaaagagtataagtcgtttcaaccctcagtgatttctgccgaaagaagcaattctcaagccgttgctacaaccacaacaacaacttctcctacaacattcaatttttctggtgaaagaaatagcttgccaaatgaaattcccttatccaacgcttccaatacaacttccaagaaaaaatccgacccttcttttccaccaaatgacaagtacactaaccaactatttgaactgaacgtcgattttgggaatgtcttttcatcgagcaatttatcgtctgacatatctgttacgacaaatttggagaatttcatccgtcatttatttagaaggaaaaaccagcacataattgcacctctctggtccatggtagttaccttaaaaacaacaaactttgaaaagaaatatttgcaagagacatcaggaaatcctctaacaccgacaaactccaattcttcttacatcgacagtcaagaaaaacacaataagaattcggatacgatcaagacacactcaattccatcaaaaattagttttacacatgcgggcaagtttaagaaaagtgtgtttaacaattttgagccttcaaacacaatggcattaattgctaaaacaacgtctgatgattacaatcaattgaatttggtttccaccaacgagaatattttcaatagaaacgataatgattataaagtttgcattatcgacatcagcacaaattccatcactttccatattgagaatttgcatgatggtgaactcattgttttagtaaacggtgtaatttggtcagaagtctcgtgcgctctgattttagagcatgtgggagaagaatacgttgttgtgaatgggctagttccttcttgttcttacgacatccagttcatcaatagattgaatcaccaagatgattatttggtttctgatttgattgtccgaacatgtgggaatagcaatacagttgctggaaaatttgaaaatcttgattttagcttcccttcatattaccacagaaaattcttatctccactgctaactctaaagcattctgtattaaccacgaacgcaaatttatccgatgaaagagcaaagttgaaaaagacgaaaaaggaaataagtaaaaaattaagtcttttaagacaagaaattgattatttcaaaaacagaatatcacagaacgcaacaaatgatgaaaagagtacttacaaagttgaaaatctaaaagttgctttacaacagagcgaaactgcggtgaataaattagagaagcaacttaagactcttaccgagaaggagcttgacttggaagaggaatacctgaaaaagaaagatttacatttgaaaaatcaattagaatacagcaaattggaagaaagcctatcaaatgagctgaaaaattctgaaaagaagtcaaataagctaaaccaagattttggtcaattgacgtctaaactagataaattaaacgctagaaacgagaagttgaaaaaggaagttgacgaaaacgaggaatacatagagaagttcagtactctgttcatgagtaaaagggaaaaagacagactcagaagaaaagaatacagaatacgtgaagctaataaattcgagttaactataaaagggttagaacaggatattaatcgtttagaacacgagaacgagaatattcatagtctaataggcaatagttactga

SEQ ID NO: 4161 - DNA, 309 bp, Saccharomyces pastorianus
atggagaaacaatctaagaaccataagaaagcactatcaccatcgctgccacccatggacgctgaatcgggtgaacaaccaacagaatttgccaaaaagcataggttcaaagatacgcttgcgttatttttggtatttttgagtttcaaccatttcacttccctatgtttattggtgtctttcatcgtcgccaccaagtgcaaagattttttggcaaattgcttcattgtacttttcctatctaagaaaccttcgcgccatattagtgaagtggcacgtatagatatactacttccaaagggactaata

SEQ ID NO: 4162 - DNA, 1803 bp, Saccharomyces pastorianus
atgaccattccaacttgttccagatcaggtgatatcatcgaacctttattaaacctcaatggtgggttcccaagtgaaatggccaaggaagccatcaaggttgtgaaagatggccaaatcactatcacccctaaatcttctgaagccgaatacttccattggttaggcaacattcaagattggtgtatttccagacaactatggtggggtcaccgttgtccagtttatttcatcaacattgaaggtgaagaacacgaaggaattgacggtaactattgggttgccggtaagaccttggaggaggctgagaaaaaggctactgccaaattccctaatgccaagttcactttggaacaagatgaagatgttttagacacctggttctcatccggtttatggccattctccactttgggctggccagaaaagaccatggacatggagactttctacccattttctatgttagaaaccggttgggacatcctgttcttttgggtttctagaatgatcctgctgggcttgaagttaactggctccattccattcaaggaagtcttctgtcactctttagttcgtgatgctcaaggccgtaagatgtcaaagtctctaggtaacgttgtcgacccattggatgttattaccggtattaagttggaagacttgcatgctaaactattacaaggtaacttagatcctagagaggtcgaaaaagctaaaatcggtcaaaaggaatcctaccctaacggtattcctcaatgtggtacagatgctatgagatttgccttatgtgcttataccactggtggtcgtgatattaacctggatatcttgcgtgttgaaggttacagaaagttctgtaacaagatttatcaagctaccaagtttggtttaatgagattgggtgacgactaccaaccacctgctaacgaaggtttatcaggtaatgaatccttagttgaaaagtggatcttgcataaattgactgaaacctctaaggttgttaatgaagcattggacaggcgtgactttttaacatccaccagcatcatctatgaattttggtatttgatttgtgatgtctacatcgaaaattccaagtacttgattcaagaaggttctgctgttgaacaaaaatcagcaaaagatactttatacatcttactagacaatgctttgaagctgattcatccattcatgccattcatttctgaggaaatgtggcaaagaattccaaagcgttccaccgaaaaggctgccacaattgttaaggctgcttatccagtacatgaatccaaatacgatgacgttaaatctgccgatgcctacgaattggtcttgaacatcaccaaggaagcccgttctttattatctgaatacaatatattgaaaaacggtaaggtttttgttgaatctaatcttaaggaatactttgaaactgccaatgctcaaaaggattccatcgtttctttaattaaggccattgatgaagttaccgttgtccatgagtcttctgaaattccagaaggttgtgtgttgaaatctgttaatccagaagttaatgtacatcttttggtcaagggtcacgttgacattgatgctgaaatcactaaggttcaaaagaaactagaaaaagccaaccagtcccagagcaatattgagcaaactattgacagtaaggtttatgaatcgaaggctaatgaacaagctaaagaggctaacaagaccaaattggataacacagttgccgaaatcgaaggtttggaagccactattacaaacttgaagcgtttgaaattgtag

SEQ ID NO: 4163 - DNA, 1542 bp, Saccharomyces pastorianus
atgaataagtggctaaacgtattacctacaccatttacttctcggtttttgacccctcattataggcgatctttaccactttgtcagaactttctttcaaagaaaccgttaactcataatcaagtcagatttttcaaaatgagcgatcttgataatttacctccagtcgacccaaaaactggtgaggttatcatcaacccagtaaaggaagatggctctccaaagtctctcaaggaaatcgaaaaggagaagaagaaagccgaaaaactgctaaaatttgctgccaagcaggctaagaagaaagctgcctctactactggtgctcctcaaaagaagcctaagaagaagaaggaagttgagccaatcccagaatttgtcgacaagactgtaccaggtgagaaaaaagttttagtttccttggatgatccagctttaaaagcctataacccagccaatgttgaaagttcttggtacgactggtgggtaaaaacaggcgtttttgaacctgagttcaccgccgatggtaaggtcaaaccagaaggtgtattctgtattcccgctcccccaccaaatgttaccggtgctttacatatcggacatgctttaactatcgccattcaagattctttgatcagatacaacaggatgaaaggtaagactgttctgtttttgccaggtttcgaccatgctggtattgctactcaatcggttgttgaaaaacaaatgtgggccaacgaaaaaaagactagacacgattatggtagagaagcctttgttggaaaggtctgggaatggaaagatgagtaccacaacagaattaagaatcaaattcaaaggttgggagcctcttatgactggagccgcgaagctttcactttgagtccagaattgactaaatccgttgaagaggcttttgttagattacacgatgaaggtgttatttatcgtgcctccagattggttaattggtccgttaaattgaataccgccatctctaacttagaagttgaaaacaaagatgttaaatgcagaactttactatctgtcccaggctatgatgaaaaggtcgaatttggtgttctaacctcgttcgcttacccagttgttgattctgatgagaaattaattattgctactactagacctgaaactctattcggtgatactgccgttgcagttcatcccgatgatgatcgttacaagcatttacacggtaagtttattcaacatccattcttgccaagaaaattaccaatcatcactgataaagaagccgttgatatggaattcggtactggtgccgttaagattacaccagctcatgaccaaaacgattacaataccgggaaacgtcataacctagaattcatcaacatttttaccgacgatggtttgctaaatgaagagtgtggtccagaatgggaaggcatgaagagattcgatgcaaggaaggcggttattgaacaattaaaggaaaataactatatgttggccagaagacaacgaaatgaccattccaactgttccagatcgacgccgatt

SEQ ID NO: 4164 - DNA, 672 bp, Saccharomyces pastorianus
atgcatttccaagcagaagtaggtgtcctaggccatgtagatggttcgtctcaatttgtatcacaagatactaagatcgtttgttctgtaacgggccccattgaaccaaaggcaagacaagaactacccacacagctagcattagaagtaatcatacgtcccgcgaagggtgtagctaccaccagagagaaactactcgaagataagctacgtgcggtactgacccctattatcaatcgttattgttatccaagacagctttgtcaaataacttgtcaaatcctggaatccggcgaagacgagtcagaattctcccaaagagagctaagttgttgtataaatgctgcgttcttggctttagtcgatgcgggaatcgctatgaacagcatgtgcgcaagcatacccattgctatcatgaaagactcaaatgaaatcatcgacaatccttccgctgagcaattgaagacatcactgtcagttcatactttagcattagagtttgttgacggtggtaaagtggtaaaaaatgtccttttattggatagtaatggtgatttcaacgaagaccagttgtttaacatactggaacttggtgagcaaaaatgtcaaggacttgttaaaaatctcagaaagataatacaagaccaaatatccccccgtttagtggtatag

SEQ ID NO: 4165 - DNA, 1143 bp, Saccharomyces pastorianus
atgaattgcattcccagtccaatcacagaaagaaaaatccaagttaacgatgagaatcatacaggcaaggaaaatgttcctcagacagtctcaagagaaagttcaataaacctgacaccaaattctacaaatgaaaagaaaattctatccgaggtgaacagcaataaaatcgatgctttacaacttcctcaaagtaagatacgaagaaattctactcatatcgaaaaaactaggaaaagacagttttcagatgattccacagatttgaagactgtaaaaaaaccaaaactcgatcacaggaaaaatttagattcatcagaggtaaatgatccattcatggtagcagaatatacagattctatattttctcacctttacgaaaaagaaactcttatgcttccgacgcataactacttaatggatactgagtctccataccatttgaagagttccatgagggctttattaatcgattggctaattgaggtccatgaaaaatttcaatgcttacctgaaacattgtttctggcaattaacctattggatcgttttctatctcaaaacgttgttaaactgaacaagttacaattattgtgcatcacttgtttatttattgcctgcaaatttgaggaagttaaactaccaaaactggcaaacttcgcatacattactgacggtgccgccaccgttgaagatatcaaaaaggctgaagtatttaccttgacttcattagcttacaatatatctctaccaaatcctttgaatttcataagaagaatttcgaaggccgatagttatgacattgagacaagaaacatggccaaattcatcatggaatattccatatgctgcaataaattcattcatttgaaaccatcatacttagccgccatgtcaatgtatatcgctaagaaaattaaagacgaatcctcccaatgggatcaaactttcattcattacagcggtggtgtcgatgctgaatcagattcagcattcaaacattttgtcaatgaattaatcggggatatcgccgtacccgaaacaaatctagactctctaagactcaaattcaaaaaaccaaaacacggcatggtttatttcaaagtttttgattggtgtaaacaaaagacattaaaacattaa

SEQ ID NO: 4166 - DNA, 1356 bp, Saccharomyces pastorianus
atgagaattcgctttttgacgcttaaatccacgctgggctcaataataagaagccccttgaagggtttccaatttttgacaggagctagctcatcgaacacacagtcagaatcacctgaagcctccattaaatatgccacggagaaacagatattgagaacaccgtctgcaccgacagccatccctctgagggagattatttataaagtgcccggtttgtttcctcgccctctagaagattctgttaaggatttccgagatttcatcaaaaacgaggatagctttcaaactgagctcttggcaacgttgccattttatccaaacccgtcgacagccaagaagtcgaaacttataaagactgctgttgatgatgacggtaattatatcaatgaattttgcatatatcctcagacaccttcagtacctgaagctgatttgaaacacttggtttttattcacgggtacggtgccggattgggtttttttattaagaattttgaagatatccctctattaaataatgaatggtgtgttcatgccattgatttgcccgggtacggcttttcttcaagaccaaaatttccattcaagtatccaagagatgatattcatagcgttcaagattggtttcacgagaggatacacacttggtttaagaaaagaaaccttttagacaaacctgaaaaaaatattgtcatggcccattctttgggatcttatttgatggcattatacttacaaaaatatgaaaagtctccgtctttcaagaaattgattctttgttccccggcaggcgtatctcacagagattttaatagtagtaattcagacgttgagaaatggaaaccccctccttggtggtacgttaagctttgggataagaatatttctccatttacgctagtgagaaactctcgccagttcggttccaaaatcacaagcggatggtcatatcggcgttttaaacatatcttgaacggtgatccggatcaatcaaaacggtttgaagctttgcatagatatgcttattccattttcaacaaacgtggttcagtcgaatacctattaagttttgctctgaagtgtggcggtgaaccaagattatccctggaagagcaattatttaacggcaagaacgcaaatgttttagagaatgcgaagtatgagtggatttggctctatggggatgacgattggatggatgtcaatggtggacttagagtctctaaacttttaaacgataagttgaagcaaaaaagcaatgttatcaccgtccctaatgcagggcatcatttatatttggataaccataaatttttcaacagtatcattatgaaagaaatgcaaaaagtatga

SEQ ID NO: 4167 - DNA, 234 bp, Saccharomyces pastorianus
atgcttgttcctaaatcttcgttttcatcatcatcattgacaatgaagccctcttgcacttttcttgcctcgtcttcatcttcgtcaatgtcttcgtcctcctctgaagagtcgaaaacgtcctcaccttcttcttcatcactaggcgctttagtttcatcgttgtcattcactatttcctcgtcgtccctagggactagctttgaatctcccgtctcttccataaaaggttag

SEQ ID NO: 4168 - DNA, 84 bp, Saccharomyces pastorianus
atgggtaaaggtaagccaagaggtttgaactctgctagaaaattgcgtgtccacagaagaaacaagtatgttatttttaattga

SEQ ID NO: 4169 - DNA, 825 bp, Saccharomyces pastorianus
atggtgaaacgtaacgacattgatgggaatattagtgtccccgccttccagtatgacgagattatcagaaaaatttctgctctcaaaatcaatgatgtcgcttcatttgatgacatcttttttaaagatctgaacgtaaaggaggagcattacactgaaaaggatagatttatttctgattctgaatttctgaataaaattttagacttaattttcgagaaattcaatggaaatgattatccaaaggctctaacatttttacttacccatccgctgtttccattgaaccgtacacataacttgctatcccgtttaagagaccaaccaaggctgttcaaacaggcgatcgtaacatgtccaaatctaccattaaatgaattacttgaggaattattttccataagaaacaaagaattattactggatatctcatttagaatacttcaagatttcacaagggattcaatcaaacaagaaatgaaaaatttaagcaaactagatatccaaaactttatcgacttcgtaacaaatactgatgaagatagctcactagaaaatctcaaccacagtcaaagctctcagttatttcaacttttgtcactagttctggattccattgggctattttcattagaaggtaccctcttggataatctagcatcgtatatcgataagcaagtggaaattgctgaaagaaacacagaattatggaatctggttgaaacaaggggttctcaacatgggtttactaatatgaactctgatagtacaacttctcaaaaacaagccttgccaacttacactatggaatatttggacatttga

SEQ ID NO: 4170 - DNA, 1053 bp, Saccharomyces pastorianus
atgccctctttgtcccaaccattcaggctagcaacccttccgaaaattgcctctctgagcaatttctctttgcaagcggattatgttcaagttgcagacggccctttcaatgaattcacaaacaacataacattaggtatatccggatcatccatatctcagtatattatcaatcctacaccaaagcttacatttgactacccaataccttctacaaacattatcactgcatgcaatgctgtaaaaggccaagttgaaattgaaaatgataccaaaattagcaacaacgacaaaaacgaagttgccgactttcaatcaaagagagatgttgaaatctggtcttttgggctaatggtaaataaaggtaattacacattgaatgtcatcactaaagcggtagaggataatgatatctccgctgagcacttgactgaggatggcactgacaagaaagcttatacagatacggacgacctcttatctcagtataagattaaaacgaaagataaggttatgaacattaaaatcgatgctaaaaatagcttaatcattgccgtgttacagaatgggctagttgaattttatgatttcaaactaaagcttttatactcttttgacatctcatacggtaacttgaaatatgccaaatggttcactgaaaatggcacggaatttgtgttcgttctgtgtccattagaggatgataaagtctgttataaattattcgaactatcagattttgaaaacaaagaaagttcacccattaaagagctatcatctacaattattgagggattttcttttgaaaattctaaattctgttaccagttcggtaagctttacaaattgaatcaaggtaaaatattcgtttactccctaccacattgccagttacaacagattattgatgtcccattaatcaataaacccactaccgaagatgatttgatttcttttcagcctgtttcggtaaacaggattttattgaccgtgaataacatcgtctacttgcttgacttattacactgctctattctataccagagagaataa

SEQ ID NO: 4171 - DNA, 315 bp, Saccharomyces pastorianus
atgttcgtcctggattttttaaattttctatttacatttatagcaggtactgctttggccgtaggcattagatgtcattcgtgcagtaataaaacttacctggataagaataagatcacacagggctcaggttcaaggtgccatcaagcaaaagctgctgtggcatttttctacttttcctgtcttttgtttctgatcaaagtggtggtatctatggccgctatgattcaaaacggtggatttggctttggtagcagcttcggcagaaaaagagcaagaagacaaatgggagttcccacaatttctcaggtctag

SEQ ID NO: 4172 - DNA, 195 bp, Saccharomyces pastorianus
atgctatctgttgcagacaacttagtgcgcatcattaacgctgttttcctgatcatatcaataggtctgatcagtggcttgataagcacgcagaccaagcacagttccagagtgaacttttgcatgtttgccgcggcttacggtctacttactgattcattttacgtttcttcgctaatttttggtcatctttaa

SEQ ID NO: 4173 - DNA, 315 bp, Saccharomyces pastorianus
atgctgatagacgtccctaattcttacccaatggcaccgccgaagataatgtttgagcgggacgctatactgcactgtaacgtcaagtcagccacgggcgaaatatgtcttgatatcctcaagctgcaagactggacgccggtatgggatattttacattgtgtacatgccgtttggaggcttttaagggaacccgtttgtgagtcaccgctggacgtggatatgggcaatataatacgctgtggcgatacaagagcataccatgggattgtaaagtacttcctagcagaaagagaacgcaataaccagaattaa

SEQ ID NO: 4174 - DNA, 906 bp, Saccharomyces pastorianus
atgctatacgttaatcatgacgttgcttggcggctaatggacgaaatgttgatgtgtaccggttataggaggatattaatatggtttcttactcatttagagctaaagcactcattgatatactatgtgtttgagctgataatggggttgcgtgggagcccattttccggggaagccagtgatcaagatagaaaagatgatatgatatacgagatcttaaagaaaaagcagaagaacgagaatacctccggtcttccattttcaagacaaggaccgattgtgctgtctgatattgaaaccaaaatgctattacaagagttttttatgaacgcagccattttcctatcatcaaaaaacaccgaagaggagagtgaagacggtgataaggtttctctatactccctgggtttagttaagctaatttgctacatggtgcagacactcattgcgaacgacaagttttttttcaccaagtctgaatgcacttttgagcttcaaactttactgatgacatggattggtatcctgcccgaagctaaagatttgttctttcagatcaaatcaaggctggccatggaagaagatgacaatgctgatgttaccgttcaacataaagataagaaagaccttgactcaaagaagtcaaacacaaagtcaatttctaaactgaacatgaaaatattgagcctatttccttctaaccttactgacaaagacgataattccgctatcagtacattgcgtagcttcataactgattactctttcgacacgcaggtggtggctccggggcgaagagtggtgtttcatgacgataaaattttaccgttaccaaaggctgacaagccgatcccacttcacgaatatataacgctcgctgagctcgacatgggggatagcgagtga

SEQ ID NO: 4175 - DNA, 1860 bp, Saccharomyces pastorianus
atgatgaacaaaaagaaaagcgccagtaatgatgttgaaaagcagaccctagccagtggcgttgacgatccactgggagatgcgcatcattatgcacaattcgtttcattgcaggaattgctaaaagacaaacattataccccatcggtagaaaatttagaaaaactactgtatgatgaaaccatattgaacgatcaagaaataaggtttccactattgtttgaggccctttcggttaccttatttactacgaaagcggggaaatcggctctacagatgatgaaagcttctactttaaaggaaagaaaagcctgggaaaagtcatttgaaaaccacgattcgaattacgcctcaataatactaagttggaaaaaggatgatgtccttttcttaaaatttttgaaatttatactggcaaacaagacgacgcctttacaaattgacagatacaaccttccgaaatataaactcccgctaagctttttgattgtttctaaggttaatctaccctccataatactcaatgaaaagtataacatgttaaaagactatttgtacgctataagtggacgtatagaaggttttataacgtgcaattccacgtttgatcaatctgcacgtatattcaagagaactttgcaagagtatgataggatgatagaattccgtaattttttttggtattcctttaatgcggagaaaactataacttctaaactcaataataatatcaatctattgatggacagccatgaggataatcctgatggtactggtatcgttgatgacgctggtaagagtaataaccatcagaaacagccgaaagacacaataatacatcgaaccgttaatgatcaagagcaaatatattcatttgaactaaaccaagatggaacgctccaaatacctaatgttatggagcattctctactgagacacgaacttcttttcaaaatcttgaatcttaccccagtaatgacaccgctgttggaacaacaatttactacattatgtggcctagtggatccgttgacacaacctaccccaaatgacaaacacgttatatctatagacttcctttatcagctctttctgggtttaatgtatccatcaattgaaacctcccaggaacacaataaccattatgattggaaattctatacgtgttttaacatgcagaaaattatagatgctaccatgttgaggctaaattgctttggttttgaaaaattaaactcaataaacaatacagatgacacagttcattggaggacacaactgcatatatggttaccgcacggtttaaacactcaggatttagaattactttacatgattgatatattggcagtatataccatctacaagttatatgaagaggtgcccatacaactgaatccatttctgttttccttgttatcattatggaaaaacttatcgtgtgttatacttctggctttggaaatcgatagaatagaagaagagaaaggtacctacgaaacgccgcttatggttcgtgccacaattcgtggagctgctgcattaagatctgtgatagctactgtactcaatggactagtgaaaagtaatgatcatgatttcaaacacgagtcattaaatacattcatgtcaccctatggaagaaagttatgtcacggcgcattatatgccgacttgagatcgcacactgcatctttacttgccctaggagcaaatatcgaggacgttactgatttgtttgctgatttgcaatcgggtgatagatttgacgaggatatcaggtatatgtttgattacgaatgtgaagattatatgaatccttttctgacagcggtgacgaagagctggaagaaggtgtga

SEQ ID NO: 4176 - DNA, 156 bp, Saccharomyces pastorianus
atgtaccacaaattgaacttacactggggttcttggttgttggctttcatctctactgctatgattgctctaccttttgcattctcttactggggtaaggaattgagacataaactgtccaagaaggactactctatcgatagtgtcgatatgtaa

SEQ ID NO: 4177 - DNA, 1608 bp, Saccharomyces pastorianus
atgagtgatcaagaatctgttgtttcattcaactcccaaaacacttccatggtggacgttgaagaccaacaaccccaacaatacgtccccgcaaaaaccagttctcgtacaaaccaattgaagttaaccaagactgaaacagtaaagtctttacaagatttaggtgtcacttcggctgccccggtgcctgacatcaatgctcctcaaactgctaaaaataacattttcccagaagaatatactatggaaactccatctggactggttccagtagccaccttgcaatccatgggtagaaccgccactgctttatctcgtaccagaacgagacaattgaaccgtaccggtaccaattcttcatccaccggtaaagaagaaatggaggaagaagaaatcgaagaaggtgaagatcagagcgccgaaaacgaattggacccagaaatcgaattcgtcacttttgtcactggtgatcctgaaaacccccacaactggcccggatggatccgttggacctataccgtgctgctatccatcctggttatttgcgttgcctacgggtccgcttgtatcagtggtgggctgggaaccgtcgagaagaaataccacgtcggtttggaagccgctattttatcgtgttccttaatggtcatcgggttctccttgggtcctttgatctggtctccagtcagtgacttgtacggtagaagagtcgcttacttcgtgtctatgggtctttatgttattttcaacattccttgcgcattggccccaaatctaggttgtcttttggcctgtaggtttttatgtggtgtctggtcctcctccggcctatgtctcgttggtgggtccatcgccgatatgttccctagtgaaactagaggtaaagccatcgctttctttgcctttgctccttatgttggtcccgttgttggcccattagtcaatggtttcatttctgtttccaccggccgtatggacctgatcttctgggtcaacatggccttcgcaggtgttatgtggatcgtggcctctgctattccagaaacatacgctccagtcatcttgaaaagaaaggccgccagattaagaaaggagaccggtaaccctaagatcatgactgaacaagaagcccaaggtgttagtatgagcgaaatgatgagagcttgtttgttaagacctctatactttgctgtcaccgaacctgtcttggttgccacttgcttttacgtgtgtttgatttactctctattatatgcgttcttcttcgccttccccgtcattttcggtgaattgtatggttacaaggataacattgttggactgatgtttattccaattgttatcggtgctctctgggccctagccaccaccttttactgtgaaaacaagtatctagcaatcgtcaaacaacgtaaacctacacccgaagatcgtctgttgggtgccaagatcggtgctccattcgctgctattgccctttggattttaggtgccacctcttacaaacatattatttgggtcgggccagcttctgccggtttagcttttggttatggtatggtgttgatttactattcgctaaacaactatatcattgattgtacgtcc

SEQ ID NO: 4178 - DNA, 2802 bp, Saccharomyces pastorianus
atgtcttcgaaggataagttccaagagttggtggactcattgaaaccaagaacagctcaccaatacaaaacctactatacaaaatacatacaatggtgccagcttaaccagattataccgacaccggaagatgattctacaaatagcgtcccttataaagacctacccatatccgcagaactcatacattggttcctactggacacgttgataacggatgataagtttgaagagaagcaagaagatgaagagtttgatgatgaggaagaaaattcgttcaaaatcgctactttaaagaaaatcattggaagtttaaacttcctttctaaattatgtaaagtgcataacaatccaaatgctaatatagacaccaaatatctggaactagtcacaaagctgcacacacactggctagattctcagaaggcaataaccgctaacgaaacaaataatactaacactcaggtgttatgcccacccttactaaaagtctctctgaatttatggaatccacaaactaatcatcttcctgaaaaattctttaaaacttgctccgaaaaattaaggtttctggtagatttccaatttagaagctacttgaatctatcgtttgaggaaaggtctgaaatacgatttggttccctcaaggtcggccgaacaggcaaagactctatagtataccataagactattcacacaaaggaaaacaaagacatgtcgagtcatcatcaactcgtagcactgttaccacaggattgtccctttatttgtcctcaaactacactggcagcatacctgtatctgagattttatggtataccatctgtttcaaaaggtgatggctttcccaacttgaacgctgatgaagatggctcgcttttacaagacttgcccatactaagaggcaagtcattgaccacttacccaagagaagagacttttagtaactactataccaccgtatttaggtattgtcacttaccttataaacggagagaatactttaagaaatctaacctggtttacccaacctgggacgaaaccgtttttcaaaatttctttgatgaaaaagcccatggaaattggttagaacaacctgaggctttcgcattcccagatagaattccattcgattttaaaagagtcatgaatttcaaatcgccttacacttcatattctaaaaccggtgataaggacccactatcgcctccaaaggatttgctagttcagatctttcctgaaattgacgaatataaaagacacggctacaatgatttgtcccaggatgcaaaggagtttctaggattaatggagaaactgcgagaaagactactgagcaacttgccatggattttcaaatacttcccgaaccatgatatatttcaggatccaatttttgggaattccgattttcaatcttactttaatgataaaacaatacattcaaatggtctcaacactttaccattcgatatattgccgggcttcaataagatttataaaaatgaatcgaatttttgcaacctcttaattgaaccaccttcgcagttgtctttgtcaacgactagtaatccagactcgcgtgtcccccaaagagcagaatcagaaggtccatctcaaatggcacaaattgatactgctcacatgagcgaattattaaaggaacaaagtttcgagtttgttcaatttcaaacactgtctaacttccagatcttattatcggtgtttaataaaatttttgaaaaattagaaatgaaaaaatcttcaagaggttatattctacatcaactcaacctattcaaagacaccttaaatgataggatcaagaaatctaaaatcagtgattctgataaatacatccgcgatatccagcctataaagaaggaggaaattactataaatggggatggaccaaataatgtacgccgggcaaagaggccaaaaccaatcaggttactttcaatcgcggattcctcagacgattcctcagcagagagttcgaatctattcaaaagggacgaagaagctaatggtgacgacgatgccgatgaagaaaatgaagatgaagatgaaaatgatcctgaaatgcaggaacaattgaaatctatgataaatgaactcatcaactcaaagataaccacttttctacaggatcaaatggaacaattcgagctgaagttaaacgcttcactagataaagttctcgaagaaaaagttgctcgtatcattgaacaaaaatttaatacatatgctacgccactttcgactttgaagagatcgcaatctcatatgacagaagatgtcgcatttgatatcgatatctcgaagaagcctaggttcagtggtaaatacgcggagcctgtagaagataaggatgaccgtcaacccatctccagtacggtatcaccagcgctcgaacaagacctgcgagaaaacaaggatgctgatgaacagcctttcatgctggacaattctatagatacaatagaaggaataattcttgaatggttcactccaacccccaagtacggcaatcaatgcgttcactcaatgaacaaatctggcaataagtcttggagggttaattgtgaagcattatacaaggaaaggaaatcaatagttgagttttatattcacttggtcaaccatgaaaaccttgacagatacaaagcggtagacatttgtgagaaaatacgggatcaaaacgaaggttcgttttcccgcttagcgaagttcctaaagaagtggagacacgaacatcacaattcatatgatggactgttggtctatttatctagttga

SEQ ID NO: 4179 - DNA, 402 bp, Saccharomyces pastorianus
atgcaagaagagagtaggcaagcaaaaagggaaaaattagcaaaggaaaatcaagaaaggcaaaaaaaagaaaaacaagctaaactaaaagccaagaaggaatctttaatgaaaaagcaaaaagctaggagagcggagcaaaaaaaagaacaggaatccaacaaaccaaaaacttcaaagaacgaagtaaggcacaacattagcaatgttgatgtcactggaagcgacaatgaaagtataaacagtggatctgaaataaattcagattcctcaataacaagcaacgttttaaaaaaacatatttcacctgtattagaagacgttgaagatgaagaggttgataggtacaatgagctgttaactagatcgcccaggggcaattctattatcgaagacatatga

SEQ ID NO: 4180 - DNA, 804 bp, Saccharomyces pastorianus
atgttttccgtatttaactcaccatgcgttttcgagcaattaccaactttcagccagtccgctcacaattttgaatacgactctccaatgaactatcaaccagaatgtaaaagaagaagggccgtaagagcaaataaaggagcaccagaaagaagaagtaaagctcaatctccaattttaaagtatacactttcggaaacgccaaccggatataatctaagcttgtataagcatatttcatattcacttttttcaaagtacgttaatgagaaactgggtgaattaaaggagagtcgctacagaccaacttaccacgtcgttgaagatttttttggaaaccaatactatgttgaggatgagtttgatgaaaatgccttactaagatctgcattagaggatctagacttcaaagctattggaaagaaaattgccaaagacctatttcaagattacgaaatagaattgaatcatagaggtgatgaattgagcatattgagtaagaaggataacatatccaaagatttctgtttggatgaagtttttgaggatgtttttgttattggctgtggcgtcgaaaatatagatgatgactccagtgacaaatatgctcttttaaagattggtttggttaagcatgaaagaaaaaatgtattattgaactctcagcaaccaaagatggtgcaaaatgaagtacctcaagaacagcctcaagaagaagttgaaccattctatccctctctccaaaaagaggacgaggaaaaggaagaaatggtagatcatcaccaaccaaagatgaacaaataa

SEQ ID NO: 4181 - DNA, 633 bp, Saccharomyces pastorianus
atggttatgagaaaaccagctcatttgtttttacaagaattagaaattccttatgaagacgaaggtgactatgttgttgttaaacatgctgctttattcatctccactgtcctttcaaaggttttgcaactaccaaatgtcaaactattcaacgccacctgtgttgaagatttagttaccagaccacctactgaaaagggtgaagtcaccgttgctggtgttgtcacaaactggacattagtcaccatggctcatggtactcaatgttgcatggaccctaacgtcattgaattggccggttacaaaaatgacggtacccgtgatttgagccagaagcacggtgttattttgtctaccactggtcacgatggtccattcggtgcattctgtgccaagagaattgttgacattgaccaaaacaaaaagttgggtggtatgaagggtttggacatgaaccacgccgaacacgacgtcgttatccactctggttcttacgaaggtgttgacaacatgtacttcgccggtatggaagttgccgaattagatggtttgaaccgtatgggtccaactttcggagctatggctttgagtggtgtccacgccgccgaagaaatcttgaagcattttgcttaa

SEQ ID NO: 4182 - DNA, 267 bp, Saccharomyces pastorianus
atgtctgctacttctaccactacttccacttctcaattgcacttgaactctaccccagttactcattgcttatctgatattgttaagaatgaagattggtctgatttcaagtttgctcctatccgtgagtctaccgtctcccgtgccatgacttctcgttatttcaaggaccttgacaagtttgccgtctctgatgttattattgtcggtgctggttcttccggtttatctgctgcttacgtcattgctaagaacagaccagactga

SEQ ID NO: 4183 - DNA, 906 bp, Saccharomyces pastorianus
atgggtaggttcccagaatggtttcacatttattataccatgcttttttttgtcctaatgcccattcgattttacacatattataaaaccaaaaatcattactttttggctgacttttgttattttgtgaatattttatgcctattgttcatttggattttcccacattcttctagtcttttccaatcgtgttttgcattcacttttggaacgttatgttttgctgttatcacttggagaaattctctagtaatacattcaattgataaaactacctcatgtttcatccacatcatacctccttgtgtcatgtatgttatctatcatggattgccgcttgactacaagtttgatagattcccaggggcaatcattcaaagttcattggatatcaaaaagaacattctttggacatccctttactacttgatttggcaatgcctataccattacttcattactttgaaaaagtccaacaaaatcaagtccggtgaaagaatgacaagttttgagtacttaaccactcaccagttcaaaaacttctgggcagttaaattgagatcaccttggccgatggtgatttatacactctctcaatacttctaccagttatttaccatgttattatgtggtatatggattcgttacaagctagctgcagctctatttttaatcattgtattcctttgggcagcccataatggggctacctattatattgatcattacgggaaaaatttcgagaaggaagttgataggctacgtcttgaagtcgaaaatttacagcaaaagttacaacctgattcggatgcggtttctgatgcatctgtgaatgacaaagactttttaactgtcgatcataatgaagaagacgattcatcgagtacgtcctcaaaaagtaattaa

SEQ ID NO: 4184 - DNA, 165 bp, Saccharomyces pastorianus
atgaaaaaattagacaatgatgagatggaggatgaaacaaataattctgtctcactaacgagtcttttagaatttctcgatccgatagcgtcaaaagtcgtttccaaatattaccatggctcgatctttcagagcagaacagaaagtgagaatttgaagttttag

SEQ ID NO: 4185 - DNA, 990 bp, Saccharomyces pastorianus
atgacaaattttgctgtaccaaatataatcttagctgttttgtggactttaacaaacttcattcttgtcaagttcattgaaactcctcatgtcaataaaatttacggtgagactaaacgcgttagtggtgttggaaaaactctgttgggcttgaagcctttgaaacaagtttcagatattgtccatagaatcgaaaatatcatcgttaaatctctaatcgacgaaagcaaaaagcccaatagtgaggcagaactcttacctaaaaactatcgagaaaataaggattggagcgccttgatccaagacgcaatggacagcgttgcgacaaggttgagtccgtactgtgaattgaacattgaaaatgaagtcaccgaaaataattttgtgtcgcctgaaccaataactttaaactggaaactgcctatcgaactttataatgaagacgattggatcgggctgtataaagtcatcgatacaagggctgaccgtgaaaaaacaaaagttggttcaggtggtcactggagtgcgactttcaaaacctcatacatgaaccacggcttgagacataaagaatctatcacagatttcaaggtaaatgaaaagtacgttcaaggcaaaataacatttgatacatctttactgttctttgaaaatggtatctacgaatttaggtatcactccggaaactcccataaggttctattgatttctacaccatttgaaatctcgttgccggtattgaacactgaaacgtgtgaactttttgaaaaggacttaactgagtttttgaccaaagtaaatgttttgaaggacggtaaattttatcctctaggcaataagttcttcggaatggactgcttgaaacagttgataaaaatctcgattggcgttgagctttctactgaatatataaagagagtgaacggtgatgctaacgttatctcgcatagggtctggagtataaagcaaacgcttgatagtcttgcatga

SEQ ID NO: 4186 - DNA, 1419 bp, Saccharomyces pastorianus
atgtccaactgtaatattaccgtgtctgagatggttgatcctgtggcaaaagacaagggatctggttacagtaaggctaaaacgcggtcgagtaatgtaacattcagaccgcctgtgacccacgatatggtgcgttcgctttttgatccaactttaaagaaatctttactggagaaatgtattgcactcgccattctatcaaatttttttatttgttactggtcttatcagagatttggcatccagtttacaaagtatttttttcttttgcaatatatgttctggagaatagcctataatctgggtattggtcttgtgctacattaccagtcccattatgaaactttaacaaacactgctaaaacccatgcgatttttagtaaggagacgccgcagacacaacatggcagttcaggtttctcaacaaactctaatgcgttctcagaaaagttctggaattttatcagaaaattctctcagtatgagatcaggtcaaaaatgccaaaagaatatgatttattcgcttatccagaagaaatcaacgtttggttgattttccgtcaatttgttgatttgatcttgatgcaagattttgtaacttacatcacttacgtttacctttccatcccatacaactgggttcaaatctgcaattggagatctctatttggtgtcattttgatcctatttaatatttgggtcaaattggatgcgcatcgtgttgttaaggattatgcttggtactggggtgatttcttcttcttagaagaatcagaattaatttttgacggtgttttcaatatctcccctcatccaatgtattccattggttatttgggttactatggtctatcgttgatttgcaatgactacagagttcttttggtgtccgtatttggccattattcacaatttctatttttgaagtacgtagagaatcctcacatagaaagaacctatggcgatgactttggttccgaatctcaagtaaacggtagaattgatgatttggtttcaaaggagaattacgactactcaagaccactaatcaacatgggattttcgtttaacaattttaacaagctaagatttaccgactatttcactattggtactgtagtggcgctcaccttgggagcaatcctaaatgtaaattccattaatttgaattatttgttcattaccgtttttataataaaatcggtttcctggctatttatctccactatactgtataaaaaatctaagaccaaatggtttacaagattgtttttagaaaacgggtacactcaagtgcattcgtatgaacaatggcaattcatttacaattattatttggtgttaacatacacactgatgacaattcaaactgggcttcaaatgtggagtactactcgagcagacctgcagcagcagctg

SEQ ID NO: 4187 - DNA, 651 bp, Saccharomyces pastorianus
atgccaatttcctcggcatcttctcagtactctagcaccaacaacatcatcaatcataacacctacttgaatggcaccaacaatatcaatagcggtagcttgatgaacaatttgagaataggcgggatttcttcatcaagattcagtcttggagccatctcgactacgtccctagtgaacaataaattaaacaatgtaaaatttaagtttgttaataacaacatcaaggttattaagggtgaaaaattcactatgaggcttcagatcataaattcatcaccatcgccgctggatcttgttgtatactataacaatacaataaacccgatcacatcagcgaatattgtacgcaacaataccggtatcaacatctacggtatgcataatggaggcatctccaatccgtcattaacattagaaaagcaatgccaattgtataaaaaacacagcaagattgcagagggcattatactgctatcaaacgattataaagttccagtggtgcccccgagtgaaacatattttgtagatttacgatttattggaattatgtccggatattatgccactctttctgggctcaaagtattggacttgaacacgaacgaacttattgaagtcggaattggtgcatctgtgctcgtccaatag

SEQ ID NO: 4188 - DNA, 810 bp, Saccharomyces pastorianus
atggaatgttttataccgctgcatagcgaccttaatggaaatgatatagaacaattacgtcagtcacatacgtcccgtaaattcattatattcgacgagcaattgaatctttggctacggtttcaggatgatacacagacaaacaagagattcgaactgcagaatatgataatatctataaatgaagctcaagtaacaagtacgactgatattgacgatttttttactcaggttggcgagaagctctggaaattgaaagatgaccgctgctcaaaagctctcttcaaatcgaatgtggttatgaataacggatataataatcagattaaatttttgtttgagtataagtcagtggatgcagatctcagcaatcgcgactcctcaccagtttcagacggtagcattgcgatggggaaaaaacgtggcgaagaaattttgtcaagttttgaaccagtttattcttggtcatcgacggccattacatcaaccagtatttccaaggtgcataagcaaaacaatactaaaacagcccatctagatacttctagaaatggcgaaactcttcaagcgaaccaagatatgtttagtttaaagctacagtatccaatatattcgcttttaaatatgagactgagaaacacatctttgaaatccgaacattgcatactatcatcgttagattttcaaacttctaaagcatccgagcaactaacgaagagattcatttatccccaagagcacaattcacttctcaaactaaattttcatgaaatatcgtacaaactgattgatggaacatcacaaaattaa

SEQ ID NO: 4189 - DNA, 483 bp, Saccharomyces pastorianus
ggcaatcggcgtcgatcaaacggcagtactgttgcacctactagtaacgataatggcgatgagagcgacgatttctcggaattcgaaagcgtgccagccaaccagagtacagaatccaccaaagaggaccgttctgaagttgtagatcaatggaaccaacgtcgtgctacggaaatccatcaaaaggacgtaaaggacgaagaatctaagaaggaattacaagacgaagccgttaaacatgttgacaaattttacgattcatacaacaaaaagaaggaacaacaattagaagatgcttcaaaggatgccgaagctttcttgaaaaaaagagatgaattttttggccaagacaatacaacttgggatcgtgtactacaattaatcaatcaagacgatgcagatgtcattggaagtagagacagatccaagtttaaagaaatccttttgagattgaagggtaattccaaggctcctggtgcttaa

SEQ ID NO: 4190 - DNA, 270 bp, Saccharomyces pastorianus
atgtccgaaaaatttcctcctctagaagatgaaaatgtggatttcacagccaatgataaaaaggaagacgataccagttttttgagaagagaagctgaaatagtcggagacgagttcaggactgaacaagacgacgaaatattggaaaacgaagcttctcctgcggatgacgaaattaaagattttgaagaacaattccctgatatcaactctggcaatggtgaaatcccaacgacaaaacggcggactgttgccctactattacgataa

SEQ ID NO: 4191 - DNA, 912 bp, Saccharomyces pastorianus
atgccatggctaagagaatcaactatattagtcttgttgaacatattatatcctgctttaaaaaaacttccgattttgggaaatgattacgttcactggacttctatggtcggaatatcattgatgctcactaagggtgaagtgccgtcatggatttttgctcacttgcttattgaggtattgcattctaaatcaaaggattcagaaattatacgatggttaaaaagaaaattttcccagggcacatggacaaaatttaaacaagtctttgtttgttctatgatggtagtattattcaaaaaattggataggaattcgttatcgtttcgtgcacttttcgactacaggccatttttaacggatttcgtaacaattaatggcatttcctcacttttatcgatatatcgaagagtattaaaatccgcttttacatcaagcacaaaagcgaataagagtggctccaaccatgacattaggaacttctcgcaatcactcggtgtcaaaaatcatgatgattggcccatatcctcatcaaatttaaagcatgtaatggatagactaaatgaaatatacgaaattacaaccgaggacaattatgcaagcttaagcgaaaagataataaattcgtgttttgtgaagggtatcattccaagtttaagatgggctataataaggcagtgcatcgagtacttattcgcggccaaaagacgtatgttgatgaataacaagttgcggtggattgtgatgcttctcacatttactttgatagacccgaagaacaaaatggtaattagcccactctttgtgaaattgcttgctaaaaccttagtcaatgtctatttaaaaaaatattggcatcacaatttccaaaagtatatattatttttcatgtttcaatttagtattacgtga

SEQ ID NO: 4192 - DNA, 144 bp, Saccharomyces pastorianus
atgaagcgcaaccgttcaaatgataatggtaaggctgattccgtattcaaacagatactactacagctttcatctcttgtgaaccggaaaagaagaaaacaattgatcataatattaaaagaatactgcaagtctatggcataa

SEQ ID NO: 4193 - DNA, 1707 bp, Saccharomyces pastorianus
atgcaatacaggacagcgattcaccgcttgtattcgaaagcctcccatataacgacgccgattttctatcccaatgctaaaccgcacattggtcatctttactccagtttgttatgcgatgttcaccaccgatggcaactgttaaaggaaaaccaatctttcttcacgacaggtaccgatgaacatggactgaagattcaattggctagtgaaagtaatgggtttgatcagccaaaaaagtttgttgataagctatacatggatttcgttcatttagacaaaatatttgacatcaattacactagattcataagaacaacagatcctgaccacattgagaatgtcaaagaactatggcagctgtgtttgaaaaacgggttcatttataaaggcgaacataaaggttggtattcaatatctgacgaaactttttacccagaatccaaggttgttaaagatcctagtcatgacgggaaatatctgaatactgaatctaataatgaagtaatctatcagtcggaaacaaactactttttcaggctatccctgtttagggagagattgattagccatataaaacaacatccccatttcatctttcccgtcactaaaagagaacaaattctccaagaactagaaactactgaaaatttattagatttgtcgatatcaagaccctctacaaggctcaagtggggcatatcgactcccaatgatccgtcacaaaaagtttacgtatggtttgatgccttgtgtaattatctttcctctattggtggtatatcatctattttaaataacactgcggaggttgtttcgaagcattataatgctggatccaatgttgaaatgcaattgacaataccacacccaaaagaagtttggcagactactatacatgtaataggtaaagatattgcgaaattccataccatatactggccttctttcttattggccgctggattgcctttacctaagcaagtcgttatccatggacattggttgtgtaatggcgtcaagatgtcaaaaagtttagggaacgtcgtagatccagttgatatggcaagctactatggctccgatattgtgcgttggttcttgttagaaaattcaaagttggaagaggatggcgatttccaggaacaaagactatctgaaacaagagaattgctagtctctaaatggggtaatttggttaataggtgttgcggctcgaagtttgatgtcgaaagagctgtgacaaaatttagtaataagggacatctacaattgcaagaagtctttcaaaatgaaccagagatctcccagcaaattaaaagtcatattaaactgttgaacgaaacaaaagacgtttttgaagaaaaaataaccctattccagtattcccaactgttaaagcatgtttggggtataattaatgatgcgaacaccctagtccaaaacggtaagccctgggagagagaggtggaccaacaagacgctataatattcttgtctatggaaacatcaagaattctcaccattctatgccaacccataatgccagctctttcacaaagtcttctcgaccgcattgatgtcttagaagagaggaggactataactttcattgaattggggtccgacgaagcgtatggaaaatactctaataagaggggtagagaagtaccattaaaaagaattccatacagactttcggagtag

SEQ ID NO: 4194 - DNA, 441 bp, Saccharomyces pastorianus
atggaaagaccattgtgggtacgttggttgaaagtctacgcaatcggtggtgcagttattggaggaggagcattgcttttcaagtataccacaccaacagacgaacagctaatcagccaactttctcctgaattacgtttacaatatgagagggagaaaaacttacgtcaggcagagcagcgggctttaatgaagatcgtccaagagacttcccagagcgacgatcctatttggaaaacaggccctcttcaatcaccatgggaaagaaagggcgataacgttcaaagtagagaccatttcgccaaagtaagggcggaggaagtacagaaggaggaactatctagaatcaggaacgaactttctcagttaagatccgagactgaagagaacacaaagaaaattgtagagaacaagcacggcagttggtggaaattctggtaa

SEQ ID NO: 4195 - DNA, 114 bp, Saccharomyces pastorianus
  modified_base (20)..(20): a, c, g, t, unknown, or other
atggaagaacgcggtttctnagggttgccaatggccttattggaaggtatcatgatcttaatcacagctattagggtattcactccattcttgtttggtgaattgattggttaa

SEQ ID NO: 4196 - DNA, 1638 bp, Saccharomyces pastorianus
atggatagtttagaggaatacgaaccgcacgttacgcaagagctgatcgatcgtggccatgcaaggcgcatgggccatttggaaaactattttgctgttttgcgtaggcaaaacatgtattcgaatttcgctgtttatggggaactgaataaggccgttagcaagagacaactgagacttgccttgaggttattgcttctaaagtatccaattctttcgcatacaattgttcccaaaaaataccctaaccacgaagcgtattatctcagtcaggaatatctgaataagccgtttcctcagcatgattttatcaaggttatacctcacctagaactggaggatttaatcatgaacagtcaatcagaatacagggaagtcatcggcaaaatttcggaacaatataagaatgataattttaaagtcacgagtagcttaatcgaattagtcgctcctataatcgtaccggcatgtgacccggaaaggcccaattggaggcttatttgtttacctagtagggatactagcgcgggcgaggcgtggaccaacttcgtttatgtcagtaaccattgcggctccgatggtattagtggaacgaatttttttcaggatttgactgctttactctctacgatcgaggagaacgggttcgactatgaggaggagatcgtggataacaacgtcatcatcgactataacgaagatcacaaagaaatctcgaagcttccgatctccatcacagaccgtattgactataagcctagattgacgtcgctacctaaattcttcttgaagaacatcgtgtctgagtattgtgagttcagaacttccaatgagtcgacagtcacttccaggtactctccctcctctaatgcaaatgcaggtttcaaccatctgttgcatttcagtgccgaagatacacaacaaattaggtcggaaattaaaaaaaaagttcatgctggatgtaccataacgcccttcattcaagcctgctttttcgtagctttatatagacacgataaagttttcaccaagtccttccttgaatatgggttcgacgtggccctcccaagtagcacaagaagattcttaccaaacgacgaagagctaagagactcctacaaatacggcgcaaacgttggtggttcacattacacctatttgatctcctcttttaacgtccccgagggcgacgccaacaagttctggcgtctcgtcgagtactaccacgactgcttcttaaagtcgtacgataacggagaccacttgatcggcttgggcacactacaactagacttcatcgttcaaaacaagaacgtggaccaaattatttccaccacctacttggaccaccaaagaggcggtgccatcatcagcaacacagggtttgtcaggcaagatacgaccaagccgtactacgcccgcgacctaatattctcacagtctgcaggcgccttgagatttgcgtttggcctaaacgtctgctccacaaacgttggtggtatgaacatggacatgagcgtagttcagggcactctacggaatcggggcgaatgggagtcgttctgcgacgttttctaccacgccatcggcgaatttgcgtcgcttggatgcgatactgccgtcgcgggtctcgtatag

SEQ ID NO: 4197 - DNA, 1074 bp, Saccharomyces pastorianus
atgttgcacccagagcctaacggcatccaatcgaagaaaacactcttttatgagaattctgatgacgctgaagaggaggagcagaacattcgcaagagcgctgaagaaggacagcaacgctacaaagcttccaaacagctccgattcaagataaacaaagagaccacaaataatgggcaacagcaactgtctggtggaagtgcggaaaatgaagaacgcgacgtacgaccctgggaatttagaaaagtaatacaagctgagtacagagaaaggatgccgcgcaattacgagttgaaacattggaagaagccctccaaagtgatgctagagtccatattccgtttattggagaccaatacggcaagcgccctcgattccgtcactgaaaaataccatgaggagttgaaccagatgacacacggtgacaataatgaactgaacaggatctacaagaaaaaggaacgcttgctcgagacaatcgtaacgaaaataaacaagaagctgaggcaggcaaaattcccctccagaatatcggaaagagacctggatatcgagtatatttattccaagaggcaatttatccagaaccgttattcacaagaattacaaaactgtgagaggctggaaacaaatcttgcacgtgaaaaaaaactactggaagagactaagaaactctgcaaaaacttgaagacaagcaataaaaggcggctcactgagaagttgatacaaagagacctccatccagtactcaataaagccatggaatacacatatgggttggattccactaatggatctgcacaggcagatgggcaagtggcttttaaaaacgacgccaacgaattaaacctgatgtggaacgaccctattaaaagcacgaccgatgtgggactcgacaacaaagaagtgttttcgttgttgccgtctttacaagagtatgcaagcacgtcacatgaccttaaggaaaccatagatcgaatagttacgaactcacatgaacgggaaatcaaagaattggcggtatctacccatgaagaccatcaggacgatacagaggaagattcacaggactga

SEQ ID NO: 4198 - DNA, 1332 bp, Saccharomyces pastorianus
atgttcttgaagttcccattgtctgtctctcacttcctcctctcattgttttctctgttccggtatacaaaaacaccatctatagatacatcggtttttcacccatcactgtccccttatactttcagttttcagtttttcattctttctttttttttgcaaaaggccttgtctcgaaacaaagaaaaaaaaaaaataattcatttaaaaagggaaaataaaattttgccaattaaaagaacagatcttttagccacacatcaacgcgcgccgtatacacaatcaactaaaatggaagcacacaaccaatttttaaagaccttcgaacaagaacgtcatgacatgaaagaatccgaaaaggatgaaatccttttgatggagaacagacgtagatttgtcatgttccctatcaagtaccatgagatctgggccgcctataagaagatggaagcctctttctggacatctgaagaaatcgaactggccaaggactctgaagacttcaagcaattgaccgacgaccaaaaggtctacatcggtaacctgttggctttgtctatctcctctgacaacatcgtcaacaagaacttgatcgagaagttttctgctcagttgcaaaacccagaaggtaagagtttctacgggttccagattatgatggagaacatctatgctgaagtctactccatgatggtggacgcctttttcgaagacccaaagaacattccattgttcaaggaaattgctactttgcccgaagtgaaggacaaggccgcctacgttcaaagatggatttccaacgaagatagcttgtacgctgaaagacttgtggctttcgctgccaaggaaggtatcttccaggctggtaactacgcctccatgttctggttaaccaacaagaagattatgccaggtttggctatggccaacaagaatatctgtagagacagaggtgcttacaccgacttctcgtgcttgttattcgctcatttgagaaccaagccaaacgtcaagatcaccgaaagaatcatcaccgaagccgtcgaaatcgaaaagaagtactactctaactctttgcccgtcgaaaaattcggtattgacttgaagagcattcacacctacatagaatttgttgctgatggtctattactcggtttcggtaacgaaaaatactacaacgcctccaacccattcgaattcatggaaggtgtcgctaccgctggtaagaccaccttctttgaaaagaaggtttccgactatcaaaaggctagtgatgtgtccaagtcttctgcccccgtatccaaggatatcaactttgatgatgacttctaa

SEQ ID NO: 4199 - DNA, 1092 bp, Saccharomyces pastorianus
atgaatctttatgatatccgtgaaagaaaattcaacaatgagctgctccacttgattggcgactcatgcaagcaaaagctaatgggcgcccctatgaaagctatgattgccggcaaaatttgtgaatattttacccaaaaatacggttttagcgcagactgtaaggtctcccccatgactggtgataatctagccacgatatgttcattgcccttgcggaaggacgacgtgttggtctccctcggcacaagcactaccgttctcttggtcactgacaagtatcatccctctccgaattaccatctctttattcatcccactctaccaaaccactatatgggtatgatttgttactgtaatggctctttggcaagagagaaaataagagaccagttgaacaaagagcgggccaataatacggaaaacgataacgattggacgcttttcaatcaagctgtgctggacgactcaaaggacgatgacaatgaactaggtgtatacttccctcttggagaaatcgttcccagcgtcaaagccgtagataaaagggtccttttcaatgcgaaaacaggtaagatcgaacaagtcgtgggaaaatttgcggatttgacacacgatgccaagaacattgtagaatcacaagctttgagttgcagagtaagaatctctcctttactttcggattcaaacacaaagtcgcaaaaaaacctcgacgaagacacgatagttaaattcgactacgacgaatctcctttacgtgagtacttgaataaaagaccagaaagaactttctttgtgggtggagcttccaaaaacggtgctattgtgaagaaattcgctcaagtcatcggcgctacgaagggtaatttcaggttagacacaccaaactcgtgtgcccttggtggctgctacaaggccatgtggtcatttttgtacgattcaaacaagattacagtcccatttgataaatttttgaacgataatttcccatggcatgtaatggagaacatttccgatatagataacgagagttgggaccgctataatacaaagattgtccctctgagtgaattagaaaaaacactctcttga

SEQ ID NO: 4200 - DNA, 339 bp, Saccharomyces pastorianus
atgtcccaggactcatactacctcggatttgatctctcgacgcagcagctgaaatgtctcgccattgatcaggacctgaaaattgtccattcggaaaccgtcgagttcgaaaaggacctgcccaactaccgcacgaagaaaggcgtttatatccgcggcgataccatcgaatgtcccgtggccatgtggctggaggcgctagacctggttctctcgaagtactgcaaagcagggtttcctctcgagaaagtggtagcagtttcaggatcctgccaacagcacgggtccgttactggtcctctcaggctgaagcttgtgagccaattgacaatgatcgaa

SEQ ID NO: 4201 - DNA, 1974 bp, Saccharomyces pastorianus
atgacaccggaaatgaggcagacttctgattttcagcgtgatccagacagttccgacgaaactcaaaacaaaccgcaatcacaaattccagtgtctcccttggcagaaaacgcatgtgccgattacgaagaggccgaaataaagctcatacaagatggtatgtgcatgaacctgccgacagaaaatgaagatgaaaatggagatgaatctgaaaatgaaaatgaaaacagtgacgaggatgattctgaaaatgaaggggaagactttgaagtgtccaaaaccggatacctttcaggtatgttgtcttcgcagcaggaagaacaagtagaacaggaaaaggcagatgaagtcaagaatgcagatatgctagaagaagaagaaggaaaaagtgaagaagaaaagagtattagcagtagggattctactgaattcttcgagacatctaataagccaacccaagtagcaggtctaaagaatacagggaaggagatgaagcttctcgatgacgaataccgcaactcctttttcaacgactaccagcgttcttcagactctgaaaaagagaccaaagaggaggaatatgacggtaatgaaaggtcttcaccgatttcagatgagccttcaagtgtaaaccaaacatcaaaacaacttgatacgacggacgatgatgctttatcgtatactgaatcaatcaagtattcagcaaacgatacaaaagtcggagaagaaggagaagaagacagcgaaaccactgaaaacgataacgaagctactgatgattacagattttccagtagagaaagagattctgtgctaatttcgagtaatgaaaacgacagtgaagcaaatataaactctgactcggatgagggtagtttgaaggcttcgaagtcaggctatttttccaaaatgattgacgatgatgaaagttcagaccataacgatgaggagaaatcgacaatggatcacaaagaagctaaagacaatgaaaacgttaactcggaagatggtagtgttgaatcaatgccgaaccctaacggtgatgaaggggataacgcacacgaagacaaagatacggaggaaaattcaactagggactcaaatgatattggctcttggaaaccagatagtgaagcgttgcgatcgggattcgtacaggatacagcaaataaaaaagcgccacctgggtatgtgattgactctaatggtaagttagtagatttaacgcctgctagtatgaaacctcgcgtagtctctacatactcggaaatggaaagtacctgggatgcatttccttctaaaagtgggaacgaagatttggagactattagggacaccaagaccctatacgataacaatacgatctataatgttcccggtttaataggtaatcattcaaacctaccacctttaccgacgattgcacacgaacaattgaatgcaggaaacgagaacggtaccacagaggacgataataacaaccacaatattgatagtcaggtggcacgcgatgcatctttgaaaagtgagagcagggcgctatcacagggcgaaatggtgagcattcatgagcccagttctaaagaaatagcaaaattggggcaacagagtaatgtgcccaatctagacgtaaacaaagtactgaatagtaaaacatcgcatgaaagtaagataaaccaattgagaacccagaagcacgaattggacgaatacgacacgggaatacagacatggataaactatacattaaaatcgtcctctaggaaggataaggactttatagttgaagagtataagcagcataatcatgtcagggaggcatacgcgaatgcagacgatttgagcaagaagcatacagttattaatacggtcgccagcgtcaatcagaatgttacgcatctgaggaggaaagtcttccagcattctatgaaaccaaaggacttgtttgcgtcaataggtaagaaaaaactgtga

SEQ ID NO: 4202 - DNA, 1230 bp, Saccharomyces pastorianus
atgagcaaaacggaatctttagattggctggaaaacagcaccaggtctgtttgtccagaaaacgtttcgaaagttttggtcaatgcatggtcgaccttgtacgaaatcagaaagtatcaattggatttcctcacatctaatgatttgacttcatatttatgcaatgcaatgatgttatcaacaaaggaaaaggagagtactaccgatggaggggaagaagaagaagaagaagaagaagaaacacttcgtgaattacaatttaaatattcttacactctagcacaacagagacatattgagcctgcagtcaagactctagaatcacttatcttaaacaaaagtccaaactgctacaaagcttggcatctattggctctgtgtaggtctgttcaagaggataaggaaatgtcgtataagattgtttgctctgtactagaagccatgaatgaaagtcttcaaaatgatactttaagtctgaatgatagatggcaactcgttcatcttaaattaactcaattggctattattgaagaaatttttggcacgttggaagctctggaaacactgccagaagtcttcgagctttacacaacattgtttcccgattcaaaaccagaattgaacagcacaggtcctaagtacagtcaaactaaagaatacctcttacaaatggtctggatctttgctgcaaatatgtatatgagaacaaaagaaaacgactcggatgccaaggcagccatcaaggaagcctcaaaagtagagagcaaatttaagaacctaaattgtaatattgctaacggttatttatcgataataaagaatgaagcagatgttgcactgaaagaatttgaaaccgtactatactacgacgaatataatctggacgctctgatcggatttgccgaattaattttcccagaggaactagatgcaaacgaggaaaacctcgaaagttactatacactgagcctcgacaaaaaaccaaccaagcgggctcaattaacgtttgtaaatgacacagacaggtctgcagcgtacgccaggttaaaatttctactagagtgcggaatactagagtcaatagaggcgtatcattccccggaggtatggtggtacttgtctttaatttacgaaaagtatcaagatgatgaatacaaaaattccttattaaaatgtgttaaatatcaagagttgaaccctattcgctccttcaggtattgcaattactaa

SEQ ID NO: 4203 - DNA, 1053 bp, Saccharomyces pastorianus
atgatttgtgttgagccagtcactaatacacgatttgtaagtggtggcgatgaaaaaattctaaggtcttttgatttacctaaaggtgtggctggaatgttgcagaagtttgttggtgttcagtttggtcaagaaaatgaaatgcctgagtctgccactgtgcctgttttaggtttatctaataaagccggagaggatgacgctaataatgacgatgatgatgacgatgatgacgaaggtagtggcaataaagagtcggatgttatcgatcctttatccttgttggaaacgccaccaatggaagatcaattacaaagacatctattgtggccagaagtagaaaaactttacggacatggttttgaaataacgtgcctcgatgtttctccagatcagaaactaattgcatctgcttgtagatcgaataatgtccaaaatgcggttataagaatatttagtacagaaaattggttggaaataaaaccagccttaccgttccacagcttaacgataacaagattgaaattttctaaggatggaaaattcctgctgagtgtttgtagggacagaaaatgggcactttgggaaagaaatatggaagacaatacttttgaattaagatataagaatgaaaaaccacatacaagaattatttgggacgcagattgggcaccattagagtttggtaatgtctttgtcaccgcctccagagataagactgtcaagatctggagacaccaaacggaaccaacagatgattacgtcatggaagcatccattaagcatagcaaacctgctacagctgtctctgtgcatgatgccatggtgggagacaagattttaatatcggtggggctcgaagatggtgaaatctatttgtacagctatttttccggcaacttcgaactaatatcacacttgaaagaggacataacaccagcagataaggttacaagattgagatggtcacatttgaaaagaaacggtagattttatctaggcgttggaagtagcgatttgtctacccgtgtatactctttagcatacgaatag

SEQ ID NO: 4204 - DNA, 1365 bp, Saccharomyces pastorianus
atggcggaatctgttgttcccgaagctatcttcataggtgctaacaaacaaactcaagttagtgatctacacaacgataaaaaaatcgttgcatttggtgcaggcaaaactattgcgttatggagtcccattgagcttaaccatcaaggtgtttacgcaactttgaaaagtcatgaagcagaagtcacatgtgtgaagtttattccagagacagaatttatggtatccgcatctgaagatcatcatgtcaagatttggaaattcatcgatgactctcatttacaatgtgttcaaaccataaaacactattcaaagacaatcgtggcattgaccgctttgccaaacatcattgctgtcggttctgctgatggtaccgtcactttatggacacagaacacacaaaccgatcagttcagttttggtcaagaaattagcataaaaaaaggatttttctatccattatgtttatcattgtctagggtagaaaagaacaagtacttgcttgccatcggtggtaccaatgtacacgtatttattgcctctttcattctaaagaatgcggacatcgaaaactgtcaaattgttgcagaattagaaggccatgaagactggattaaatcattggcttttcgtcaccaagaaaccccaggagactatttattatgttctgggtcccaagaccgttatatcagattgtggagagttagggttaatgatttaattgatgactcagaggaaaattcatcgaagttgaccttactaagtaataaacaatataaattccatattgacgatgatttgagagttggtattgattttgaagcactgattatgggacatgatgactggatttcatctctccagtggcacgaatctcgcttacaactactagccgccacggctgacacttcactaatggtatgggagcctgacgagacctcaggtatttgggtatgtggtctgagattgggtgaaatatcctcgaaaggtgcctcgaccgctactggttcttccggtgggttttggtcctgtatatggtttactcatgaaggaatggattactttttgactaacggtaagactgggtcttggagaatgtggtgtactaaggataacataatctgtgaccaaaagttaggtacatcgggcgctacgaaggacgtgacggatgtcgcttggtctcccagcggtgagtacctattggcaacttctctggaccagacagcaagactgtacgcaccatgggtgtataacgctaacggacagaaaagagatgttacgacttggcatgagttttctaggccccaaatacatggtgactctagagatccccggtaccgagctcgattcgtaatcatgtcatac

SEQ ID NO: 4205 - DNA, 678 bp, Saccharomyces pastorianus
atgtcagacggaactttatttaccgatttgaaagcaaggaaattgatcagaacaatcgtgccaaggggtttggtgcgttcgttgaagctggacgtcaagctcaaggaccccagcgacgctcgagaactgtacgaaagcgaatttccatggggaaagtaccccacgtttgtgggaccacacgacgagtggactctcacggaggctatggccattgactattacctaatccacctgtctaaggacaagaaagccattactcacttattggggcccgtgggtgatttcaaggtccgtgcggacatcctgagatgggagtcgctctccaacagcgatttcttgatcgagctgtgtaagttgttttaccctatagtggggataaagccttacgatgccgccgagttcaacaccgcaagggggaacattgacactatggtctccctctacgagaggaggttgaaggaacagcagtttctggcgtgcgattatcatgaaactctcgctgatctaatctctgcgtctgttttttcattggggttcataagtatcttcgacgaagaatggagatcaaaccacccggaaatcactaagtggttcagtaagacgctcaagtctcgcttttttgagggagagtttgaaaagtttgaaatgtgcaagatggcattgcaacctaagaaataa

SEQ ID NO: 4206 - DNA, 639 bp, Saccharomyces pastorianus
atgggcaagttcctgaccacccaaagaaccaacggtgtctccacaagtgacatcatcaccaagatcatcagggactatgacaagtatctgatgaggaatttcgcaagaggagccactaggcaagagttgaacgtttcttggttaaagaaaaacgagctggagttcaaaaaacacatcaacgagttcagatcgtatttcaagaaaaaccagacaaatttgaacaatgcctccagagatttgtatttcgaagtgcgtgaaatcctactaaagaaaaccctgggcaagaaactctattccaagttgataggcaacgaattgaagaaacagggccaacgacaaagacagcagaatttcttggacgacccgcttaccagaaaactaatcagggaagcctccccagccacagagtttgccaatgagttcaccggtgaaaaggctaccaccacatcagcaaataaatccattttcagccaagacgatgatgaagacacgaactccaacacaaacacaaatacgaactcggagtctgattcaaacacaaactcgacccctcccagtgataacgatgatgataatgacgacagtgatagcctaactttggaaaacttgactcaaaagagaaagaaccccaggaactga

SEQ ID NO: 4207 - DNA, 639 bp, Saccharomyces pastorianus
atggcaaacccaacagcagggaagtcttcaatcagggctaagctatctagctcttccctatcaaacttattcaaaagtaaccgaaacaaaagacatcacgacgaggcggaggagcaagataacgagcatcagcaggatgagcaggaccatgaacaagaaaataaagacgctcagctcagcccaaggaagcgccgtcgcttagccaaagaattcgaagaaaacgaggcccgtttgaataccgaattgcccaaggagctgcgcaagtatcgtccaaagggtttcaggttcaacctgccccccacagacagacccatcagaatatatgcggacggtgtgttcgatcttttccatctgggccatatgaagcaactggaacagtgtaaaaaggccttccctaacgtaacactcatagtcggcgtacccagcgacaaaatcacccataaattaaaaggtttgaccgtgctgaccgacaaacagcgttgcgaaactctgatgcattgcaaatgggtcgatgaagtcataccaaacgctcctggtgcgtcaccccggaattcctactcaaacacaagatcgactatgtggcccacgacgacatcccctacgtcagcgcagagagtgatgatatctacaagccgataa

SEQ ID NO: 4208 - DNA, 633 bp, Saccharomyces pastorianus
atgggcaagccgctttctgtcattggattttttgttggttctcggatgacatttgttaactccatccccaccgcacagacaataaaaacagctaccgccaaagctagaactagagctagaactagaaatacagctacaaacgcacacgagaaggccaattacaaaatggactcgtactcgataacaaacgtgaagtacctggaccccagcgaactgcaccgctggatggtcgagggccacaccacgacgctgcaagagcccttccaggtcgtggacgtgcgaggctcggattacatggggggacacatcagggacggatggcatttcgcctactctcgcctgaaacaggacccggggtacttgcgtgagcttaagcgccttttgctggagaagcagcaggtcgcggcggacggcgacggcgacggcgacggcgcgctcaacgtggtgttccattgcatgttgtcacaacagcgcgggccgtccgcggcgatgctactgctgcggtcgctcgacacggcagagctgccacgctgccggctgtgggtgttgcgcggcggcttctcgagttggcaagccgtgtacggtgatgacgctggcgtcacggagggttacctcgcggacctgtggcgctga

SEQ ID NO: 4209 - DNA, 1209 bp, Saccharomyces pastorianus
atgctaagacaggtcaccattggccaagccccaactgagaaaaaccacaccagagtcaccgggttcgatatcactgtggcgtccgaattgatggccattcttgctctttcaaaggacttgagagacatgaaagaacgaatcggacgcattgttgtcgctgctgacgtaaacagatctcccgtcaccgtggaagatgtgggctgtacgggcgccttgaccgccttgttgagagacgcaatcaagccaaacttgatgcagactttggagggtactccagtcttggtccatgctggtccatttgccaacatctcgatcggtgcctcttctgtcattgcagaccgtgtagctttgaaattgatcggtactgaaccaaacgcagagacagagcccggttatgtggtcactgaagcagggttcgatttcaccatgggtggtgaaagattcttcaacatcaagtgccgttcctccgggttgacacccaacactgtggttcttgttgccactgtgagagctttgaagtcacacggtggtgctccagacgtcaagcctggccaacctttaccttctgcatacaccgaggaaaacatcgagtacatcgtaaagggtgctgctaacatgtgtaaacagatcgccaacatcaagcaatttggcgtccccgtcgttgtagcaatcaacaggtttgaaacagacactcaaggtgaaatcgccgccatcaaaaaagctgcgttagaagctggcgcatttgatgccgtcacttcgaaccattgggccgaaggtggtaaaggtgctatcgatttggccaaggcggtcttttttttctctaagcaaccagtagacttccacttcttatatgattttaatgcctctgttgaagaaaaattaactactattgtccaaaagatgtacggtggtgccgcgatcgatatcttgcccgaagctcaacaaaagatcgacatgtacaaagagcaagggttcggtaacttaccaatctgtattgccaagacccagtactctttatcccacgatgccagtttgaaaggtgttcctacaggatttaccttccccatcagagacgtcagattgtctaatggtgccggatacttgtacgctcttgctgctgaaatccaaacaattccaggtttggctacttatgctggttacatggctgtcgaagtagatgacgacggtgaaattgatgggttgttctaa

SEQ ID NO: 4210 - DNA, 1545 bp, Saccharomyces pastorianus
  modified_base (1536)..(1536): a, c, g, t, unknown, or other
atggctggtcaagtgctggacggcaaagcatgtgctcagcaattcagaaccgatatcgctaccgaaattaaatccatccagggtcacgtgcctggattcacgcccaatctggccattatccaagtaggtaacaggccggattctgccacgtacgtgcgcatgaagcgcaaggctgctgaggaggtcggaatcgtggcaagcttcgtacacttggacgagacggtttccgagttcgaagtgctgcgttgcgtagaccgtttgaacgaagatcctcaaacgcacggaatcattgtgcaactgccattgcctgcccatttggaagaagacaaaatcacctcgagggtgctggccgagaaggacgtggacgggttcggccccactaacatcggcgagttgaacaagaagaacggccacccattcttcttgccctgcactcccaaggggatcattgagctactgcgcaagtccaacgttaccatcgaaggctccagatccgttgtgatcggtagatccgacatcgtcggttctcccgtcgcggagatgttgaagtccctaaactccactgtcactatcacccactccaagacccgcgacatcgcctcctacttgcacgacgcggacatcgtcgtcgttgccatcggccaaccagagttcgtcaagggcgaatggttcaagccaagagatggcgcttcctccgacaagaagactgtggtcatcgacgtcggcactaactatgtggccgacccatccagaaagtccggcttcaagtgtgtcggtgacgtcgagttcgacgaagccatcaaacacgtccacttgatcacccccgttcccggtggtgtgggccccatgaccgtagctatgctgatgcataacactttgcttgccgccaaacgccaactggagcaatcttctaaaccattacagatcccagctttacccttgaagttgctgacccccgtgccctccgatatagacatctctagggcgcagcaacctaagctcatcaaccaactggccgaagaattgggcatctactcccacgaattggaactgtatggtcactacaaagccaaggtttcccccaaagtcatcgaaagactccaatcgcgccagaacggtaaatacatcttggtctccggtatcacccccaccccattgggtgaaggtaaatccaccaccacgatgggtcttgttcaagcgctaaccgcacatttgggcaagcccgccatcgccaacgtcagacagccctccttgggccctacgctgggtgtcaaaggtggtgctgctggtggtggttactcccaggttatcccaatggacgaattcaacttgcacttgaccggtgacattcacgctatcggtgccgctaacaacttgcttgctgcagctatcgatactagaatgttccacgaaaccactcaaaagaacgacgctaccttttacaacagactggtgccaaaaaagagcggtaagagaaagttcactgcctccatgcaaagaagaatagacagactgggcatcaacaagtccaacctngatgagtga

SEQ ID NO: 4211 - DNA, 453 bp, Saccharomyces pastorianus
atgtcagtatataaggaagagcattcggggatggaagctgccaagggaacgactttcaacaattgtcttctcaatttggcggtgaaggaatttataacgcacacatacacagctacacacctgctaacaaaatcaacaatggtcactcaattaaaatccgcttctgaatatgacaacgctttggcctctggcgacaaactggtcgtcgttgactttttcgccacatggtgtggtccatgtaagatgatcgctccaatgattgaaaagtttgccgagcagtattccgatgcctccttttacaagttagacgtcgatgaagtatccgatgtcgctcagaaggctgaagtctcctccatgcctaccctcgtcttttacaagggcggtaaggaagtcaccagagtcgtcggtgccaacccagctgctattaaacaggccattgcttctaacgtgtaa

SEQ ID NO: 4212 - DNA, 1074 bp, Saccharomyces pastorianus
atggcggatcaagcttgtgatctttgtaaacctaactacgggtggtgcagtcagggcaagagacatatcccgatcaaactgctggacgttgctgggctggtgcctggggcccattctggtagagggcttgggaataaattcttggatgatttgagacacgcagatgcgcttatccatgtcgtggacgtgagtggcactacggactccgagggcaagaacacaagaggctacgaccctttgaacgatatagtgtggctgcaggacgagattagactttgggtcgaggggaacctgaagaaaagatgggggtcgattgtgcgtagacacacggcgacgaagtctagcatagtggatacactgcaagcgcaattcggtgggtacggttcgcacgcccccatgatccaacgagccctagacaggctaaaggggctgccaccgctggaaaaatgggacgacgaatggatcacccgagtggtgaagtccttcatgatggaaaagttccctaccgtgctgggcttgaacaagatcgaccacccggatgcggataaaaacgtttccaagatcatgttgaagtaccctgacaccaaggctgtgctgactagtgccgtgactgaagtgttcctaaggaaattgaagaagcaaggcttcatattgtacgaggagggcacggaattcgtcgacacgtacgaagacgagcctgacaaactaaaaccactggacgataatatcctcaacaggatcgaaaacatcagagatttggtcctgtacaggtttgggtccacaggtgtcgtccaggtgctgcaagcagccacggacatccttgggctgataccggtgtacacggtgaagaacgttcagactttcacggggggcaacggaaccaacgtgttcagagattgtttcctggtcaagagaggcacccccgtcggcaaggttgctagatacataatgggtggcgaggtcaccatcgcagccatcgaaactgtgggcagcgtaagagtcagcgaagagagtcttgtcgagcctggcaaaaacgacatccttggcttcaagatcgccccaagatcagcataa

SEQ ID NO: 4213 - DNA, 972 bp, Saccharomyces pastorianus
atgaggaagtccatagacgagagtctttacaataagatcgatgaattcatcaaaaaagttcggtcctacatggactgcgagcccaacaccatccctgtcacctttgtgttggatgatcctgcaggcaactcatggatcgaatataagcctggcgagcctcagcacaaatggtcgcatacgcagtacgtgagaactgatgaacaaaacgttcaggtcggcatcatcaccagagaccagctggaacaacgtcgccaagaaaaattgaaggcattggctaaccgtgaaagaaacccctcccagactgttaaagtcggttcatcaaccccacaatttatatctgatgccacagacatagagaacttcaacaacgaagtgcaaacattcagagcggcttgtccatcgtgtacgcaagagtgcgaaacccatatgaaaccggttgatattccgcatttcaaagaagtcatcatcatgtccacggtgtgtgaccactgcggttacaaatctaacgaagtgaaaaccggtggcgccattccagaaaaggggagaaagataaccttgtactgtgatgacgctgcagacctatcccgtgatattttaaagtctgaaagttgtagtatggttgtccctgaattacatctcgatattcaagagggtaccttgggtggcagatttaccactttggaaggtttattgagacaagtctatgaagaattggagtcccgtatttttacccaaacctctgactccatggacgaagcaacaaagacccgttgggtagagttctttgcaagattaaaggatgccattgccggtaaagtcaagtttactgtcattatggaagatccattggccggctcgtacatacagaatgtctatgccccagatccagatccaaatatgactatcgaggattacgaaaggacaaaggaacaaaatgaagacctagggctgtccgatatcaaggttgactaa

SEQ ID NO: 4214 - DNA, 3093 bp, Saccharomyces pastorianus
atggaagtaaaagaagaggaaaaaagaccgcaacagataaaacattatctgaaatttgtctatcctcaaaagatccaagaatatacacatgcgagtttaatagcaaggattagaaaaaagctttttggaagtcgtagcaatgaagacaccagagatttcaaacaatttcttatgagaggaactgcaatcatgaacatagcacaaaatatgggagaattagccgacgaactcaaagaacctccatctcagaatataattcaaagaggtttatcaaagctcacgaagggcgttccatcattgagacgattaagaatgttcgctaataatccattttataagagtagtgatgttgtattcacagaaacgaacgatatcaacggaagaacctatgttttgcagttgaatgaatatgaagaagaaaagttagaatatttgaaaaggtatcctttgttcaattattcgtattatttcttttctcctcagcataggtttcggaaattttgtcaacgccttgtaccacccagtactggtaaaagaactgacggcacacgattcgttgaggatagtacagatctgtacaataagagaagctattttcaccacattgaaagggacgtgttcgtttttatttttgcgcttgctactattttattgattgtttgttcatgctacgtcacaccattgtaccgtatgtataatcatatgggaacctggaattggtcttctgccttggattgtgcgttcattggtgccttttctattgaatttattgtaaagacaattgcagatggatttttgtattctccaaatgcttacttaaggaatccatggaattttattgattttctcgtcctcgtctcaatgtggattaatttgattgcttacctgaaaaataatggaaatttatctagaatttttaaaggtttgacagcactgagagcacttagatgcctaacaatcagtaacaccgcacgtcaaacatttaatcttgtcatgtttgatggtttgaataagatttttgaagcagggttaatatcattgagtttactatttccatttacagtttggggtttaaatatctttaaaggccgcttgggtacttgcaatgatggaagtttaggccgtgagcaatgttacaatgaatattcaaattctgtgtttcaatgggaaattatgtccccaagggtttaccagcaaccatatcttcatttagattctttcgcaagtgcattcaattcattataccagattatttctttggaaggttgggtagatttgttagaagatatgatgaacagctcaggaataggtacacctgctacagtaatgggatcggcaggaagtgctgtatttctggttttgtttaatttcttgagtatggttttcattttgaacttgtttgtttccttcattgtcaacaaccaggcaagaacaacaggtagcgcgtactatactatagaagaaaaagcatggttggaatctcagaaacttttatcccaagccaagccaaaagcaattcccaatttaatagacctatccaaaatcagacagtttttttaccaaattgctgttgacaaaaagaatctctattatgcgtcgttcctgcagatagtactctatatccatataataatgctgctaagtcgcagctacgatccgaagcacttgattggttaccaaggcgtttttttcatgttttccaccagtgtattcttgatccaggaagcattccacatgtgtggcgaaggaccaagattgtattttagacaaaagtggaatagtacacggctcagcatcgtaattatagcatttattatgaatgctgtagcattccatattccagcttctcactattggtttcacaacaccaaagggttttttttattggtaatatttttattcgtaataccccaaaatgatacattgactgaactattggaaactgcaatggcaagtttgcccccaattttatcattaacttacacctggggtgttttatttttagtttatgctattgctttgaatcagattttcggtttaacaaggctaggaagcaatacaacagataacataaactttaggactatcatcaaatccatgattgttttgttcagatgcagctttggtgaaggttggaactacattatgaatgatctaactatatctgaaccctattgttcttctgatgacaactcaacatatacggattgtggctcagaaacatacgcatacttattactcatgtcgtggaatattatttcaatgtatatttttgtgaatatgtttgtctcattgattattggtaatttcagttatgtttatcgcagcggtggatctagctcaggtatcaacagatcagagataaaaaagtacatagaggcatggtctaaatctgataccgacggaactggtgaacttgaattgtcttaccttccaaaaataatgcattcatttgatggcccactttctttcaaaatttgggaagggagattaacaataaagaatctagtcaagaactttatggaggtaaacccagaggatccatatgatgtcaagatagacctgaatggattaaataaagagttgaacaccattagtaaagcgaaggtcatacaaagaaagctgcaatatagaagatttgttcagggaatacattatacgaatgcgtataatgggggcattaggttttcggacctattactacagatacctctcttcaccacttattccgcaagagagtgtttaggtatcgatcaatacgtgcattacttgtatgtattgggtaaagtggacaagtatctagagaaccaaaggaacttcgatgttttagaaatggtggtgacgagatggaaatttcacagtaggatgaaacgtgctattgaacccgattgggatgtcaaagatcatttagcatcatctcatatttcaaatattgatataaacgtggaatccgttccagaaactgcaatgacagaacctatcgggacacctaggatgaactatggtgtaaacaactttatgtggtctccaagaattgaccaagcgtccacgatggaaccgacagaaaaaccaaaagatggtaattcagaataa

SEQ ID NO: 4215 - DNA, 3006 bp, Saccharomyces pastorianus
atggaaggaaggaaaaggacactcacagagccattcgagccaaacaagaatccgttcgctgacaatgcagctataatgacggaagatagtgaagacgaagttgaaagaaacgatgatcatttggagacgaggccacaggctttggtaccaccatctttaaacattgtgccaccggatagtactggatatacaattgaaggtgaacaagaagatagtaactcagaagacaatgagaaagatgattcattaatttccaacatatttcgtactcgtatcggaaggagtactaataaaaacatgagtagacctaagctttctcttcaaacagcatcatttagtgctgcagaatcttccggacgtaacgcttcgccttcggtagggtctgccaaatctagttcacagcatattgatttaaatgatgaaaggctgcgcaggcgtagctttagtaactacagccgaacgtccagtaggcgggtttctaactcagcaagttcaaccgatagaccaccgaggtcggcaaaagttctgtcactaattgctgctgacgatatggatgaatttgaagatttgcagaaagggttcaaaagcgcgatagacgaagagggtttgacgtggttacctcagttaaataaaagccatactggaccagttgctggagaagaaggagaaggacgaggaggggcagaagaagatgaaatagagggagaagaagatgattatgatgaatcaatagctgatgtacatacacccaacgtgggaacgagcgcagcgcctggttccattcaccttgcgccagaacttggacaaagtagaccgctgtctgaggcacacgagggctttttatatacttcaagaaagaaattcagccccaagttcattgatcatttgtcacctcaaaagaagagcaaggatcaagcggaggttaatgaacatactatagacattccagatttcgaagcgcttcagaagaagctagataaaagaccttttgttctttatggacattcccttgggattttctcacctacaaataaaataagactgaaaattgctcgctgtttgctgaataaacgctattcatttctttgcagccttttattgacattttatactatacttctggcggtaaggacgtacgatcctcacaatgtcgtttttttataccgattttctgactggactgattattttattttcatattatctgcttgctttacagccaatgatgtagcaaaaataatcgcttttgggttttgggatgactctcaaatgttcagtgcatatgggcgtgagtataaatcaatcttacagagatccggaataatgaaactttatacatatatgagagagaaatatggcagtgaactaatagattttattattccgttcaaaattgaatctacagaggaagaaaaaaagtaccaacaaaaatcattaactgcttctttaacacaaccttatggtgcgaagggacagaacaggtcatttgccactccaagggcatttgcgcggtcgtcatggaatagaatagatctcgtatcttctgtaagcttctggctcggtatgttcttatccattagaagctacgattcaaaagcaggcataagaatattcaagcccctagctatactaagaattcttcgactcgtaaatatcgataccggtatgccatcaattttaagaggactgaaatatggtatccctcaattggtcaatgttagttctatgttagtgtatttttggatcttttttggaattttaggagtacagatttttcaaggttcatttcgaagacaatgtgtgtggtataattccgaagaccctactgatacatatcaatacagcctgcagttttgcggcggccatcttgacccagtgacaaaacaaagacaaaactatatctatgaggatggtactgaaggtcctgtttcaaagggctttctttgcccacaatattccaagtgtgtttctaatgctaatccgtataacggtagaattagctttgataatattgtcaattcgatggaacttgtctttgtcataatgagtgctaacaccttcactgatttgatgtattatacgatggattcagatgaaatggctgcatgtttgttttttatcgtttgtatttttgtcttaactatttggctactgaatttacttattgcagttctggtgtcttctttcgaaatagctaacgaggagtacaagaagagaaagacaatatatggttcaaaaaacatgggttatattgcgcgtttgataacaggctattggaaatattttaaactgaaggcaaaccaagccaaatttccaaattggtctcagaaagggcaaatgatctactcttatgttgagtttatttttgttatgcttattatctgtgatataggtatgcgtgcctctgtgaaggtgacaacttccgcacattatgccaatattctcttaaagactgacagaggaatttcaatcgttcttttcatcgaatcaatagtaaggctaatattatatctacccaacatgtggaagtttttgacaaaacccagctacgtgtacgatcttatcatctcgattatcactctggttattagttgccttgctgtcgaaggagttttaggacatgcatatgcttggctgtccatatttcagatatccagattttatagagtgatcatatcattcaactttactaaaaaattatggatacagatattaggtaacggtgttatgatttggaatttatcttccttttacttttttttcacctttgtggttgctatagttatggctgtgtatttcgaaggtgtcgttccaccagaggagatggcagaccagccgttcggaatgtatcattaccgaattcatttctatcattgtttattattgggtccactgaaaattggacagatatctgatacccacttcaaaaacactctcctaatatttcctcagcttttttttgttcagtgcttttcattatatggtttctcttgtccaattcagtga

SEQ ID NO: 4216 - DNA, 96 bp, Saccharomyces pastorianus
atgtctatgcatgatagatgtaccatgagatgctctcagacccttaaatccatatctcttcatcacacctgtaaaccccttacctttgctgactga

SEQ ID NO: 4217 - DNA, 834 bp, Saccharomyces pastorianus
atggaaagtagaacaaatatagtcatgtcgaagttcttacaagggcaaatatttaatatttcgaaaatttatgtcagacactcttctactaggccctttctggtggctcccagtatagccaaaagtataacgactgaagctccgccaatcaatcactcacctgaactagcgcatacgaggaaatggctaccagaaagatgcggtttgattacccgtaagaaggggatgatgccctatttcgatcaatctacgggtgagagaactgccgcaaccatattagaagttaataatgttgaagttttaatgcatagaactccagatgccaatgggtattttgcatgccaggttggatttggctccaagcatctgtccaaagtcacaagacaaatgctgggacattttgcttccaaagttgtcaatcctaaagaacttgtttcagaattcagagtgaaaaatgacaacggattgctaccacctggcactttattgaagccatcttttttcaaggaagggcagtacgtcgatgtcagatcagtcagcaaaggtaaggggtttacaggtgtgatgaagagatatggatttaagggtctgagagcatctcatggtacatctatcatgcatagacatggtggttcttatggtcaaaatcaagatccaggaagagtgctaccgggtaggaaaatgcccggccatatgggtaatgataacgtgacgatccagaatgttaaaattttgaaagttgatgatgcaaataacgttatttgggttaaaggttctgtagcggggcctaagaacactttcgtcaagattcaagatgcaatcaaaaaaacctaa

SEQ ID NO: 4218 - DNA, 1899 bp, Saccharomyces pastorianus
atgtccagtcattaccatcatacaactaatgcctcttcgtggaaaagagacgctgtactagacaaatctcgcacatcatttacgtttcttcagagaaacgctgaggacacaggatccgactgcaaggtgtctaaaaactcttcttcgaacgtcactgttgctgtggcagtagcagttcccgtcggtgctattattatactactgtccgtcgttttagtgcttgtgtataggagaagcaagaaagaaacattgatgcaggatttggacccaaattttgaaggtgatctatactacttgccaaaaatggattcgtccatcaattctgcaaactcagagggaaattccaccgaaagaaggtatatttacggctcttacgatgactacttgcaaccggcaacagacaaagcgctatctttcaaagattatgtgaagagaattcacgaccgagccccctccgcttataacattgcctcactcgcttcacgaaatatcagtaaggcatccgttgtctccaagcaaaccggacttcctggcagagtctccctgcgatcgataaagaacctcgaggcaacagcgaatgtgccatctctaggcccaaatgacgagaaaaaaaatagtggtcaaaaatgtgacaatacttcaagttctagttttgagaaaaatttaaagaccagtaacgatagccggcttgagttgggccaggcaagcggtggtgatcccgagccacaactgttgaaggatgacggagaaagtatagacagaataagaagcatctataacatttatttcgaaagaagtagcagctcaatacgtacttctgtggcttcttcactacgacgtggttccatagtaattactacaacagaacaaaacccagataagaacttccaaaacgacactacacttgctgatcaaggcccgttagaagccacagatgccatagagaccgactccggttcaacgtgtaatgacgactatgaagatgtgactgactatctgcaagctcccgcttcacagaagattacacacatcccatcctcagtatattcagaaatgccttttaaagacaaaaatatcgccgagccattcttattaacaaagttttctccgcccaatgccacctcaacgagaattgcctcatctatatactctgaactgcccgcaaaaggacaactttactctgcaaaattgcctgtacgggttcctccactggaggttttggctcatcctcctccaaactattcacaacaataccgccagtatcgaccaaaaggtcacgaccaagagaaaaataattattattatagtcatagcccgtcatcattagaacatcctcaaaattttgagaatatcggggagctgccaacgccaactcgattagcatattcgacttcctcacattcgcttacttcatttaaaggaagccttacaccttcacacgcactgaagcatgtgaccactgctagactaaacgggacggctttgaacccgatggaccatccagaaatgttttacaatactcctacggaagcatcttcagcagcatccttatcaaagcaatcgtgcattcctttgccataccaactaagacaaagtgtcgttatgacaaacccatccgatctttctatcaaaacacgttataaacctgcgggctctttgggccatttgataagggcccaacagctccccagtagcccgtccactatcactactccaatgtctctttcacagcagcggtcaacggtgccaacactaattaacgttcgtgtgagtgggctattggacgactctgatgttttacaacctccgaatggggatggcatcctaccttttactgcctctgtagaagacctaagaaagcaactgggcacaccgcataaatacgaaatgacatcctaa

SEQ ID NO: 4219 - DNA, 483 bp, Saccharomyces pastorianus
atgacaccattgatgcagcccttacccaatttgatgacaaagttccaaagatattcacaaaatctacataacgcattccagtcgtctgagaaatattttgaaggattgaccgagaaaattgagccaaaggatatgatagacgtgacccaactatggcgcgttcttgattcagtacgtgagatggaacgtaaatccgtgttagtgtggaacttacccactgaactacagtcgtttaatatattaaactacttctggttttacaatataagatcaaacttcaagatattctgggatgacgagatgaagagaaatctccagtttatatcttttgaaaactcaaacgatgcgtaccgctttaaaagaaactatcatggtttgttagcaaaggagttactaaacccgccgaaaaaggaggaaagcacactcgagacggactctgttatagacgattccaaactattaatcgagcatctaaacgaatga

SEQ ID NO: 4220 - DNA, 159 bp, Saccharomyces pastorianus
atggccttcactgctgctttatggggaagcacaaacttctttactggtttatctaagtttgaaatatcccacaaactgcaggagttatcgtttccgccaaccgcaagcaggttagaatgttcatttaatgaaatgcctgcaataataccattttgttag

SEQ ID NO: 4221 - DNA, 456 bp, Saccharomyces pastorianus
atgagttatcccacttcagtgtcacaaagcgagatgaacaaccttaccagagatgtgcaaactacgtcgatgtcttgcgcagagaaggatgtaacaagaggttatttcgaccagtccacgaaggatagctcgaaacatgcacatcttacaaaggtgaatgcaaagcactcacttcacaggtgcgtcttcaagaagccatacaaaagcaagaaagttgcggaagagcaaaggaagactctgaacacacagcttagacagaaattcatttcgccatcagacaacttgctttcaccatgctcaaggaaactgaatgatcataagtcaaaactatttgttgccaaatcgcaacccaaaagactcgactttgcacacagcaagcagagtatactgaccagttcaaaggtggttgccgaatccgataatgaccgcgatgacgacgatttgtttattagctaa

SEQ ID NO: 4222 - DNA, 933 bp, Saccharomyces pastorianus
atgaacagatcacccggtgagtttcaaaggtacgcaaaggcgtttcaaaaacagttgtctagggtacagcagcccggaggcaagggcagaatgccctccccagggggagcatttgcagggattagtggtttgattttgcttggaggtggtgctcttttagtgaataatgcgctatttaatgtggacggtggtcatagagccattgtttattccaggttgaatggtgtctccaccaggattttcaacgaaggtacgcattttatcttcccttggatcgacaccccaatcatctttgatgtgagagccaaacctcgtaatgttgcgtctttgacgggtaccaaagacttgcaaatggtgaatatcacttgtagagtgctttctagaccagacgtgggacaactgcctaccatatatagaactttaggtcaggattatgacgaaagagttctaccctctattgtcaacgaagttttaaaggctgtcgtagcccaattcaatgcgtcgcaactaatcactcaaagagaaaaagtttctcggttgattcgtgagaacttggttcgtcgtgcaagcagattcaatatcttgttagatgatgtttccattacatacatgaccttttcgcctgagtttaccaatgctgtagaagccaagcaaattgctcaacaagatgcccagagagcggcatttgtggttgataaggctagacaagaaaagcaaggaatggtagtgaaggcacagggtgaggccaaatctgcagagctgattggtgaagccatcaaaaaatcgaaagattacgtggaattgaaaagattggatactgccagggacattgccaagatcctggccaactctcctaatagagtcgtcttggataatgaagcattgttattgaacacaatggtagacgcgagaattaacgagaggagcaaataa

SEQ ID NO: 4223 - DNA, 567 bp, Saccharomyces pastorianus
atgtccggtttttcctacgatgaagaatggcactattccgttaaattcccctttgataacattaatgagttcattgataagttgttgctcattatttttgagcatgaaagatttttacgtcataacgggagtgagagtatgcgtcaaatagttttgagttcatgtaattgggaggcttgttcgattttgaactggaaacaacccaactttccggtattattgcaaatgaaaaatctgtttagagactcaaacactggtaagtttattagcgatacaccaaattgtttgaaagagctggccgtgaaccctcaaaagatgtcatatttggatactgcgcctttgaacatacatacaatgattcaatttgccattaataataacttgctgggtgttactatcccacatgaaacattaaagatatgcccctcattgaccaaaaatattaaacaaagcggcttgttgttaattgcttcaattgacgaaaacgaacaattacccaataacgaaaataatagtgggatttactgtggctctgaactgctatttgagaataatattgatatgtga

SEQ ID NO: 4224 - DNA, 2628 bp, Saccharomyces pastorianus
  modified_base (2472)..(2472): a, c, g, t, unknown, or other
  modified_base (2501)..(2501): a, c, g, t, unknown, or other
atgaagttcggcaaatatctggaagctagacagctggaattggcggagtataatagtcattttattgattacaaggctctgaaaaaactaatcaaacagttggctattcccactttaaagacgagctcggagttagatctacatttgacattagatgatatagatgaaaaaatcatacatcagagattgcaagaaaacaaagctgcatttttctttaaactggaaagagaactcgaaaaggtcaatggatattacttggcaagagaatctgatttgagaataaagtttaacattttgcactcaaaatacaatgactacaagtcaaatggtaaattaacttccaaccaagctacttcattcaaaaacttgtatgcggcttttaaaaaatttcaaaaagatttaagaaatttggagcagtatgttgaactaaataaaacggggttttcaaaagctttgaaaaagtgggataaaaggtctcagtctcatgataaagatttttatcttgctacggttgtctctattcaaccaatattcactaaggatgggccactcaaactaaacgatgaaactttacacattcttttggagttaaatgacattgacaataacaataggacggcaggcttagaatccaatgatttcgttagtgaggataataatgacggaaaaagagagcttaacagttaccagttagcgacatcgaaaacttccgaaaaccaacttcaacatattttttctgcaccatcttcttcttccctcgatatggagatggaaatcgaaaactggtacaaggaaattttgaatattacgactgttaaagacatccaaaggaagcacgcattattaagaaatttcagggaggccaagatctttacatatttattacaaaatgcttcggaatcatttcataaaaatgtgttttccctgttgaaggaatgcctaactacactattcttattgttggtggctagccctctagacgataactccttgcatatcttttacaaaagcaaccaagaccatatcgatttgtcatattgtgatgaagatgaccaagtattctcacgaaaaaacgtatttcatgaagccgcaagctgcccaaaccaatctcgtttattcgttcttgatgaagctttaacgacttcaaaattatccaaagaaacagtccagaagttactgaatgctcaagatatacacgcgcgggtaccgctacactatgcttcagaactaggtaaattggaatttgttcattctttattgattaccaatcttttaaaagatattgatccgattgatagcgattctaagacacctttggtattggctatcactaacaaccacatagatgtcgtgagggacttgttaaccatcggtggtgcaaatgcatcccctgttgaaaagccagtcttagactacagtaagaatataatcagttctgctaaagtccaatttgatcctttgaacgttgcttgtaaattcaataaccacgatgctgctaaattactcttggaaatacggagtaaacaaaacgctgatcataacaaacaaagttctcaacatttatgtcaaccacttttcaagaaaaactcgactggtttatgtacccttcatatagtagccaaaattggtggtgatgcacaattaatccaactgttaattcaatatggtgcggaccccaatgaaatcgatggcttcaacaaatggactcctattttttatgctgttcgatctggtcattctgaagttatcggtgaactattgagaaatggagcacgtttagatattgaggacgataatggacattctccattattttatgcattatgggagagtcacgtcggtgttttgaatgcacttctacaaacaccaacgaatcttgcacccaaatatttaaatgaagcagatgctcaaatcaaaaggctacaggctagcacgatcgctttaactccaaatgacaataaatcagatctggacattccagacagcattccagactttgctctacctccgcctattatcccccttagaaaatatggtcacaattttttggaaaagaaaatttttataaaactgaaactaaaaccaggtcttgaatccatcaaattgactaaagataacggcattattatgtcttcttcaccaggaagaattactttgtcttccaatttacctgaaatattacctcgtaatataattctacctgttagagttgatgaaaacaatgattttggtaaaaacatcagtgagacgaacgatgaagaagatgacgaagaaattagtgaagatcatgacgacggtgaactcatctttcaagttgattccatcaaggatttttccatggattttgaaatatttcccgcttttggtacaagaataattgccaaaacaacagcaatgtcataccattgtataaaacctgcaatgaacagtattacaaccataaatctacccttgtttgatacaggactaaancatattggatgtcttactttcgactatcnaattattttcccatatccaggaaacccatttaaaatcataaagtatgaaccctattggaaatctaccggaggtgatatgatgacctcttctagcagggaagggcatttgtcacttcatcatccttaa

SEQ ID NO: 4225 - DNA, 288 bp, Saccharomyces pastorianus
atgaagttagattcaggcatatattcagaagcacaacgagtggtaagaactccgaaatttaggtacatcatgctagggctagtcggtgctgctgtggtaccgactgcatacatgaggaggaactatactgtccccccacacagcttagataggataaacggcatggacacaactaagatgtctgtagccggtgtagaccagaggactgttatgacgaaaggtaagagtttgcaagaaatgatggatgatgatgagaccacctacttaatgttttcatccatcatgtga

SEQ ID NO: 4226 - DNA, 858 bp, Saccharomyces pastorianus
atgtctgatgcttgtcgtacaaatccaataaaccagattatacaaaaaggtcataccatacacaacggttccctaataccgtcaaaacccaccaggttcatccacagagaaccaactgcacaccatatcgataaaggtccacatgcggaaacatcctttttgcaccgtgccagcaatatgaagagcgttgatgatgtggcatttcaaaatcgtccctctctaacaagttttgaaaaccatattgaagagtccagtagctggattccccaattttcttcaatggaaattaatgatccattagaattcagctcagaatataaaaatttgtattcaaactacgaatcacatcaacgccaaaattcaagtagacaacagttccccattacgagttctatggtgcggaagacggcaagccatcttccgtcacgaaacatgtttcgacaacagcgccaagaaaaccgcaacagctcaacggatgccttcaaattcgacgcggaattccaaaatttagagaacgaaatccaagaagtgcggtacgagccaataatacaagaagacgaaagctggctggaccaagaccaattggagttacagaagatcgctacagatatagtaaaatgctgcactcctccactttcatcagcatcctccacctccactgtttcctctatcgactcaaagctctccgaatcgaaatttatacagctgatgagaggaatcagcagtggtgacgtgactttaaaaaaggaagcaaatgggcattctgcaagcgagctattctcgcccagcaatggagaactggtgggaaatgagcacatccccgtagagaaccaaagtcatcgaggcgcatacaattga

SEQ ID NO: 4227 - DNA, 1359 bp, Saccharomyces pastorianus
atgccattggttgaatctgttaaactaactaaatccgtcgccactgctatcgaaagcaaagattttgataaagcaatttctttaagagatacagaattcattgaactatacgaaaactttttgtcgaccaccgtcaaggatgatggttctgaattgttacctgtttctgacagactaaacattggtgttgttcacgttggtgctccatctgccgctttgaatgctgccactcgtgctgccactctatactgtttgtctcacggtcacaaaccatacgctatcatgaacggtttcagtgggttgattcaaactggtgaagtaaaggagttatcatggattgatgtcgaaaactggcacaacttgggtggttccgagattggtaccaacagatctgttgcctcagaagatttaggtaccattgcttactacttccaaaagaacaagctagatggtttaatcattcttggtggtttcgaaggtttcaaatctttgaagcaattacgtgatggtagactccaacatccaatcttcaacatcccaatgtgcttgattccagccactgtttccaacaatgtaccaggtactgaatactcactaggtgttgatacctgcttgaacgcattagtcaactacactgatgacattaaacaaagtgcttctgctacaagaagaagagtttttgtttgcgaagttcaaggtggtcattctggttacattgcttctttcactggtttaattaccggtgccgtctctgtgtacactccagaaaagaagatcgacttagcctctatcagagaagacataactttactaaaagaaaacttccgtcacgataaaggtgaaaacagaaacggtaagctattggttagaaacgagcaagcttcaagcgtatatagtacagagttacttgctgacattatttctgaatcaagcaagggtaagtttggtgttagaactgccatcccaggtcatgttcaacaaggtggtgttccatcttctaaggatcgtgttactgcttctagattcgctgttaaatgtattaaattcatcgaacaatggaacaagaagaacgaagcctctccaaacactgatgctaaggttttgagattcaaattcgatacccatggtgaaaaggtgccaacagttgaacacgaagatgactctgccgctgttatctgcgttaatggttctcacgtctccttcaagccaattgctaacctatgggaaaacgaaaccaatgttgaattaagaaagggtcatgaggttcattgggccgaatataataagattggtgacatattatctggtagattaatgttgagagctgaagtggccgcttcaaccgctgaaaacaaatga

SEQ ID NO: 4228 - DNA, 1431 bp, Saccharomyces pastorianus
atgcaatctcaagattcttgttacggtgttgcattcagatctatcatcaccaatgatgaagctcttttcaagaaaaccattcacttctaccacactttgggttttgccactgtcaaagattttaacaaattcaaacatggtgaaaatagcctcttatcttcaggaacatctcaagattccttaagagaagtttggttagaatctttcaagttaagtgaagtggatgcttctggtttccgtataccacaacaagaagcctctaacaagtctcaaagtcaaggtgctttgttgaagatacgtttagtgatggctgccccaattgatgaaactttcgacaccaatgaaactgccacaatcacttatttctctactgacttgaacaaaattgtcgagcaattcccaaaacaagctgaaaaactgtctgacactttagtatttttgaaagatccaatgggtaacaatatcactttctcaggcttggctaacgctacagattcagccccaacttctaaggacgctttcttggaagccacttctgaagacgaaattatttctaaagcctcctctgaagcttccgatctattgagacaaacattgggctcttcccaaaagaagaagaagatcgctgtcatgacttctggtggtgattctccaggtatgaacgctgccgtccgtgctgttgttcgtacaggtattcatttcggttgcgatgtcttcgccgtctatgaaggttacgaaggtttactaagaggtggtaaatacttgaagaaaatggcctgggaggacgttagaggttggttaagtgaaggtggtaccctaattggtactgctcgttccatggaattcaaaaaacgtgaaggtcgtagacaagcagcaggcaatttgatttcccaaggtatcgatgctttgattgtttgcggtggtgatggttctttaaccggtgccgatctatttagacatgaatggccatctttggtcgaagaattggttgctgaaggtagattcactaaagaagaagttgcaccatacaagaacttatccattgttggtcttgttggttctattgataacgatatgtctggtactgactctaccattggtgcttattccgctttagaaagaatctgtgaaatggtcgactacatcgatgctacagctaagtctcactctcgtgctttcgttgttgaagttatgggtagacattgtggttggttggccttaatggctggtattgccactggtgccgattacattttcattcctgaaagagctgttcctcatggtaaatggcaagaagaattacaagaagtttgccaaagacatagaagtaagggtagaagaaacaacacaattattgtcgctgaaggtgccttggatgatcaattgaacctgttactgccaacgatgttaaggatgctttggttgatttag

SEQ ID NO: 4229 - DNA, 1143 bp, Saccharomyces pastorianus
atgtctaaagactggatgtttgaaggacgtagacccgccggtattgcgggggcatgtattttactagcatgtagaatgaataatctgagaagaacacatacggaaattgtggccgtttcacatgttgccgaggaaacgttacaacagcggttaaacgaattcaaaaacacaaaggcagcaaaactgtccgtccaagaatttagggagaacgacgtggaagatggtgaggccagaccaccttcatttgtaaaaaacagaaataaggagaaaaagataaaggatactctggataaagaagaaatgtctcaaactagtgaagaagcattgaacaaaaatccgattttaacacaagtgttgggtgaacaagagctatcttccaaagaagttttgttttacttgaagcagttttcagaaagaagggctcgtgttgtagaaagaattaaggctacaaatggaatagatggcgagaatatatatcatgaagattctgaaggagaaggtgggaagcgcagaacatctgacgtcgatgctgaagaagaagaaagagacgaggagaatgaacctggacataaaaacaaaaagacaaagacaataacaaaaggaaaaggaaaagaaaccggtcattttcaagatgccattgatggctactccctagaaacagatccatatcgtcctcgtaatttgcatttattacccacatcagacgcatacctttctaaggtctgtgacgatcccgacaacttggatgatgttgatgatgaggaacttaacgctcacttattgaacgaagaagcctctaaattaaaggagagaatatgggttggcttgaatgcagaattcttgctagagcaagaaagtaagcgattaaagcaagaagctgacattgctacaggtaacacctcggtaaaaaagaagcgtacgaggcgcaagaatagaaatgacgaacctactaaaactgtggatgcagctgcagctattgggttgatgtcagatttacaagataaatcagggttgcatgcagcattgaaagcagccgaggaaaacggtgattttacaactgctgacagtgtgaagaatatgctacaaaaggcgagtttctctaaaaagattaattatgatgctatcgacggtttgtttaggtga

SEQ ID NO: 4230 - DNA, 582 bp, Saccharomyces pastorianus
atgcctgtgtgtaagagttgtcacgggacagaattcgaaagagacctttccaacgctaataatgatttggtttgtaaggcctgtggtgttgtttcagaagataaccctatcgtgtcggaagtgacgtttggtgagacgagtgcaggggctgctgtcgtccaaggttcatttatcggtgcaggacaaagccatgcctcgttcggtggttccagtgctctcgaatcgagagaagctactttaaacaatgcgagaagaaaattgcgtgctgtctcttatgctttgcatatcccggaatatattaccgacgctgctttccaatggtataagcttgcactagctaataattttgtgcaaggccggagatcccaaaacgtcattgcgtcatgtatttacgtggcatgcagaaaggaaaagactcatcacatgctgattgatttctcatcgagattacaagttagcgtatattctattggtgcaacatttttgaaaatggttaaaaagctacatattaccgaattaccgttagcggatccattctttattcattcaacattttgccgaaaaattaaggattcttgctga

SEQ ID NO: 4231 - DNA, 2343 bp, Saccharomyces pastorianus
  modified_base (584)..(584): a, c, g, t, unknown, or other
atgattaccccagaagaaacatttgacgaagcattatccagtggccctgaggatacagacatttacagtcaacaaacaacagcaagtgtagaatgtggagatcaatcactaaaaagcgaaagaaaaagttctacggggttacagctggaacaactcgccaatacaaatttattgactataagaatcaaatggaaactacaagaagaaaatgatttcaataaatctagaataactgatgtgattatggacacaatacagcattataaaggtatttctgtgaacaatgctgattcggaggcatatgaattccttgcagataaaaaaagactacagattctcgagcaaaacaaagacatttatctttacgagcatggaacacaagaatacgaaaaatctttcaaggatagcgaaaatgatgaagaagatgattggaaatatgatactgttttacaagcacaattcaaatatcccagatctttggaaaatacatgtgcagatatctcagaattactgagaagtgatgttaatgcccaatttcttgtcaaatggtccataggtgtaaacaagcatgcgttgacgtaccntggaaatatatttgtcggggggattgcaaaaagcttgtctattggcgaattaagttttcttttctcaaaatacggacccgttttgtcgatgaaattgatttatgataaaacgaaaggggagcctaatggatatggttttttttcttaccctttaggttctcaagcctcactttgcatcaaagaactcaatggtaagacaataagtgggtctacactatttatcaactatcatgtcgaaaggaaagagagagagagaattcactgggatcatgtcaaagaaaacaacaacgatgataattacaggtgtcttttcattggaaatttgccttatcataatccagaaaaggaggaatctttaattacaccaaaggatgttatagatgtaattaaaaaggagttatccaagaagttttcagactttgatatcatttcatactatttccccaagaaaagtaatgcgagaagtagtagctcggttagcttccaagatgaaggatctatagactcgaacaaaatgtccaatattacaaatggagatgcccaagaagaagatatgttgaagggttatggatttattaagcttattaatcatgaacaggcactggctgctattgagacattcaatggttttatgtggcatggaaacagactcgttgttaataaagccgttcaacataaggtgtataataaccacaataatcatgataagcaatcctcaattagtaaccataccgatatggaagcctttgaatttaccaatagtccaacgtacgattacaataattatacatatgatggatactatttcaacaatatcaagattggcaacagtaatgacagctccaatggacggtactttgactcagtgaaatcgactcctgtaacagaaaagatggatttgtattatcctccaagggaatccttcagtgagggtcgtggccagcgtgtgccaaggtttatgggcagtaaatacgatatgtaccaatacccgtccgcttcttgtggcttacccataccaatgagcaaccagcaggaatcaaacctttacgtgaagcacattcctctttcttggacggatgaagatctatatggcttctacaagacctttggagaaataattagtgttaaggtcattactgtcggcggtagcaagaataaatatcgtcaacaatcgaatgatagttcttcagatagtgacttaccggtgggatcatcaaggggttatggatttgtttcttttgaaagcccgttggatgcagccaaggccatttcgaatacagacggttatcaggtgagcaaagatcaagtgttatccgtctcgttcgcacaaaaacgtggtaacttaccttctggcgacgatgacgatctatctcaaactgatgaatcatcaaactatcaaggttcccagccacagaatgaatatcataaatcgtatccaacaaagtataacagaaagttcatgaacgccttgatgaaccagaaccacccacaacagcaagtctcgagagaaaattatttcatgcaatatcctactaatagttcaaaagctgtgaacagttataacttgataagcgcaaatcaaaacaacccaaattggatgatgccaatgtttccatcgtttggcttcattccacaagtgccgccagtcccttacatgatacctccccaaaatccaacattaaatcatattcctataatgacaaacggtaataatgaagaagaagagttttccaatgctaattattctatggatttttaa

SEQ ID NO: 4232 - DNA, 1422 bp, Saccharomyces pastorianus
atgcttactcgacgtgttttggcgagaggcttggcgacagccaagtcttcaactccgaagttgactgatgtgctaatcgttggtggtggcccagccggtctaaccttggctgcctcgatcaaaaactcaccccagttaaaaaatctgaaaacgaccttggttgatatggtggatttgaaggataagttatctagtttttataattcacccccagattactttacgaacagggtcgttagtgttactcctaggtctatccagttcttggagaacaaagccggggccactttgatgcacgatagaattcaaagttatgatgggttatatgttacagacggttgttctaaagctactttagatctggcaagagattctatgctttgtatgattgaaatcctgaatatacaggcctccttgtacaacagaatctctcaatacgattccaagaaggacatgattgatatcattgataacacaaaagtcgtaagtatcaagcacagtgacaccaacgacccattgtcttggcccctggtcacactttctaatggtgaagtgtacaaaacaagattattagtaggtgcggacgggttcaactctcccacaagacggttttctcaaattccatctagaggctggatgtacaacgcatacggtgttgtagcaagcatgaagttggaatatcctccatttaaattaaggggttggcaaaggtttttaccaacgggccccattgcacatttgccaatgcctgagaacaatgccactctcgtttggagttcctctgaacgtctatcgagattattgttatcgttacctgcagaatcgtttaccgcacttgtcaacgcagcctttgttttggaagacgccgatatgaattattattatcgtacgctagaagaaggttctatggacacagataaaatgattgatgatattaaatctagaacagaagaaatatatgcaacgctaaaggatgaatctgaaattgaagagatttacccgccaagagtggttagtatattagataagacaagagcacgtttcccgttgaagttaacgcatgccgatcgttattgtacagatagagttgcccttgttggagacgctgcacacacaacacatcctttggctggacaaggactaaatatgggtcagacagacgttcatggtttagtgtatgccttggaacaggcgatggaaagaggcttagacattggttcttcgttgagtttagagccattttgggcagaaagatatccgtccaataacgttttgttagggatggcggacaaattatttaaattataccatacaagtttcccacctgtggtagccctgaggtcatttggtttgaatttgactgacaagcttggcccaattaaaaatgttattattgacacgctaggtgggaatgagaaatga

SEQ ID NO: 4233 - DNA, 456 bp, Saccharomyces pastorianus
atgttgatccgtgaagcagctgtcacatacggctggaaactaaacaaccctgccattgctttgatgtggagaggcggttgtatcatcagatctgtcttcttggcagagatcactaaagcttatagggacgatccagatttggaaaatttgttattcaacgatttcttcgcctccgcggctactaaggcccaatctgggtggagaaggtccattgcccttgccgctacttacggtatccccactccagctttctccacagcattagcattttacgacggctatagatccgagagattacctgctaatcttctgcaagctcaacgtgactactttggtgcacatacatttagggttttgcctgaatgtgcttctgctaatttaccggtagacagggacattcatatcaattggactggacacggtggtaatatctcttcctccacctaccaggcctag

SEQ ID NO: 4234 - DNA, 1725 bp, Saccharomyces pastorianus
atggaagcaatgcaacgctctaagaacgaacagaaatccaaaccaaaaactgcagatgccgaaagggctcgttcgcctataatacagtatggatcgcttggtgtacaaccagatcgttcgcaaagagaccatgtcgccaatttgaataataaatcaggctcagtcattgaaaagaacagcagggcaactgttagtgagttcataccgccgtccgttcctgaggaccaagagatatcgttaacagaaggagagcaaaatttgaatttcatttccaacaagataccgcaatttgactttaacaacaaaaactctctcctattccaaaatgacactagtaataaaaaaggcgagcttgcccatgagtctaaggagaagattccagttcctgaaattccgagctggttttcttcaacaacctctcaacaaccatataacccttatagcaccaccaattttgttgaagacaagaatacgacaagtgaaaggggggctgaagatggagcgaccactgatggaaaaaattacgaacttctgactggtttaaatgcagctgaaatgttagaaaatgaaaacaactctaccaatgcgagaaataatcaaaaggacactgatctggaagtattatcagataaagtgtttgaggacattccagcggaacccccaattgagactgcggtaaatgataaagaagacgcaaatttagaatctacaagcaatgagcatagggaaccccttgcttttgattatgatttttccgaggacgaagaagatcatatagtggagaacatgagaaaggaacaagaggaattcaatacatttaggaaaacgacattgttgtcttcggatggaagaagcgttgccgataatgcctttatggaagaccaactatttgaacaacagatgaaggataaaagggattctgatgaagtaaccttggatatgatcaaagaagtccaagagttactctccagatttggtattccatacgtcactgctcccatggaagctgaagcacaatgtgcagagttattgcaattaaagcttgttgatggtataattactgatgatagtgacgttttcttatttggcggtacaaaaatttataagaatatgtttcatgaaaagaactatgttgagttttacgatgcggaatctattttgaaattgctgggtttgggtagaaagaacatgattgaattggcgcagcttttgggaagtgactacacaaatggattgaaaggtatggggcctgtttcgagtatagaagtgattgcggaattcggcaacttggaaaattttaaagactggtacaacaatgggcaatttgacaaacacaaacaggaaacggaaaacaaatttgaaaaagacttgagaaagaaactggtaaacaatgaagttatgttagacgacgattttccaagtgtcatggtttatgacgcgtatatgaggccagaagttgaccatgatactacgccgttcgtttgggggttactagacctggatatgctacgttcattcatgaataatcaattaggctggccatacgaaaagtccgatgaaatccttattcctctgataagggatgttaataatcgtaaaaagaagggaaaacaaaaaagaatcaacgagttttttccaagagaatatatatctgatgataagaagctgaatacgagtaaaagagtaacaacagcaacaggtaaactgaaaaaaagaaagttgtga

SEQ ID NO: 4235 - DNA, 339 bp, Saccharomyces pastorianus
atgttcgatttatccaagttggaaagaaagtatagcagtcccatgagcggaattaagtatatgtccatcttgcgcaaaacttgcttttccattgggtgggaaggagatgggatcccatcatcatctgtggtggtggccattatttctctttcgagggctaggtccgacttcttgtcgtggttacgattgtgcaagtcagcatcatgcgcctcatcttcctggaaggtgattgtcgtgggtttttcttctgaatcatcgttggtggctgatataaaaagcacatcgtctaccaaatccttaggcgacttcattgcgaattcgttggtcatctatgtttga

SEQ ID NO: 4236 - DNA, 2571 bp, Saccharomyces pastorianus
atgtatatctttttaaacatgtttaccattgaagcgaatcggaaaccttgcgattttgacaaacttggacaaatcacttttagaagcccaactgaaagaaaagcaacggtagaccaaacgaccaaacgaccggaaaagcggataacagcaatggtagactcaatcagccgtattgcatctgcattggacacagccaaagtgataacgagggaagctgcggcggtggccacgtccaaactgggggaatcctcgtacacttattattctcagaatattaatcctcagcaattggtcactctgttaaattctagaaactctagagaggttagagatgccatgaaaaggatcgtatccataatggcttcggacgacaactctatcgatgtcgaattatactttgctgatgtggtgaagaatattaccactaacgataccaaagtgaaaagactcattcatctgtacctgcttcgatatgctgaaaatgacccaaatttgacgcttctgtctatcaattctcttcaaaaatcattgtctgattcaagtcctgaactaagatgttttgccataagggccctctctgatatgaaaatgtcatcactagcacccataatccttcatactatcaagaagctagttacagatccatcagcaatggttcgtggtgaggtcgctttggctattgttaaactatacagagctgggaaaagcgagtttcatgaagaactactagacgttttaaaggatttaatggcagatacagatcctaaagtgatatcttgtgccgtcctcactttgaaagaatgttattatgatcacttagagctactacacggacatttccgtaggtattgtaaagcgattaagcagtttaattcatggtctcaatcgtatttgattgaaatattaatcaaatactgtaaacagtttttgccaaaacccactgtcgtggataagtcatcagaaggctctccaaggacctgtccattaccagaaaaatacaatgaaattgaataccctctttacgatgtggtaaaccaccctgatctggatttatttctacagagtttaaatcgtctgatttacagttccaatcctgctgtaattttatcgtgttgtaatgccttataccagttggcctcaccgatgcaaatgaaaaatactaaattcattgaatccttgattaaaacgttgactacaaccacaaatcaaggcaacaaagagatgctattgcaaacagttcattttttatccgttttagaccaaactttatttttacctttcatcagtaaattttatgtttttcccaaagacccgattgttgtatctgtttggaagattcaaattttgtctacgttaatcaacgaatcaaatgttaaggaaatattcaaagaattaaaatattacgtggccaatgctcatcttccagagaaagtagtcattatggcggttaaaagcctgtctaaatgtggccaattgtctacgggttgggaatcaagcgtgatgaaatggttgatcgatcatatggaatcacacaagctgtctgtttctatcttagatgcatacgtaaatgtcatcagaacgttggtacaaaataatcccacgaaacacctgcgtataattttcaaacttgctgatttattaacagtacaaatgaacctagccgataatgcacgtgcaggtattgtttggctatttggtgaaattgcctcgattgaattcaagatatgtccagacgtattgagaaaattgattccaaatttttcacaagaaggccctgaaacaagatgccaaatcttagtgctatcagcaaaactgttgtcatatgaaattgacaattttaatcaagcgcaaacgactagagttgaggactccgaaacggaagaaaatggccaaaataatacttattacgactttagcagttctcgaatctctcaaatgtacaatgcggtcctctatctggcgaaatatgatgatgattttgatattagggatagagcaagaatgatttcatcattatttgattcaggaaaatatgaaattgtttctttattattacaagcacctaaacctgcagcgagaaatgatgattttatcaactctctcagactggaaacgcatgattcaaaaattaaagagtttttcaaaatgcttccttggaatacagacattattgaaacagacaatgatgttagagaaacggctgcattgaaagattataacaaatacaaaaagagcttttcatctcaatctttcataagccctaattcaacaaggtcatttacatctacttccaatacaaatctgacagaaaataatgagatcagcaataatggcaatagcatctcaggtaaaagcaacaatagcacatttgcgtctcaaaatggaaaaaaatatcgtttacaaagcttggatgaatttctctctgacatcccagagaggaaaagcaagcccgagagggttctgagagtaagagaagaaagcagtgacgaagacgaatcggaatcggaatcggatgacgatagttactcctcctcgtctttggaaacatcttcttcactttcggaagcttaa

SEQ ID NO: 4237 - DNA, 369 bp, Saccharomyces pastorianus
atggaacttggccatgaaagacgtggtttagaaattgccatgtcactaagtgctcgcggtaaccaattcttgcaagaaaataagctcgacaatactttattctctcaatccccagaaaagtcagatgctgttgtcgcggtcggcttgaatattatttacgcagtcagttctattatcacaccatacatgcctgagattggtgaaaagataaataagatgttgaatgcaccagctttgaggattggggatgaattccacctggctattttaggaggtcacaatatcaataaggctgaatacttgttccaacgtattgatgaaaagaaaatcgatgagtggagagccaaatacggtggtggacaagtgtaa

SEQ ID NO: 4238 - DNA, 939 bp, Saccharomyces pastorianus
atgaagttggattccaacggttacctggaagagcaatccatgaaacagctatactgtccagtgcacaactcttacttggccgatcgttatgtagagggtgaatgtccaaaatgtcactacgacgacgctcgtggtgatcaatgtgataaatgtggtactttattagatccatttgaattgatcaatccacgttgtaaattagacgatgcttctccagaacccaaattttccgatcatatctttttgtcattggacaaattggaatcccaaatttctgaatgggttggaaaggcttctgaagatggtaactggtctaaaaattcaaaaaccattacgcaatcttggttaaaagatggtctaaaaccacgttgtattacaagagatttggtctggggtactccagtgcctgtagaaaaatataaggataaagttttgtacgtttggttcgacgctaccattggttacgtttccatcactgccaactacactaaggaatggaaacaatggtggaaaaatccagagaacgtttcattgtatcaattcatgggtaaggacaacgttcctttccataccgttgttttccccggttctcaattgggtacagaagagaactggaccatgttacaccatctaaacaccacagaatatttacaatatgaaaacggtaagttttctaaaagtagaggtgttggtgtctttggtaacaatgctcaagactctggtatctctccaagtgtttggagatattacttggcatctgttagacccgaatccagtgattctcacttttcatgggacgattttgttgctagaaataacagtgaattgttggctaacttgggtaactttgtcaataggttggttaagtttgttaatgccaaatacaacggtgttgttccagattcgatcctaagaaggtctctaactatgatagcttag

SEQ ID NO: 4239 - DNA, 423 bp, Saccharomyces pastorianus
atgtctttacaaatctcctttgataaatcaaagagtcatcctgctcatttgcagttggccaataatttgaaggttgccttggcgctagaatttgcaagcaaaggtttaaagcttgaaatcgatgatgagaacacatctatggaattgcatcacgcaaaggaacaatttactttgtttgatgctaatgccatcttaagatatgtcatgaacgactttgaagatcaagattctgacaagtaccaatttgcattggcatctctacaaaatttgctgtatcataaagagttacctcaacaacatgtcgaagtcttgacaaacaaggccatcgaaaactacttatctcagttgaaagaaccttcaactgcgacagacttgattgtgtttgccaatattacgccttggatccctcttaattcaaactaa

SEQ ID NO: 4240 - DNA, 3294 bp, Saccharomyces pastorianus
atgaataggaacaacaatgcactttctttccataatccatcacctgcacgtcgtggccgtggcggttggaatgctagtcaaaattcgggtccaacaaggcgacttttccccacaggtggcccatttggtggcaatgatgttactactatttttggtaaaaatacaaacttttataaccaagtcccatctgcatacaataatgataataacaacaacaaactaatactagattccgattcctccgacgacgaaatattacctcttggcgctacacccaaagtaaagaaagtggatgcccaaaaaaagaagaagaaaaagccagaaattgccgatctcgatccattaggcgttgatatgaatatcaattttgatgacataggtggtttagataattatattgatcaattgaaggaaatggttgcattaccgctactgtacccagagctataccaaaacttcaatatcacgcctccgcgtggtgttctattccatggccccccaggtactggtaaaacgttaatggcaagagctctggctgcaagttgctcctccgatgaaagaaaaattacgtttttcatgcgtaagggagcagacattttgtcgaagtgggtgggtgaagctgaaagacaactccgtttattattcgaagaagccaaaaagcaacaaccatccatcatctttttcgacgagattgacgggttagcacccgtgagaagttccaaacaagaacaaattcatgctagtattgtatcaactttattagctttaatggatggtatggacaatcgaggtcaagttatcgttattggtgccacaaatcgacctgatgctgtagatcctgctttaagaaggccgggaaggtttgatagagaattttatttcccattgcctgatgtgaaagcacgttctaagattctacaaattcaaactaaaaaatggacttcaccattgtcaattgagttcataaacaaattagccatcttgactaaaggttatggtggtgcagatttaaggtccttatgcaccgaagctgcacttataagtatacaaagaaactttccccaaatttacagatcgaatgataagctattggtggacccctccaaaatcaaagtcaaagtcaatgatttcatgctagctttgaaaaagattgttccatcatccgcaagatctaccggtagctcccctcagccattgcctgaattgattaaaccattattagtggatcaagtaaataacttgaaagaaaaactggactacatattaaaaaaggacgattctgactttcaaaaaactacatcgctactccaagactttatagattacgaagaatacagtgaagaagaagaagaagacgaagatgactacaaagggttcgaaggtgcatctaagttcaggtcatatgaattttttgattcgatggcggagtcacaaatttgcaaacctcgattattaataaacggacctaagggcaatggccaacagtatgttggagctgctcttctaaactacctagaagacttcaacgtacagaacttggatttggcttctctagtctcggaaagttcaaggaccattgaagctgctgtggtgcaaagctttatggaggcaaagaaaagacaaccttctgttgtattcattcctaatatggacatttggatcaataccatcccagaaaacgttattctagttctatcaggcttgttcagatctctgcaaagtaacgaaatggttcttttattatgtcttgcagaggatttgaatatatctgaaattaaggacggcattttgtcggattttgcatttgataggaatatctttcatttaaataagccctccattcaaaatataatggcgtactactccaatctaattgaactattgaaaacaaaaccaagcgatattcccatgaaaaggaaaagggtcaagccgctgccagaattaccaaaagtgatttcaaacgcaacactcactaactttgatgagaatggtgaaccattgtccgagaacgaagttctaagaaggaaactgaagacgttccaacatcaagacatgagatcaaaaaatgtcttaaagatcaaactctcgggcttaatggatcttttcaaaaatagatataaaaggtttagaaaaccgccgatagacgatgcctttttggttcaccttttcgagccagacacgaatgctgatcctagttggcaaccagcctatataaaagatatggatatgattttagagatttctacaggccggagattttttaatatggacttggacatcgtagaggagagactttggaacggttattattcagaaccaaagcagttcttaaaagacattgagctgatataccgagacgccaataccatcggtgatagagagcgtgtgatcaaggcgtctgaaatgtttgccaacgcacaaatgggtattgaagaaatttctactccagatttcattcaagaatgtaaagctacacgccaaagggatttagagagacaagaacttttcttaaaggacgaagaaaatagggtggcaattgacttagaagcccagcaagaagaacaacaggatatactgccgcaacctgaggtagatgttaatgaagttggtgagtttggtgtagctgcaggtaaccaattacaggctcaattacaggctactgctaatacaaattccattgtcagtaacggagaagtcccagcaccaattgataccgaaatatataagaagcatgaggcaatcctaacaccttctactgttggtacgggagaagtactcactccgaaagacggtggcgcacacgaacaacgtccatcagaatcactccaatctagctgcataatacatgaacaaattaatgatgataaacagactgtagcgccactaaatcaaagtgatccacttttgctgtcagaagcaaaagacgggcctagtgaatcagctttcaagacttcagaaataaagcaagtgacagagagtctacccatcaacaacagtacatgtataggagcagaacttcttcacaaaggtgaaaagacaggtgaacaagacgctacaactattacaaaggaagttggtaagccacaacgaaagaagaaagacagtagagatgtaattttatcatctgaacaactaaaagaaatatctgaacgcttaatcgagcattgcaaaaactttacagtttcccaactagaagatgttcattcctctattgcaaaaataatatggaggaacagatctgtatgggacaaaacagacgctgttgctgatatattgaaatttctctcggagtaa

SEQ ID NO: 4241 - DNA, 210 bp, Saccharomyces pastorianus
atgacacgaaatttaaggaatagacgcgatagtgacgacaaacgtagcgatgctgaagatacaaataatgcaaacgttggttatgaaacccagatcaaagatgaaaatggcataattcatactacttctcgttctttaagaaaaataaactacgcagaaatggagaaggtactcggactttattggaggatgaccaggttatggacgccg

SEQ ID NO: 4242 - DNA, 699 bp, Saccharomyces pastorianus
atggctaaaatacaaggaaaaagaaatagggcccttgggtcatctttagagatgtctcagataatggacgcaggtgcaaataaaattaaaagaagaataagagatctagaaagactattagaaaagaagaaggatatattgccttctactgtgataatagaaaaggaaagaaatttgcaagccttgcgattggagttgcagaacaacgagctaaagaacaaaattaaagccaacgctaaaaaataccatatggtgaggttttttgagaaaaagaaagcattgagaaaatacaataaattactgaaaaaagcaaacgaatctgactcagacgataaagatctgcaagctcaattaagggccactaaagttgaactatgttatgttataaatttccctaaaactgagaaatacattgcattatatccaaatgatacgccatccacagatccaaagggtgtaaaattaacaaatattagaagagaaaaattcctcaaattggtggctgaaagaatggatgcaaacgcgcttgatgtatcatttaaagacattttaatgggtaagaaactggatgaagactctgtcggattaactttgtccgacaagtcagacaataagagtgaatcccatacatcttctacaaatgacaaaaatgaatcagcagtcgaaggagaagatgaagaggatgacttctttgaataa

SEQ ID NO: 4243 - DNA, 567 bp, Saccharomyces pastorianus
atggaagccaagacacatagcacttcaatacgtaacaagaatatgctacacttcaaaagtccagacaaaactgaaaggaatgaggacatatcaagaacagaattacggtcgtcctcattaacagccccgattctcgaagctgttcaagaagctcagcctttcgaagaagcaacattttctaactttcagaataaacaccctcttacagaaaattcaacttgcaatgcctatactgtatatgatgcaaatggcaaattgaagcccataaaagatacatttggtaaagatattgcaataccagacatgtcaaatccaacaagaccaagagatgaaaggcccatggacactataagaggattcgagtactcgataacaaaagacccacgctggttacaagagttggagacatctaaattaggatttaaagtcagatctggattctcagccatcaatcgagattcacaagcttcagtaaatctacctcaactagaagaaaaggtgataaaagatcaaaagagcccaaaaaagcattctagatggtggttctctcggttatttggcaggtag

SEQ ID NO: 4244 - DNA, 477 bp, Saccharomyces pastorianus
atggattctcagacattaattcacaaggctaataaagtgtcatactacggcggtgctaccagcggagagtcctggaggtacgattggtaccaaccatctaaaataagctccacaaagcagcaaccacagcaacaagtgggaaacgtggagaataacgtggagaaatacccgttcaggtacaagacgtggttgaaggtccatgaagatgatgggaaggctttacaggaagggggttgcgaagatatactggacttgagattgtttgatagaacaataaggaaagagtcccaaaccgcatcgcacattaaaggcgacacaaatattaccaacggggctccttctactaccgaaggaggcaaagccctaagtgtggatgatataagaggtgctgtcggtggcagcgaggctattcctgggctatctgcaggtgcgaataatgagaaaccagaggaaagcaaagatgtagagatgagttga

SEQ ID NO: 4245 - DNA, 894 bp, Saccharomyces pastorianus
atgctggaagaaggttccagggtcctggtggttcttccacatatcttgcccaacgctaccttacagagaattataaagcagacggttccatttttaagaaaatggcaaagccaattagacgtggtagttatccccgagttcgagacctcgttccaattggattctgcactgggcaagatgtacagtgtcatccgagatgttcttttgcgctatgaaatgatcaacagcggtatcaatgtcatcttcaacaacaaacaatttgccaagagcagtctgcaatggaaggtgggtttattgccacacggttccactttcgacacgtggcagctggaactggaaaatgagcagtgtcacaatacagaacactattccctacacgaagacactgtcgaaaggatagtcggtcccaaggatgctaatgaattccgtgtaactgcgttaggcgggacatttgaccatattcacgatggacacaagatattgttgagtatcgctgcgttcatcacatctcaaagattaatctgcggtatcacatgcgatgagctgttgcagaacaagaaatacaaagagctaattgaatcttacgagacacggtgcagccacgtgtctcgattcatcgagctactaaaaccaaatctctcggtggaactcgtccctctgaaggatgtctgtgggcccactgggaaagtgcctgagattgaatgccttgttgtgagtagagagaccgttgccggggcagagactgtgaataagacaagagcagagaggggcatggaccgtttaataatacatgtggtcaatgtgcttggaggcagggaggaagacggctggagtgagaagctgagcagtacagagatcagacgtcttctccagacgtctcgccccttaaactag

SEQ ID NO: 4246 - DNA, 1749 bp, Saccharomyces pastorianus
atgtctaccataattaacgatggagaaggtacgaagttccaaagggaaaactgggaactgataaagtcccatatctcacccataatctccaatttaactatggataacttgctggaatcatataaagatctgttccaagtcaacatagtcgtcggtggcaatatagtttgccagaatgctgtggatttcattctcaagaaacagaacaaaaggcatattcccgctttagcagctttaattaccttgttgaactccgatatcccagagattggcgaaactttagttaaagaattaatgctgacatttgtgaatcagttcaaccacagagattaccaatcatgtgataacattcttcaatgcctctccattctgtttctttacgacgtggcccatgaaattatcatcttacagattctgttgcttttactggaaaagaattatttgcaatttgtcatctcagtgttaaagatatgtggctggaagttggctcttgtgagcggaaaaactcatcatatgatctgggagaaactaagatatatcttgcaaacacagggtccgtctagaactgtgcatgaggccctggaagaactatttgagatcagacaaaccgactaccaaaatggatctcaaggtttgcttgttttggagtctagtgactatacagttaatacacactcttatattgttaatgatgaagataaagctaacaataaactaggcgattttaaagaatgtacaagatttgacgaattgaccaagatattcgacgccctgcgacaaaaattattgacaaataatgtgtccaacgaggatacgaccgaagaattaaaaatcaatgacatgacgtctgcgaatgacgtcgagttcaaaaaaaaaatttatctggttttgaaaagttcgttatctggtgatgaagcagcccacaaattactgagactaaaggttgctaacaatttgaagaaaactgtggtggatatcatcattaagtctagtttacaggaatccacattctctaaattctattcaattctatccgaaagagtaatcacgttccataggagttggcaaattgcatataatgagacctttgaaaaaaactacaaggaagatatggaagacttcgaaactgaacagttgcgcatcttgggtaaattatggggacatttgatttcttatgagtttctccccatgaagtgtctcacgattattaggttaaccgaggaagactcgtgtccgcaaggaagaatttttatcaagtttttatttcaagagttaatcaacgaattggggttggacgaactgcaaacaagactagcttccattaatctcgagggaatgttcccactggagggggatgctgaccacatcagatactctataaatttcttcactgctattggattaggtgtattgacagaggaaatgagaagtcggttgacgattgttcaagaaatcgaggacgcgcaagaggaggaagagagactgaaacgggaagaagaactccgggagctaaggaaaaaggtcagagagtcacaactatctcaaggaccaaaaattcacgaatccagattattcttacgagaagatcctagaggagacgccagatcaaggccgcctccatcgtctgctgaccggaagcgtgccagatcaaggaccccgccaagaggtccaagaaacaaccgtaacagatccagaactccgcctgcaagaagacaacgccaaagatcaagaaccccgcccagaagataa

SEQ ID NO: 4247 - DNA, 594 bp, Saccharomyces pastorianus
atgaatgaatccacagtgggaaactacaaagaaggtttgtctattgcacaagattcctcagcaaaggactcagacgagaatttgactaatttggtgtatataggaaaagagaaaaccattaaattacctaaccaaaatattcccaagactgtacgtgtaacggttgacacacagcgcaaagaagtagtatcgcccagagatgcctacaaaaacagcccattgggatatcacgttcgcgtgtccgacactttggatgaagtttccgaaggatacacaaagactctttgggtcaacagtggcgactaccactacgacgaagctttgtcaaggaactacaaggcagaaacgaaactcccatacgttacaaagataacaaaaagctcaaaatcacaaccaccatgcaatatactgcttatcttcggcaaatgggaccacttgaagcgttgtttcaaaagatctgatctagaatcgtcagcgttgcaccactacttctcagggcaactagaatttccaggtacagtaccccaggggaagctgaccatccaagacagcttcccaatagccctcaccatgctccaacgttggaccagctga

SEQ ID NO: 4248 - DNA, 1971 bp, Saccharomyces pastorianus
atggttaagagttctggtaaagagtcaaaagagcctgctaagggtaaagtgcgaggcaagatttatagggtaggaaggatggtaaactggcaaacgttatttttggtctcgttgaggagagaaggcagttcctcccgttataaatacaagtccaatatagaaagaatcacacatcaggcctttcttcgctctaaaaaggcctttaaaagagcacaacctgcttatgagtattgtgatattggtggggagctgtactatgcctcacttgtggacttacagaaactcttgctacaagatattaatgcccccaatggacacgttcttaaaattgttaggacagatctgatcaaaaaaagtcgaaataacagagttcagcattgggatcagattctacctatctttagtcatccgttaagcctttacgaagcgccgctgggtgtgatgaacaaggactacaagccgtcgttcgaatggcaacaattgataacggtacggtccaaaggtgaaaaatatcaattgcaacgtgttatctggcccaaatcggtgctcgcgaacttctgtagaggaatcggtgttaagaaaactacttacgataggctcctgaagcaaaatgatgaacaagtgcccgtgtttgttaaccccgctaatgcaaaacctttgccacttttcgagattactgacgacacagaaattggcgaatttgatggtattggtatcttcccctactttgtagaagagcatcagaggtttttcattaccgaggtagataagctgaaaacaaagttaatctcaccactctgtagcccaaatgagaaaacaagaatcgataaagctaacagcggtcgtttgctaggggatgaaaagggtaaaccgtttcactcggatacaaaaggcacagcgaagcaagtggcaaatggcaacattgctaccttaagacaactcctaaatgggtccattggccagaagacactatggagcaaacaaacaaccaaggatagaacatgtcctggtgacgtactgagagccacagtgttatcaaacgatttttccatgcgccagttgaagaacgagttctgtaaaaacttcattctttataacatattcaccatcttacagcgtaataagaagaatatccgttccgacacttctggaactgatatatctgcttcaagttttgattggaaagtttgggactcatacatatggaagcagtaccaagaaaccgagtccatgggaattcccatgagtcaagctggcctgatcaactacaaggcaaaatacgatctatttctgcaggatttacaaacctattctacactaataatttcggagatgaaatggaaccagttctccatcttccataatgacaaaatatcactgtcgagatttgaacacattggactgattttacaaaccatattgaccaactctcgaatgataaaggttttccaacccaacctgtgcaaatttatgcaagacgacttacgatcaacttttttggaatcgataaatttcgttgactcaataagtaaaacggtagagcctagcttcacaaacgaacaatcactgcaatctgcgagtgcgttatggaagttgactaatcaattattattcttcgaaaatgaaatatacgctgagaatttccgtgtcaatagacccaaccaaatccgttccctgacagtatcagaaaactttaaaatcgtgatcctggataaattaaacgccgttcccgaaacattcaagacgttgttgaagttcatgacgcaaataagcacatattttgtggaagatttgactgacatagagcttcatgggcacatgcactgcattgagaagaagatgctagataagtcgacattcatgtatctgtacgaattgaaatacaatgaagctcccaaaatgattccgcctccagaagagaaaatcgtcgataatattattgacttattatcaaatgataaagaaaattaa

SEQ ID NO: 4249 - DNA, 306 bp, Saccharomyces pastorianus
atggagtcggcgttagcaccgaagaattcggcaacttcttccttggtggccttgaatggaacgttattgacgtataaggtatcctttgatctttccatttggtctaacggaatcttttcccttttttggccattaaaaccacccctggcaccacctctgcccctgaagttacctctacctctggcaccacctctgaaggtacctctgaaaccgcctctgaaaccagctctgcctctgaaggcgcctctacctcctctgaaaccacctctttgcatttggccgggggttctagctcttttgatatga

SEQ ID NO: 4250 - DNA, 942 bp, Saccharomyces pastorianus
atgaagccatcagtgccagccaccccagcggagtccagaaactccctgtggtcaattttgatctatcttttcgctgtccagggtctagggtccgccatcatttcaggcggcatagagttcgccattgcctacgctatgtaccattcccgcaaagatcgcatcaccctgtgggcgttccctcacacactctcgggagattgtgcgctgagtctgctcattcaggtcggcctcacatgggccagtgaagagctcttggtcgggttcgatgactacaaaaaacctgtgtttagactaaataaatgggttgtgaagccatcgcctctgcggaacgactccagcgaagagatcccggcgcccaggaagcgcttcattgtagactacttcgagtccgaaaacaaccttatttccaatcaaagcgctctctataacaaccacaagtggctattcgcctttctagaggttaaccgagggattatacccaagggtagcgatgccacgctgaaaggctttcttgcatctcaattcattcatgacagctcccgctctaagtttgtgaactttctggaatggacggtacagaaattcatcagatccatgattctagccgtgcccatgttcatcgtaatttggcccatcagtatggggattcttgctggcataggccacaagatggggtcctatgaatactacttcaacgattacccgctaccgcaagttatgaagttgatttccggtgttgtcattgcgttggtatgcaccccagcgaccatcgtcgtcattgcgttgcgaaaccaattccatgaagagctttactatgaaggtttagccaatggcacgctacttcaggaccaagaaagcagttccgcgggtaatgtcagttcgggatccacagatcaagatgtcagcagcaccaagcaacaatctatggaagcaatggtatga

SEQ ID NO: 4251 - DNA, 561 bp, Saccharomyces pastorianus
atggtccaacgccaacgaagcagatctatcgtggtgaagatggaagtggtcggcaccgtcaagaaggtttactcgctgatatcgaagtttacggccaactcgctgcccgagcccgcaaggtcccaggtacgagaaagtttactgaacctgcccacgaactggttcgatagcgtccatagcacgtcactgccgcacgacacttcgtaccactacgctcacaggcaggaacaagaagtggggcggcagcagcggcaagagcaggaaagggacagcaatgacgacgatgaagcgcaggacgatgcgtcgtcctcgtcctcttccgtcaccccgaatgggaaagtactaatcctcgcgaaggagtcgctggaaatggtcagaagtgtgatgggcgtggtcgactccacgctgggcaaggctgaagagtgggtgaagcagaaacgagaggtgaaggaaatgatccgagaacgcttcctgcgccagcagcagcagtacagacaacgccaacagaacgataacaaccgcataaaacccttccaagatacctcaaaaagtggcgagtag

SEQ ID NO: 4252 - DNA, 552 bp, Saccharomyces pastorianus
atgtcagaaagtcagcgtttaggattatcggaggaagaagtagaagcggctgaagtactaggagtactgaaacaatcatgcaggcagaaaccacagcgaccagaggacgtctcgcgaggtgacgaggggagatcggcgagtgaatcgtcgacgacgcctctgaatatactggatcgcgtcagcaacaaaattattaacaacgtcgtgacgttctacgacgaaataaacaccaccaagagaccgctgaagtcgatcgggagactgctggacgacgacgacgacgagcacgacgattacgactataacgaccgggagtttttcaccaacaagagacagaagctgtcgcaggcgtttgccaaggggaaggacaacctgaaggagtacaagctgaacatgtccatcgagtccaagaagaggctcattacgtgcctgcaccttttgaaactagccaacaagcagctgtccgacaaagtttcgtgcttgcaggatctcgtagaaaaggagcaggcgcaccctatgcataacgaagacggcagcctcgtgggcgactag

SEQ ID NO: 4253 - DNA, 546 bp, Saccharomyces pastorianus
atggtgaaacctcggaagtgctatctatgtatatggggtacgtgcgagtgtcagacgatgtatgcgtactcgtcgtcgctgatggtcttgtatcggacccaagggaacgactggtactgcagctgtggctcttcgaccttcaggtattcgactttcagcccgctgcatgtgcaatacgggatctcgaaatcgacgctgaccagcttatctcgaggggcgacatcgtgcgtgtgggggagacgctcttcgtgtacctgtttgtacagttcctctagcttgggtcccgtgcgcaggggcggcgggttcatagaggttttcagttcttcttgcatccggtcatattcttcctggttgaacagtgggaactctgccaccatggatgccagagcgctggcattgtcctcctgtggggcagtgccagtgttgcgttcacggtggcccttcatagtttctatttcccagagcaagaagtcgtcgctcaggttgaacacgactttgcctaagttggccttgaaccggatttgcttgctcaggtctatcttgtag

SEQ ID NO: 4254 - DNA, 978 bp, Saccharomyces pastorianus
atggacacatcaccttccgatgccaacgggttcataacattctttgattctcagcaacaagggcaggaccagtgcaatgagagctctatattccaagacaacaatgaatgtgtaaaacagcagcgaaatttgttaaatgaccaaacgtcttctttccctacgttgaacgggcaatgccctgttttaagtcttacggagtccggtaatgatttaatgttccacaacggcatatctctcgtccaagcaagtcaaccaacacctaactccggcgactgtgcttcctacctggatgaaaagaagagtaacttcggtaataataatatggacactaattattcctctggaaaaaaggataactcttcaggttcgaaaactcctccactttatagtgacaatcttccaggtgactccaaggcaaagaaaaaggcacagaacagggctgcccaaaaggcttttagagaaaggaaggaagcccgacttaaagagctggaagataaactgttgcaaagtgagaagaaccgtcaaagtttgttgaaggaaattcaagagttgagaaaagcaaattctgaaatcaacgcagaaaataggttgctactcaggaatggtagtgaaaaagccacgaagtcctctagagacgttatagatgatagtaattccaaatactctttccccaccaaagatgaattctccacttccatgatcctagaagggaaactggataataaaagtacaaactcgtcaaaggacaatgtgcccataacaaaacaaaagacccagtacaccgacgaaacaggaagacatgtactaacggtccccgccacttgggagtatctttacaaactttcgaacgggagagattttgacgtgacttatgtcatgagtaaattacaagggcaagaatgttgccatagctacggaccggcttatccaaggactttgatcgattcactagttgaagaagccgcttcaaaagaatga

SEQ ID NO: 4255 - DNA, 453 bp, Saccharomyces pastorianus
atgaggtttgaagaacgactacagcaactggtggcagaggagtggggtccggaacagtcagacgcagaagtgctggtgatagtcctgggagacgccgccaggaagtacgtggaatctggagcgctgcgggagcacgtgatcccaaagacgatcgcaggtcacgtggccagccgtgggcgggtagccgttgtgtttctcgggcgggtaaagtacctctacatgtatctcacccggatgcaggcgcaggcacgtgctccgcggtgctcgcacgtgctcgtttacggcctgtgggacctcaccgcgacccaggacggcccacggcaactgcgactgctcagcctggtgctgtgccagtgtctaaatctgccctctaaggtcgagttctacccagaaccgcctgtggccagcgtggctgcgcggctgctgcagtactggaggcacgtgatggggtag

SEQ ID NO: 4256 - DNA, 138 bp, Saccharomyces pastorianus
atgtccactgattctattgttaaagcttccaactggagattagtcgaagtcggccgtgtcgttttgatcaacaaaggtcactccgcaggcaaattggctgctatcgtcgaaatcattgaccaaaagaaggtatgttaa

SEQ ID NO: 4257 - DNA, 144 bp, Saccharomyces pastorianus
atgctatggggtggggccagtatgttcgctttatttgtgttcactgaagggtggcccaaattccaagacgccatatacaaaaagattccattgttaggacctacattggaggaccatactccaccagaagataagcctaattga

SEQ ID NO: 4258 - DNA, 1311 bp, Saccharomyces pastorianus
atgattgagtatggaaacgtactttcatgtcttctagaaaagagaaagaacattggatttgtttattttgacaacgatatttccgcaagaaatgtaattaagaaatttaataatcaagagttttttggaaataaagttatatgtgggatacatttcgataaagaggtaagaagtagacctgaatttaccaaaagaaaaaggatgattggttccgacgttgttatagaagatgaattgtcaattggtaaaaatttgccagataatgctcccttaaaaacaatacttgtcaagaatttaccgacggaaacaacacaagaagaagtgctagatttctttagtgccagtggtcccgtcaaatctgtatttgtctctcgaaaacaaggaaataagtcacctaaggcatttgttacatataaaaatgaaaaagattctaaaacggcacaaaaagatttggacaaaacagtcttcaaaggccaaactatttgggtgggccctgccaaagatagatgtattcataataaaaatgggacgagcaagaagacaaagatttacttgaaaagtttaagcttcaattgtaacaaggaatttctttcccaagtttgcatacaagagagaataaaatatagcgagattaaaatcacaaactataactcatctaattggacattttctggatacgttgaatgtgtttccagttgtgaggctgagaaactatttaaaatcttagatagaagactcatcggaagtagcctggttgaagcatcatggacaagaaattatgatcatgtgtttgatgaaattggttataatggtaatgacgacagtaatatcccagttaacactagctctatgatgcgttttcattatccacagcagcaaccttcttaccagatgggactaccatcacagcttctatcacaaatctccccgttcccatcgtatgcaaattcctgtacgaacatgaactctcttgtagcgacgccaatgaaacctcatcctgcgtttgacctcacttcaagtaacagtaacgaaaaaatgcaacctgttagagaatgtaaacaaggaaatgaagagatattagagtcattaaaaaaagtcataaagagaaatctacggtacataaatatttccggcttgagtaaaggagaaaacttgcgcagtatttcagaatttatttttgaagtcttttgggaccatgattctggaaggctcgctcactttttattattaacaaatacttcacccgaatcacagaagagcttacaaaaacaaatcattaaggctgctgaaagtcttggattttcaatttaa

SEQ ID NO: 4259 - DNA, 747 bp, Saccharomyces pastorianus
atgacaatttctcaaggtaatgtactaaacaatatctctttaaatagcaagcaaaatctgagatcagttcctaaaattagttcaaaagtaaaggctgtgaaagaaaaaagcttcaaggcgatgtccaccgaaacacaagaacataagcaaagagctggatatatgcgtaaagatttgcaattgaaagagtttagaattaaaggccagacacatttcaaaaatgacgaatgcaagaaagtgattcaggaaccgaaagagcagttacaaacgcaaaaaaagcctgtctctaatattcataatgtaaaagaaagttcagaaaaaaaatttcaaagggcatcaaaggttagttcacttttcattgggaagttgaaaccgaccgtcactgaggaaatgttgaagcaaacctttaaaaagtaccaatcttttgaatctgctaagttatgtcgcgattttctcaccaagaaatcgttgggatatggatatttaaacttcagaaatgaaaaagatgtagattctgcaagaaaagattacaactatacgttattctttggccaagaagttaaaatcatgccatcaatgaaaaatacattatttaggaaaaatatcggaacaaacgtctttttttcaaacttaccggtagataatcctcaactgacgacaagatcattttatctaataatgattgagtatggaaacgtactttcatgtcttctagaacagagaaagaacttggattggttaatttga

SEQ ID NO: 4260 - DNA, 1116 bp, Saccharomyces pastorianus
atggcgggtgccggcgccggtggtatggtcggtattgaactgactgatttcgtctttattttaaattctgaggaagcggtgaggtcattttctgagttcggtacaatcactctaggtggtaatgtatcagtttccgcaggtcctcttggtagaagtgcggaagcagcagcatcagcatctacaggtggtgtctcggctgttttcgcctattccaagagcaaagggttattcgcaggtgtttctgtggaaggttcagccatcttagagaggagggaagctaacagaaagttctatggtgatgactgtacttcaaagatgattttgtcaggtagagtaagggttccgccagcagcagatccattgcttcatattctagaatcaagagcgtttaattttacaggtcccggtcatgatgatgatgctgacgaattttacgatgacgaccaaaacagcgatgaaaacagccgttactatgatgacattccagactcctttgattctgctgatgaatcctcaacacgcccaaacacaaaatcgtcaagaagaggaatatcacaaggatctcgcagtcgttatgaagatccggtttatgatgacgaatctgacagtgccgatgacgagcgtgactacggaaggtctcccgataagagtgctagccacaatataggcccgcatgtagatagaggcactaaaccgcgcactaatactcgatgggaagatgatttgtatgacagagcttctgggtatgccagtaaagaatatgacaacgctcgaggaaatacacgtagctatggtagagaaagaggctatagccaaagacatggccaagactatttcagcggcgataacaatgccgataattcatcgcataaaatgtctaaaattgacattgacaataatcattctagggcgaagtcgccaacatctcttcactcgacttcacaaacagctgttgctctgtataactttgcaggagagcaatctggcgatctagctttcaagaaaggtgacgttataaccatcttgaagaaatcagattcccagaatgattggtggacgggaagagtcaatggcaaagaaggtatttttcctgccaattatgttcgagtttcttag

SEQ ID NO: 4261 - DNA, 1173 bp, Saccharomyces pastorianus
atgtggtctggagggaaagacatagtggatcagatatttgatactgggtattgggtggtttcgaaaagtgttgttttgggtgacgagatcagaaatcatgtcggaagatctatagaaaccattaatgaaaagatttccaacagaaaggctctccccgtgcaggaaagcaatttcagcactagcagacaggatatatttaaaaaattgaaaattggattccaggatcattggaagcttggattgggcctttctgccacttccctttgcctttaccttggatatcggacctttttaaaactcccacctcatttacctgaggcggaatctaaggccgtgttgatatttggtgacatgaatgatcctatcgcaagaaatcaggtgatggatttatatcgcagaaggtttatagtgtatatttgcacagagaatgcagatgtttataagaagcatgaagaagatcaggattttgtatattacattgatcctacttgtgaaaaagacttcgaagccttttatcgtgaggtgccaaggctagcatccatattgtttacgccaaggttatcatatcatccatccggaataatatcgtgtgactcattagaatccgaaatacattcaagcatttttgtgtattatcaagcattattaaacgttataccacatttaaagaagaagacacaattgattctatttgacccgtctttaacttcggaactaaacttgattcatcatagcactgaaatcatatcatctggaataatcaactcactattcaatattttccagagacatcaaagattaagtgtttttttaatcaagcttggaattctacaaatcgggtctcagccatcaaactataaattcctgaacacatccggttcagatatacacaaggccctacattaccccgtatacaaaatgataatggacgccaatgggtataaagtaagacaattcttcaattggtttgtgaccttggggggatggaatactgtttaccattgcggtcggtttagttacttggccacatggccgtttgcgtcattcatatttaaccgtcaaacatgtttttccttcaaacatctcaaaaaacggttggccagcgcataccgtaatattatcgccattctgcccacaccacagtcaaacccatctgaagaacgtctaaagtag

SEQ ID NO: 4262 - DNA, 1755 bp, Saccharomyces pastorianus
atgtgtgtgtggcctgggtcagcagtcggtgctgaccattgctcgggctcccaggcaagcagacagatattacaccttgattttttcaccatgtcatctttgtacattaaggagattgccggtgtggacgaattgaccacggccggttctcaagaccaacctttcaagaccccagcatatgctctatttgcatcccagcagaaaagtgatgccaccgaacccaagttgtttgtgttcaaggctgaagacaacgagtttcaggagatcagtgcctctgctttgaagaaggctcgtaagggctgtgaaggtttaaagaaaaaagctgttaagcagaaggaacaagagttgaagaaacagcagaaggatgccgaaaacgctgccaagcaactttctgccttgaagatcaccataaaggaggacgagtccctaccagctgccaccaaagccaagatctacgattcttacgccaaggttgggcaaagagtcaagatctccggttgggtccacagattgcgttccaacaaaaaggtcatcttcgttgtcctaagagacggttccgggttcatccagtgtgttttatccggtgatttggccttggctcaacaaaccctagatttgactttggaatccaccgttactctgtacggtaccgtggccaagttgcctgaaggtaagaccgccccaggtggtgtcgagttggacgtcgactactacgaaatcgtaggcttggcccccggtggcgaggactctttcaccaacaagatcgcagagggcgccgacccatctttgctgttggatcaacgtcatttagccctaagaggggacgctttatctgctgtcatgaaagttcgtgctgctctattgaaaagtgtcagacgtgtttacgatgaagaaagcttaaccgaagtaactccaccatgcatggtgcaaacccaagtcgaaggtggttccactttgttcaagatggactattacggcgaacaagcgtacttgacccaaagttcacaattatacttggaaacctgtttgcccgctctaggtgatgtctacagtatccaggaatccttcagagctgaaaagtcccacacaagaagacatttgtccgaatacactcacatcgaagccgaactagctttcttgactttcgaagacctactacaccacatcgaaactgtgattgtcaaaaccgtccaatacgttttggaagaccccatcgccggtccactggtgaagcagttgaaccctggcttccaagccccgaaggcccctttcatgagactacaatacaaggacgccatcacttggttgcaagagcacggcatcaagaacgaagaagaccaagacttccagtttggtgacgacattgccgaggctgccgaaagaaagatgaccgacaccatcggtgtcccaatcttgctgacaagattcccagtagaaatcaagtctttctacatgaagcgttgctctgatgacccacgtgtcaccgagtccgttgacgtcctaatgcccaccgttggtgaaattaccggtggttccatgagaatcgatgacactgaagaattaatggccggcttcaaccgtgaaggcatcgataccgacgcctactactggttcatcgaccaaagaaaatacggtacttgtccacacggtggctatggtctcggtaccgagcgtatcttggcctggttatgtgacagattcaccgtcagagactgctccttgtacccacgtttcagcggtagatgtaaaccataa

SEQ ID NO: 4263 - DNA, 2607 bp, Saccharomyces pastorianus
atgtccagacttcaatctttggtggcagagaactcagatttgcgttcaaagaatgagaatctccagaaagaaaaagctgtattgagtaaccaattaaaaaacaaggaaaatgaactacagaaaatgagagaaaagatagataaccatcaaaaagagctagccattttttctaagcaaagagatgatgcagtcaatgaacacggtaaaattactgttgaattaaaggaaaccagaaaccagctcactgaatataaatcgaactgtcaaaagattgaagacgaatattccaactttcaaagacaaatgaaagaaaaagaacaaaagaaaagaactgacttagcggaatctttgaatgataacaaggtcaaggaattagaagctcgcctatcacaagagatatcattgaatcagtacttgaataagaggatatctggtccatctatacaatccaatagttcgccaacggaacgttctgtatcacatgccgatgactcactcaataaagaagatgtaatgaaaaagtactatgaccttcaactagcatttactgaagtgactagaaatttggagaacgagattgaggagaagaagaacttgatttctagattaagatttacagaaacaaggctagcttcttcatcattcgatgatcagaaagttagagctcaaatgaaaaagttaaaaaaactagtccaagatatggatcctaacattcagttggatagtcttttggaggagcccctaaaccgttctaccagtgaatcagatatcaataaattgatgtcagaagtcgaatatttaaagagacaattagatatcgaagcaagagctcattatgatgcagaaaatgtcataactgccttacacgataaattcagaaaaattcaaggggaaggctccctatcatcctccgacatttataaactgaagtttgaagccagtgaagagagggttaagtctttggaagacaagctaaaaactatgcctttacgtgatagaacgaatttgcccgttggtgatattataaagaaccgtgatagtatatcgaagtacgaagaagaaatcagatactataagcttgaaaattacaaacttcaggaaatactgaatgaatccaacggaaagttgagtaaattgacccatgagctgagacaatcaaactcaaaagaggccttacttagtgaacaactagccagattacaaaaggatcttgaatctactgaacgccaaaaagaattactttcatccactatgaaacaacaaaaacaacaatttgaagactgtatggacgatctacaagggaacgaactacagctaagagagcatgttcacgcactcaaacaagctcaagaggatgtaaagagtatggcgactatcattgagagactaaagactcaaaacaaacaaaaggaaaagctcatttgggaacgtgaaatggaaagaaatgactcagatatgcagttacaggaaacgttgttggaattgaagagagttcaggatgtgaaaaaaattctaagtgatgatttatcccatttaaaggagcgattaggagcggtggaagacagatctcaatacacagatgagataaatagattaaaagaggaactaaaccggtctttgaaaaccgaaaccaacttgaaaaaagaatttgcaacccttaaatataggttggagacatcaaacaatgattctgaagcaaaaatatctgatttattaaaacagcttgatcattatacaaaggtagtagaaatgttgaataatgaaagagatgccgtctctctttcagaaaacgagctgtatcaaaaatttgaagctcttaataccgaatgccagtcgcttagaagtacagttgcatctctatcaaagattaaggaggagttggagtctaatttaaaactaaaaacggatgagctagatgcatcaagtacagccttcacaaagtctgctcaagagaataaagagataactgaaaaaatcaaatacttggaagaaacgctgaagcttcaaatagagcaaaatgcaaggaacggggaactggttagaaaactgcaagatagcagcaatgtattcagagaaaaattcgacaatgagaaacagaagaacattgatttgttcgaagaaaatcaatcgtcgcaaaagcttattaccgacttacagtctcatttagagaatttacaggacagattgtctgacacttctgaaaagaaagcatggctagccaagatacatgagctggagaatttagtaagtcaagaaaccaagttgaagtacgaagaaatgaaaaaaaataaaaacatggagaggatggtcgaggatttacaaaataagaactctcaacaatcagacgtcattgaactagcgaacagaaacagagccgaatttgaagaaactgctttgaaatatgaggcacaaatttctgagttggaaaaatatatttcccagcaagaacttgacataaagaaatctatcagggataattcttcttaccatgataaagtgcaagagatggcgcaagaaatcgagttttggaaaacccgttatgaatctaccatgatagggtcaaaaaatatggatagcaataacgcagaaggaggagtttttatttaa

SEQ ID NO: 4264 - DNA, 2943 bp, Saccharomyces pastorianus
atgactggcggacagtcttgcggtagtaatatgattgtctggataccagatgagaaggatgttttcataaaaggggagttaacgaataccgatatcaccaaaaataaactcacagggcaggaagagcagatagggattgttcatcccttggattcggcagaggcctcaaatcttgttcatgtgcgaatatcccatgtattcccagttaatccgtcaacgtttgacaaggtagagaacatgtcggagttgacccatttgaacgagccctctgtgctctataatttagagaaaaggtaccactctgatctgatttacacttattccggtttatttttggtcgccatcaatccttatcgcaacttaaatctatattccggggaccttataagcttgtaccataacaatcataggcagctatctgaggatggcttacaaaacgacacttatgaaaaactaccacctcacatctttgcaattgctgaagaagcttacgagaaccttttatctgaaggtaaaaaccaatccattttagtaacgggtgaatctggtgcaggtaagacggaaaacacgaagaagatcctgcaatatttagcgtctataacttccgtttcctcttcatcaaatgccacaccggtcaataacggttctgttgtagaaagtttcgaaatgaaaatcttacaaagtaatcctgttttagaatcatttggtaatgcgcaaactgtacgaaacaacaactcttctagatttggtaaattcataaagattgaatttaatgaacacggtatgatcaatggtgcgcatattgaatggtaccttttagaaaaatcaagaatcgtacaacaaaacgcaaaggaaagaaactaccacatcttttaccagttattatccggattagatgatcatgaattaaaaaaattgtgtctaaaatctagaaacataaaggattacaaaattttatcaaactccaaccaagacattataccaggaattaatgatgctgaaaatttcaaggacctgttttcggcgttaagtattatcggattctcaaaagatcaaataagagggatattccaagtagtggcaattattttgttaattggtaacatcgaatttgtctcagatagagcagaacaagcttctttcaaaaatgacgttggcccaatctgtaatgttttgggtgtggacgagaaagattttcaaactgccattttaaggcctagatcaaaagctggcaaagagtgggtttcgcaatccaaaaactctcaacaagccaaatttattttaaatgcactgtcgagaactctttacgaacgacttttcggatacattgtcgatatgatcaataagaatttggatcatggcagcacgactttaagttatatcggattattagatatcgcaggttttgaaatttttgaaaacaactcctttgaacaactgtgcatcaattatacaaatgaaaaactacaacagtttttcaataatcatatgtttgttttggaacaaagcgaatatctaaaggaaaatatacaatggaattacatcgattatggtaaggatttgcagttgacgatcgagttgattgaaagcaagggtcctccaactggtgtgctcccgttattagatgaagaagctgtcctgccaaagtcaactgatgagtcattctactctaagctgattttaacatgggaccaaaactctcctaaatttaaacgttcaaaattgagaaatgggttcattttgaagcactatgctggggacgtagaatatactgttgagggctggttatctaagaacaaagacccactaaacgacaatcttttatccgtattgtctatctcccaaaatgatatcatttccagactattcaactcggagggtggaaaatcttctagtcaagaaaagcagacctctgatcaagaggtaaaaaagtcaactagaacaagtactttcaagaccacgtcatcacgccatagagaacaacaaataacattactaaatcagttagcttctacgcatccacactttgttcgttgcattattccaaacaacgttaaaaaggcaaacacgtttgacaggaagttaatcttggatcaactgcgctgtaacggtgtcctagagggtatcagacttgccagagaaggttacccaaatagaatagcatttcaagagtttttccagcgatataagattttgtatcctgaaacttcaaactctgtaccgtttcattccaaattaaggaccggcatcaaacaaaactgcgagtttcttctatcttctttacaattggatgcaaatgtttataagatcggtactacaaaactcttttttaaagctggagtattagctgatctggaaaaacaaaaagatgctaaattgaactctataatgattaaaatcacagcaagcatacgtgggtgcattataaggaaggaaataacttctcatttacaaaaattgaagaatgcgagggcaattggtggtactttcagactatacaatcaattagtaaaagaagatccctggttcaacttgttcattagaattaaacctctcttaatatcgtccaatgatatgtcacgaaccaaaaaatttaatgaacaaataaacaaactaaaggataacctacaggagatggaatctaaaaaaaaatttttggaagatagaaatcaaagtaccgttaatgaattgaaagatacgcaagaattgctaaaactagaaaaagaaaatttaagaaaaaacgaaagtttattaaagagagttaaaactaattcagaaacgttgcaaagtcaatttgacgatattgttacggaaaaaaatgaaattaataagcaaaaattacaaattatacaaaaccttgaaagagccgagcaaacgatccaagaacttcaaggagttattaatgaacgggaaactgccttaagaaagttaagttcagaatga

SEQ ID NO: 4265 - DNA, 1866 bp, Saccharomyces pastorianus
atgtctaagcaatttagtcataccacaaacgacagaaggtcatccatcatctactccacgagtgtcgggaaggcagggctattcacgcctgccgactacatcccacaggagtcagaggagaacctgattgaagacgaagaggacgtgaacgaggacgaggccggtgaacagaggcccatccgcggcggtgatggggcccaaccggagagggagggcgagtaccattcgctgctggacgccaacaactcccggacgttacagcaagaagcgtggcaacaggggtacggctccaacgaccgcaagcagttgctggaccaagaacgggacttgctgatagacaacaagctgcttttgcgcgacggtgacatcggaggagacatcgaaagtcgcgaccacggtcacagccctggaccggatggcgcagacaggcccacggagatcgaacacgcatgggacaacgccattgagagcggccagcccatcaactccaccttcaagcgggagacacaggtgattaccatgaacgcgttaccgctcatcttcaccttcatcctacaaaactcgctatcactagcatccattttctccgtctcccacctgggaacgaaggagctgggcggtgtgacgttggggtccatgaccgcaaacataacaggcctggccgcaatccaaggtctgtgcacgtgtctggacacgctgtgcgcacaggcgtacggtgccaagaactaccacctggtgggtgtgctggtgcagagatgtgccgtgatcaccattctggcattcttgcccatgatgtacgtgtggtttgtctggtcggagagaatcctggcgctgatgattcccgagagagagctgtgcacactggcagccaaatacctgcgcgtcaccgcattcggtgtccccggtttcatcctgttcgagtgtggaaagaggttcctgcaatgccagggcatcttccatgcgtccacgatcgtgctgtttgtgtgcgcgcccttgaacgcggttatgaactacctgctggtgtggaacgacaagatcggcatcggctacctgggcgctccgctctccgtggtgatcaactactggctgatgacgctcggactactaatatacgcaatgaccaccaaacacaaggaaagaccgcttaagtgctggaacggcatcatccctcgggagcaagcattcaagaactggcgcaagatgatcaacctggccatccccggtgtggtcatggtcgaagccgagttcctcggcttcgaagtgctcaccatcttcgcctcccacttgggaacggacgcgctgggtgcccagtcgatcgtggccaccgtcgcgtcgctggcataccaggtacctttctccatctctgtctccacaagcacccgagtggccaacttcatcggcgcgtcgctctacgacagctgcatgatcacgtgccgcgtgtccttgctactatcctttgtgtgttcgtcgctaaacatgttcgtgatctgccggtacaaacagcaaatcgcagagctgttctcctcagagaacggtgtggtccagatggtcgtggagacgctgccgctgctggccttcatgcagctgttcgacgcgttcaacgcctcgacagcgggctgcctgcgtggacagggcagacagaagatcggcggttatatcaacctgtttgccttctactgcctgggtgtgcccatggcttacgtgctgactttcgcctaccacttgggcgtgggcggcttgtggctggggatcaccagtgcgttggtgatgatgagcgtgtgccagggctacgcggtgttccatggcgacaagcgccggatccttgccgcagcccgcaagcgtaacgcagagacccacacatcgtga

SEQ ID NO: 4266 - DNA, 1317 bp, Saccharomyces pastorianus
atgtttgtatttcctccccccgtcaaaagcagcaccgcagaagcaatgactaaagcgtacaccatcgttctcaagctcggtagctcgtcgctcgtggacgagagcacgaaggagcccaagctgtccaccatgacgctgatcgtcgagactgtgacgaacctcaagcgtatgggccacaaagtgatcatcgtgtccagtggcggcatcgcggtcggcctggacgcgctcaacatcccgcacaagcccaagcagctttccgaagtgcaggcgatcgccgccgtcggccaaggccgcctcatcgcgcgctggaacatgctgttttcgcagtacggcgaggaaaccgcgcagatcctgctcactcgcaacgacatcctgcgctggaaccagtacaacaacgcgcgcaacaccatcaacgagctgctgacaatgggcgtcatccccattgtcaacgagaacgacacgctgtccatcagcgagatcgagttcggcgataacgacacgctctccgccatcaccgccgccctcgtgggcgcggactttttgttcctgctcacagacgtggactgcttgtacacggacaacccgcgaactaacccgcacgcgcgtcccatcgtgctggtgcccgagttgtccgagggcctacccggcgtcaacacctcctcgggctccggctccgagatcggcacaggcggcatgcgcaccaagctcatagccgccgacctcgcctccaacgccggcatcgagactatcgtgatgaagagcgaccgcccggagtacgtcctggccatcgtcgactacattcagcatcacttccgtccgccgcgctgcgcgggtaacggctcgcagcagcagttccgcgacctgcaggacgcggaacttgcagcgctgcgtcgccacggcgttcccctgcacaccaagttcctggctaacgacaccaaccacaaactcaagaacagggagttctggattctgcacgggctcatcaccaagggcgccatcgtcatcgaccagaacagctacgaccggcttctgtgcaaggacaagactagcttggccccggccgcggtcattgccgtgcgcgacaacttccacgagctggagtgtgtcgacctcgagatcggcaggcggctgcccaacggcgacctggatgtctcgcacccggtccagtccgtcggcagggtccgctccaactacacgagcctggagctcgccaagattaagggcctgcccggcgagaagatccacgatgttctgggctacagcgtcagcgagtacgttgcccacagggaaaacatcgccttcccgccgcagttttga

SEQ ID NO: 4267 - DNA, 2403 bp, Saccharomyces pastorianus
atgatcgggatctcccactcgttctggataataagcgggaacactatcctcgcatcgaactccgtctcgggtttgggcacgagcccggaatggcacacgttgatgaacaccttcttggcgttctgcaactcctctgggccattgctggataccagtttggtctttatgacgaaatccgcgatgggctcgatcttggacactgatccgccgccagcatctaccgtcacgtatttgccgtcactgctgtggcgttgcttgatcggtctcagcaggaaatcggccattgtttgcgctttgctctgccaaactcccaattattgttctctctctctctctctctctctctctctctctctctcttttccgctttctttatgtaagaaaccagagcttttatttttcttcaatcgctattgttttcgaatcgctgaaaaaaaaaggaaaaagtgcccatcacatacacatgtaccgtcgcacagaagactctggtccggcagcgggttctggccaagggcagcgtccatgagctctccaattgatttgctttatgaaccgttttcccaccacgacttggcccagccatttgacccaaatctaaagtgcgctggatgcggtgccttttattcgatggattgcccactgcgggagcaaaacctctggtcatgtttattctgcagccgctccaacccaatggatagaacgccgttggtatcgtctgacgcctacactttgacctctgagagaaaaggcacgtttgaaagaagaaccgttatggttatagacgccgtttgcggcccccatgagctggatcatttgattgccacgctgtgtaacgccgccgcttccaaggacagcgagctgacatgcgtcatcaccattcaggactcaggcagtgtcaccgtgcacaacactgtgggtcagaaacgtaacgctgttttttcaattgatgactttatgacccactataatctcgataaattgaatgtcaaacatttcgaaaaaaaattaagagcgactcactcaacatcgtactggtttgcacacgactctttgaaaaagcaattgcaggaaatttccaagacggcaaaggaggggagcaagtccaaacggggcaaacgctgtaccggattagcattattcattgcctccatattggcgtctcaatgcgctttgtcaacttgttgccatatagtatcatttcttaacggcccatgtaccaaaggcgctggggaggtcttatcaagggaacgtagaaaacatatgagacaaaactatcattttgattccgagaatccaaattcgaaattgtccagaagttcgtggaagttttatgaagagttattcaagaaatttaaacagcagaaatcaaactatgaattttttataagctcgttggatcaaatcggtttgctggaaatgggtccgttagtaaattcatcaatggcggtttctcagtttgattccttcaacgacgagagattcgttagatgtttccagaaatacttgcgtttgagaaatgaaaatgccatttacaactgtaagatgaaaatattaaccgctgaaaacacttcgattgtgtatgagattcctgattatgttttgaacccgaagaatctttctctaccggtagaaatctcactggacaaccgttccacaaagaattctgtacagcttcaaattacgtttgagaatagtgagcaagcatacactaaaatcgaaacatttgtgctaccagcgcaaccaaagaccgatttgtttcaaatacaaaaaataattgcgatagccatgaaaaaaatggcttctcaaatcacgggtgatttcgattactcatccaaacataccaaggagttgaacaagcaattagcttctttactaaggcaagttcagggaattgacaaggacaagattatagaatggtgttattacttatacaaatcgcccatattatcgagcaggaacacttcaccggatgaaaggtacctcttccttcaccaagtactcaactccagtcgtaacgtctgtctttcactatgtaaacctttgatttggaattataatgactcaaaacacgactgggtcgttttggacatttcgctggcaagaacaccgatgttccaagatggcaacaccactttgtgtattgacggtgggtcatacgttattctaagaataggagaacgttttcaaagggaaggccaggagttctgttgcaagcttttaaatgatttacaaagatttacccaaccattatatgtggagactgaaattggtgggagtcaggatcgcttcttgaaaagtaaaattgttccttttgatgccagcgacaagaaaattcttgatacagaagatatgacattccgagatttcttcaacttatacaccagctcgactgaaaacaaatag

SEQ ID NO: 4268 - DNA, 366 bp, Saccharomyces pastorianus
atgtcaacagaattttttggccctatattgtcagtttatgaataccctgatcaagaatttaatacaatctgtgatgttatcgataagaccagtcagtacgctttgaccggtgcaatttttgctaaagatcgtaaagctattgagtatgctgatgaaaaattgaaatttagtgcaggtaatttttacgttaacgacaagtgcactggtgcagttgtctctcaacaatggtttggtggtgcaagaatgagtggtactgatgataaagctggtggtccaaatatcttgagcagatttgtgagtattagaaacatcaaggaaaacttctacgagttaaccgacttcaaatatccatccaattacgattaa

SEQ ID NO: 4269 - DNA, 1206 bp, Saccharomyces pastorianus
atgcttgctgctaggaactttaaactcgcatatttcaggagatctgtctcccaattatctcacatcaaacctcccaaacatatcaaaaatgagcctgtgaagttatttggtaacacagactcgaaagattgggacttgttgagggcctcattgatgaaattcaagagttcttccttagaggttcccttagtcatcaatggagaaagaatttacgacaataatgaaagagccctgttcccacaaaccaaccctgcaaaccatcagcaagtgttggccaacgtcacccaggccactgaaaaggacgtcatgaatgcagtgaaagcagccaaagatgccaaagaggactggtacaagctaccgttctacgacaggtctgccatctttttaaaagctgctgacttgatctctaccaagtatcgctatgatatgttggctgccaccatgctaggacaaggtaagaacgtgtatcaggcagaaattgactgtatcacagaactatccgattttttcagatattacgttaagtatgcttcagacttgtatgctcaacaacccatggaatccgcagatggaacatggaacagagcagagtacaggcctttagaagggtttgtttacgcagtttcaccatttaactttactgcaattgccgcaaatttgatcggcgctcccgctttaatgggtaatactgttgtatggaaaccatctcaaacggctgccttgtcgaactatttattgatgactgttttggaagaagcaggattgccaaagggtgtcattaatttcatcccaggtgacccagttcaagtcaccaatcaaattttggctgataaagatttcggagctctgcacttcacaggttctactaatgttttcaagagtttgtacggcaaaatccagagcggtgttgttgaagggaaatacagagactacccacgtattgttggtgaaactggtggtaaaaattttcatttagttcatccaagtgcaaacatctctcatgcagtactctctaccattagaggtacatttgaattccaaggccagaagtgctctgccacctctagaatatatttaccagaatccaaaagtgaggaatttttatccgatatgtttggcatcctgcagcagcaaaatgttgttccagtaaacacatccgcaagcccaatatctggtggtaatctgcgtggattcatggtcctgtga

SEQ ID NO: 4270 - DNA, 474 bp, Saccharomyces pastorianus
atgtactcgataacgttccaccaccacgcccggcagaccgtgctcatcaaggacaagtccgccatggtcaccaccgctgccgccgctgacatccctccagcgctggtgttcaatggctcgtccacaggtgttccggagtccatcgactccatcctgtcttcaaagctgtccaacatctggctgcagcgccagctcatcaagggcgatgccggcgagacgttgctcatggacgggctcacagttcgcctggtcaacctcttctcctctaccggattcaaaggcctgctcatagaactgcaggcgggcacatcaaacgaggccgccaactttgaggccaagatcgcagacatcgaggcccatctctctgagatccaggtcaaggactacaagacctcttcggactccttgacgccggactcggacaactacatatgcgacctggcataccagtacgttcgtgccctggaattctga

SEQ ID NO: 4271 - DNA, 1545 bp, Saccharomyces pastorianus
atggctccagcagatccagatgcaaacaggttaccaacgtcaccggaattgagcgatgaagagcatttctcaatgcattcggacaaggatatagaacgtgggtctcaattgaccagtggacgaagaaccaatggcacacaatcatatgaagtggcttttggcgaggattccgcggacccagaagatatagctcgtcatattagcatggtccgtcgatattacatttcttctgtcatcacattcacatcaatggtaatcacaatggtttcgtcctgttggacacttccctcaacgcacatcattgagcactttcacatctcacatgaggtaagcacattgggaatcacgctatatgtgtttgggcttggtataggacccttatttctgtccccactaagcgagctgtacggacgcagaaccacattcatatacgctctgacgctcagcgtgatatggcagtgtttgacaatttggtccaagaccattacaggcgtcatgtttggtaggttcctctctgggttcttcggttcagcctttcttagcgtggctggtggcgccatagctgatatcttcgataaagaccagatcggtgtccccatggccatattcaccacatctgccttcctaggaccgtctttgggtccgatcattggtggcgccctataccacgaaaattacaaatggacatttatcactcttctaatcacatcgggatgttgtctcgttattatcgtgctgaccatcccggaaacttataaaccaatgctactaatgcgcaaggccaagagattaagaaaagaagaaaacgatgaacgctactacgccgccttggaagttacgcgtaaacaaacttctctgctttcggcgatcctactatcaactagaagaccctttggattgctgctacgggacccaatgatgggtgtgctttgtttctacactggcctagaactggcaattgtctatctgtattttgtagcattcccgtacgtatttaagaaactctacgattttgggcccatggaggtggcatgctcatatatcggtatcatggtgggcatgcttatctccgccccaacatgtctactattccaaaaaacgtttgaacggagggtcaagaggaataatggtgtcaagacgcccgaaatgcggttcgagccattgttctacggcgcctttttgaccccgatcgggttgttcattttcgcctttacttgctacaaacacgtccactggatagcacccataataggtagtgccgtattcggttcaggcgtgtatttcatcttcaccggtgttttcgcatacactgtggacgcctacagaagatatgcggcctcggggatggcctgcaacacgttcgtgaggtgcataatggccggtgttttcccactcttcgggctacaaatgtataaggcaatgggcgtgaactgggccgggttcctcttggcaatggtgaccgtattgatgatcccaatcccgttcctgttcaccaagtacggggcccgattgagggccaagtcgccgtatgcatgggacgattga

SEQ ID NO: 4272 - DNA, 186 bp, Saccharomyces pastorianus
atggtcaccattgatggtgttcaagttcacctatctactttcaacaagggtttgatggaaatcgctaaccctactgaactgggtgcaatcttctctagacaggtcaatagcgctaaaaagagaacttctgatgaacttgagaagaagtctagtgaatctgaaaccgtcaagaaagctaagaattga

SEQ ID NO: 4273 - DNA, 153 bp, Saccharomyces pastorianus
atggcttcttggttttttcagacttgttgccacaggggcatttgtcatcactgtcacagccagttggacagttgcacgatttttgacactgttcattggttttgcaactaccacatttgcattgacattggtggccttcgttttggaaattga

SEQ ID NO: 4274 - DNA, 2646 bp, Saccharomyces pastorianus
atgatggacatgcaagtgagaaaagtgaggaagccgcctgcttgcacccagtgcaggaagagaaagatcgggtgcgacagagcaaaaccgatatgtgggaattgcgtcaagtacaataagccggattgtttctatccggacgggcccggtaagatggtagctgtgccttctgcgtccgggatctccacgcttggcaacggccaaggtaccaaccatttcaatcagggaaacggtgggagccagaaaaacgtgatgattcagacccagtacccgatcatgcaaacgtcggtagacccttctaacttcacctttagcactgctatagacaccagcgcgcaatggaacaagaccgccagctaccaaaataccactactagcaataataccgctcctcctcaaattaacagtaacgttaataatactgctcacgccagcaccattgtaagaactgatagtcctgatgtgccctccatggaccaaatcagagaatacaacacgcgactacaactgatcaacgctcaaaattttgactatgcggacaacccatactctttcaatgtgagcttgaatcaagactcagcaattttcgatctaatgacttctccgttcacacaagaagaagtcttgctcaaggaaatgaagtttttgagaactaagttgattgacttacaaaatctgcaattgaaaagtttaaaagaaaaatctaatctaatcactagtagtgccaccacgaacaaaatcaccaagatgggacatggttacaagaaaggtctggccaatggtaagggagctgaattggaccctccaaattctgcttcctctttgtcgtcgcaaaagtactttacagccttaacaataacagatatacaaagtttggttcaggtgaaaccattgaaggacactccaaattttcttttcaccaaaaatttcattatcttgagagacaattatctgttcaagttctataacattttgcacgatatttgccatatcaatcagttcaaattgagcccaggtgatgacaacgatcacaaaatatttgcggaaattgataaagtaaagttaccatcaaagcccacaattgtcgaggcattgggtactgcagctgctgagaatctaagttttggagacttcctgccaatatttaaaatatcggacttgttggacttcgttaacgggcttttctccgaaagtgagtctgatcaatccttctcgacaactgatttatcattgtctcagttagctaaactaggtcaactgaacgtagttctgttgatgctgaacgattcaatgactttattcaataaacaggccacctcttttaacgtttcagaattaatgaataattcaaagttgatccgaagccggatcaaactgatagacctgaaatcttatgacgaagaaacaattaaattcattgccatagcgaagttttacgaaactctaaacatacatgatgatcgcaagtcaaatttggacgaagacttggactgtctgttaaacttccagatacaggattttggattattccatttcttgaaaaagatgtattacttgaggcattcacttttaggtcagtcctcattcatggtatccaccattgaaaatttatcgccaataccttctttcatggatgcaaatgatatacctttaattgccaacgatttaaaactgttggaaacacaaacaaaattgataaatattctacaaaatattcccttctatttgccagtaaatttatccaaaatcaaaagtttactagaaacattgactacaggggtgaataaattattgagttctaacggtgaagaggctagtaaagagtggaatgatatcttaaacttcattaataccacagtctacacaaatttttttcttttcattcaaaacgaatcatccttaccaatggcagctcaacagccgtctaacaataacaaaacacagagcaatgaaaaatgcgcaaagaacttgatgaacatcattagttccatgcacattttttatttaatttcattcaactttatttttcccattaaatcaataaggtcattcttaaatggcaatcagcgtttccacgcaaacggtaatgagtttttgtccaccgaccagtttgttcgaatcttgcagaatttcataatgataacttttgccattttccaacgttgtgaggtaatattatatgacgagttttataaaagtctttctaatgaggaaatcaatgttcaattgctattgatacatgacaaaatcttggaacttttgaaaaagctagaaattatcgtttctttcttaagaaacgaaatgaattctaacggagacttcaaatctatcaaaggcttcaacaaagctttggattctatcaagtatatgttgagattcagcaagaaaaaacaaaatttcgcaagaaactccaataataacaatgctacagattatagtcagtcagcgaagaacaaaaacgttctcttaaagtttccgatcaacgaactaaacagaacctatttgaagttcaaagaaatttcggatttcttaatggatagagaaattttccaaaaaaatataattattgacaaggatttggaatcagacaatttagggattactacggctaacttcaatgatttctatgacgcattctataagtag

SEQ ID NO: 4275 - DNA, 249 bp, Saccharomyces pastorianus
atggttggtaccttggccgttgccaagcgtggagatcccggacgcagaaggcacagctaccatcttaccgggcccgtccggatagaaacaatccggcttattgtacttgacgcaattcccacatatcggttttgctctgtcgcacccgatctttctcttcctgcactgggtgcaagcaggcggcttcctcacttttctcacttgcatgtccatcatagtcaaaaagaaacagcaacgctacagcactag

SEQ ID NO: 4276 - DNA, 576 bp, Saccharomyces pastorianus
atgagaaaaatgtcgattagcaagatgagtaaagcaacgacggcccaggacatgaacgcctcagatggacagcacttgcgattgcttgaactactggcagactacgattccactttagagcaattacaaaagggtttccaagatgggtacattcaattaagcagatcgaactactacaataaagactcgttgcgaggcaattatggtaaagactattgggacgaaacgtacgtagggcaattggaggcagcagtagatgaaagcagctctaaattggtgatagatatcgtaaaaagaaaccctcaagaagaccaagtggcggatgtaacaaaagaagaagataatacactgattcaaagaaagaaaggaacgaaaaaggaaactgaaaaagggcaaagccctaaacctgtgcagaattatgacccgattttgatgtttggaggggtgctgtccgttccatcttcattgagacagtcgcagacaagcttcagaggctgtattcccttaatggttcagttgattaattataaaaacgagatattaacgctatcaaagaaactggctgagcagaaataa

SEQ ID NO: 4277 - DNA, 936 bp, Saccharomyces pastorianus
atgtgtaaattgaaaagataccaaaggcaaagactgagagctaaaagaataaggatgctggtcgatttaaatgtgccatggccacagaacagctatgcggacaaagtgactccacaggcaatcaataatttaacaaagacattaaccacattgcatacattgggatatacgcacatcgccataaattttacagtaaatcacagtgagaagttccccaatgatgccaagatgctaaaccccattgacataaagacacggtttggggaattgatggctcaaacgggtctaaaactgtatagcagaatcactctaatcatcgacgacccatcaaagggccagtctctctccaagataagccaagcctttgatattgtagcggccttaccgatcagtgagaagggtcttactctctcaacgaccaacttggatattgacctactgacctttcagtacggttcgcgtctgcccacgttcctcaaacacaaaagcatatgtagttgtgtgaaccgaggtgtaaaactggagatcgtttacgggtacgcactgcgtgacgtacaggctcggagacagtttgtctctaatgtgagaagcgtcatcaggagctcgaggttcagaggcattgtcatcggtagtggtgccatgtcgccattagagtgtcgtaacatattgggagtaacgagcttaatcaagaacctgggtcttccgagcgacaagtgctctaaggccatgggcgacctggcctcgctggttctactgaatgggcgcttaaggaacaagagtcacaagcagaccatcgttgctggtggtggtgatgaagacgacaatgacgtggtcaacgacgtgcaaggcattgacgacacgcggaccatcaaagtcgtcaagagaactatggaccctgagcagctgggccacgccgccaagaggcgcaagccatga

SEQ ID NO: 4278 - DNA, 645 bp, Saccharomyces pastorianus
atgaagattgctagattgccttggactgatgaagatatgattcagaaaaaaataattgttaaacaggatttggccaataactcgttggtgaaattgttaatggaaccaaaatttgccaaggagtttggtatggaacactctacctaccaagaaatgctatctggccaattatttaagtttttagtcaacgcgtgcataaatccagttaccgcaacgctcgattgtatcaatggtgaaataaaggactcctgtggcccaattttcagatccatcattgatgaatgtctgcaaatattaagactggcttacaagccgctgtttgagtaccgcgaaaaatttggtggaaatgatgaatacccagatatgaacgtcaatgaagttttaactaccgacaatatggtttccgaagtcaccaggattggttgtgatatcaatgccaaaaacagtagttctatgagacaagattctctgttcttaagagacatcgagattgagtttattaatggttacgttgttagattggcatcgaaattgaacttagatccaaactcttctaaagtcaacaagaccattcaagaaatggctagtttgagactggcattgaacaggtccagaaagatcaacggagactggagaagcgaatga

SEQ ID NO: 4279 - DNA, 144 bp, Saccharomyces pastorianus
atgaccgcgacgcatagaaccactattcatatccttggattgggtgccatgggtaccgttttggcagtagatcttttgagatttacgaatgcccttgtcgtgcctctattcagatcgacaagcttcatccgccataaggccaat

SEQ ID NO: 4280 - DNA, 180 bp, Saccharomyces pastorianus
atgttgaaaatgatttcaacgccgttggcgttcttgatacctaattccatcaatttagtacccagagtgtacagtttttccctgacaacttctggttcgtcgtcggaccattcactttcatcgtcttcttcagcgttttcttcctttggagctggttccaaagttttttcctcaatgtga

SEQ ID NO: 4281 - DNA, 1617 bp, Saccharomyces pastorianus
atgtcctctccagtgatcggtatcaccttcggtaacacctcatcttccatcgcttacatcaacccaaagaatgacgtagacgttattgccaacccagatggtgagcgtgccattccatctgctttgtcctacgtcggtgaggatgaatatcacggtggtcaagctttgcaacaattgatcagaaaccctaagaacaccataatcaacttccgtgacttcattggtttaccattcgataaatgtgacattaccaagtgcgctaacggagccccagctgttgaaattgacggtaaagccgggttcattatctcaagaggtgaagataaagaagagaaacttactgttgatgaagttgtctccagacatttgaacagattgaagttggctgctgaagattacattggctctaccgtcaaggaagctgtgttgaccgtcccaacaaacttttctgaagaacaaaagactgccttaaaggcttctgccggaaaggttggcttgaagattgttcaattcattaatgaaccatctgctgctctattggcccatgctgaactattcccatttgaaaaggatgttaacgtagtcgttgctgattttggtggtattagatccgatgctgctgttattgccgttcgtaacggtatcttcaccatcttgtctagtgtccacgacttcagcttaggtggtgacaacttggatactgaattggtagaatacttcgccaatgaattccaaaagaagaatcaaactaacccaagaaagaacgctagatctttggccaaattaaaggctaactcttccatcaccaaaaagactttatctaatgccacttcagctaccatttccattgattctttggctgacgggtttgattatcacgcttctatcaacagaatgagatacgagttagtggctaacaaggttttcgctcaattctcctctttcattgattctgccattgccaaagctgaattagacccattagacatcgatgctgttcttttgactggtggtgtatcattcactccaaagttgaccaccaatttggaatacacattaccagaatctgttgaaattctcggtccacaggacaagaacgcttctaacaatccaaacgaattatctgcatccggtgccgctttacaagccagactagtcagcgactacgatgccgatgaattagctgaagctttacaaccagttatcatcaacaccccacatctaaagaaagccattggtttggtcggtgccaagggtgaattccatccagttttgctagctgaaacttcctacccagtacaaaagaaattgactttgaaacaggcgaagggtgacttcttggttggtgtttacgaaggtgaacatcacattgaggaaaaaactttggaaccagctccaaaggaagaaaacgctgaagaagacgatgaaagtgaatggtccgacgacgaaccagaagttgtcagggaaaaactgtacactctgggtactaaattgatggaattaggtatcaagaacgccaacggcgttgaaatcattttcaacatcaacaaagacggtgcgctaagagtcactgctagagatttgaagtctggcgctgctgttaagggtgaattatag

SEQ ID NO: 4282 - DNA, 1512 bp, Saccharomyces pastorianus
atgtcaaagatcattaagaaaaaggaaaataagaatgttaacgaattagcttctttggctgaaaagatcagagcaaaggctcttgagaaccaaaagaaacggatagaagcggaaaatgaaagtagttcagaatctgattctgaagaaccttccgctattaaaaaaaaaagagtttccaaaccaaagagcaaatctaaagactccacgtcgaccgaaaatgaccattcaaatgacggtgaatccttcgaaacttttaacgagttaaatctggttcccgagctactccaagcttgtaagaacttgaactactccaaaccaactccaattcaatctaaatcaattccgccagcacttgcaggccatgatatcattggtcttgcacaaacaggttccggtaagactgctgcgtttgctattcccattttaaaccgtttatggcacgatcaagagccatactatgcatgtattcttgccccaacgagagaattggcacaacagatcaaagaagcttttgattcattagggtccttaatgggtgtgaggtcgacatgtattgtgggtggtatgaatatgatggaccaagctagagacttgatgagaaaaccacatattatcattgctacgcctggtagattaatggatcatctagagaacaccaaggggttctcgctgaggaagctgaaatttttagtcatggatgaagcagatagattgttagatatggaattcggacccgttcttgatagaattctaaagattataccaacgcaagatagaactacatatttattttctgccactatgacttccaaaattgataaattgcaaagagccagtttgacaaatcctgtgaaatgtgccgtatcaaataaatatcaaaccgtggacacattggtgcaaacattgatggttgtgccaggcggtctcaaaaacacttatttgatatatctattaaatgagttcatcgggaagacaatgattattttcactagaacaaaggccaatgccgaaagattatcgggattgtgcaacttgctggagttcagcgccactgctctacatggtgacttgaatcaaaaccaaagaatgggtgctctggatctgtttaaggcaggaaagagagctatccttgtcgctacagatgttgctgctagaggattagatattccatctgtggatatagttgtaaactacgatattcctgttgactctaaatcctacattcaccgtgtgggtagaacagcaagagccggtagatcagggaaatctgtttcgctggtgtcacagtatgatctggaattgatcttgaggattgaagaagtgttgggtaaaaaactaccgaaggaaaatgtggacaagaacattatattaaccctgagagactctgttgataaggccaacggtgaagttgtcatggaaatgaacagaagaaacaaggagaagattgccagaggtaagggaagaacaggaagaatcatgatgagagaaaacatggataggggtgaaagataa

SEQ ID NO: 4283 - DNA, 282 bp, Saccharomyces pastorianus
atggaatcgtgtaacaacacccccttcgagattgtgccattgtcgctatctgcggtctttagcttcttgttttgcacgcttgtgggttcctccgatggcttggcggcgctcaatttcacaacgtgcgggatacgtggcacccttagaatgcaatctttgaagttctcggagaacgtgctgatgttcttgggctcgggaaacttcactgcacacattggtatcctggtgatgaaaaacgacctgtctaattctcgcatttcgcggttcactggcgggctgtaa

SEQ ID NO: 4284 - DNA, 120 bp, Saccharomyces pastorianus
atggatcggatggcaagagaaaggagagatcatattcttcgctgtccattagtagcatacagcagcaatctcaagaaatacctttacgtgagaaactatccgggtcgggatttacactag

SEQ ID NO: 4285 - DNA, 639 bp, Saccharomyces pastorianus
atgggcgaattaagtactacattggcggaagactcatctaaggaaacacttttaacaccaaaaaacattattgacgctgcttatgctaaaattaaggatgacaaaatagtaaaagtaggaggaacaacagccattatggcccatttcccacccagtggtaaattacaagtcgccaacttgggtgactcctggtgtggtgtctttagagattccaaacttgtgttccaaactgagtttcaaactgtcgggtttaatgcaccttatcagctgtcaattataccggaaaaaatgttgaaagaggctgaaagaaaaggcagtaaatacattctgaacacccccgccgatgctgatgagtatactttccaattagaaaaaaatgacatagttatgttagccaccgacggtgtaactgataatattgccacagatgatattgaactttttttgaaagataattctgccaggacaaaagacgaactacagttattgacacaggaacttgtgaaaaacgttgtcagtttaagtaaagatcctaattaccctagcgtttttgcccaagaaatttctaaattaactggtagaaactacagtggtggaaaggaagacgatattactgtagttgttgtaagagtcgactaa

SEQ ID NO: 4286 - DNA, 414 bp, Saccharomyces pastorianus
atgtttgcaaacgttgggtttaggactttgagaacctccagaggttccatttatggtatgtttgttattttgctattgggtgtgcttattgccaattttgctggacatttactaatcgactcagagtccaatatttctcgtataataggatcctgtagccaagttatcaatttctccaaaagaaccttctattcaagtgccaaagatggttatcagtcgaacggtagtaatggtgacggatatagtgccaaggcacagacaggcccattcacttataagaccgccgttgctttccagccaaaggacagagacgaccaaatataccaaaagctaaaggaatccattaaatcacctacgggagaagataactactttacgacctgcaggcatgcaagctggcactgccgtcgttta

SEQ ID NO: 4287 - DNA, 462 bp, Saccharomyces pastorianus
atggaatatggtggtgaccttgatgcggatagagatattgagatgaaaagaatgtatgaagagtacgagaagaaattgaaggatgaagaagaaagaaaagcggaagaagaattagaaaggcaatttcagcaaatgatgcaagaatctatggacgcgagaaagagtgaaaagattgttgtcaacaaaataccagtaatatcgaaacccattaatgttcaaaaacccttattattgaaaaagaatgaggagctttcttcaaaggtggaagctgaccaaaaattatctaagccaaagaaaattgcatttacatttttaactaaaagtggtaagaaaacacaatcaagagttttacagttaccaacagatgtgaagttcgtttctgatgttcttgaagaagaagaaaagttaaagactgaaagagacaaaattaaaagaattgtcttgaaacgctcttttgattga

SEQ ID NO: 4288 - DNA, 1353 bp, Saccharomyces pastorianus
atgatcacaaaccaggccctaccacccaaccaacgattgtgggaaaatgaagaaataagaaaattttatgaaattttaccagatatctctaaaactgtggaagaatcactggccattaagatagaaaaagactcaaattcaaactccaagaatattaacttatttttcacagacttggaaatggctgactctaaagatataatagacgaactttcaaatagatactggtcatcgcatttggacaataaagccacaagaaaccgaatattgaaattcttcatggagacacaagactggagcaagctgtcggtatattctaggtttattgcaacaaacagtaaatatatgcctgaaattgttgcagaatttattaattacctggacaatggtttcagaaaccaattgcactcaaataagattaatgtaaaaaacatcatcttcttcagtgaaatgatcaagttcctattgataccgtcgtttatgattttccataagataagaacattaatcatgaatatgcaagttccaaacaatgtagaaattttgaccattttattggaacattcaggaaaatttctgctgaataaaccagaatacaaggaattaatggagaaaatggttcaattaattaaagacaaaaaaaatgacaggcaattgaacatgaacatgaagggtgccttggaaaacataataaccctactttatccaccttctgtaaagtctttaaatgtgatggtaagaacattaaccccagaacaacaattttatcgcattttaatcaggagtgaacttaataacctggatttcaaacacattgttaagctagttcgtaaagcccattggacagatccggccatcaagaaaacactattctctctgttttcgaagccacataagctgagctatcaaaacatccccgttttgaccaaagttttaggtggtttatacagttaccatcgtgactttgtcatcagatgtatagaccaaatattggagaatattgagcggagtttagaggtcaacgattatggacaaaatatgcatagagtttcaaatgtaagatatttgaccgaaattttcaattatgaaatgataaagtccgacgttttgttggatacaatttaccacattatcaggtttggtcacataaataatcaacccaaccctttctatttgaatgattcagatctacctgataactatttcagaattcagttggttactacgattctactaaatatcaataggacaccagcagcatttacaaaaaaatgtagagttttgttaaggttctcggaatactatattttcaccaaggagactctagaggtccccggtaccggctcgattgta

SEQ ID NO: 4289 - DNA, 132 bp, Saccharomyces pastorianus
atggggccggtacccgatggattttacgattactttatcaagcgtttcccaaacctactaatagggatttataagattgtcaaggagaacttgagcgacgaccaaattttacatggatttttgtattcataa

SEQ ID NO: 4290 - DNA, 2064 bp, Saccharomyces pastorianus
atgatgagaactgaattacaaaatttatccgaatacaccttggatgatgagtactacaacaacgtggacgaaacctatgaagaagctatgaacgacggtttacctcctcaacctgttcctccttcttctgctccagtctctttacctacccctatatcatctaataataaacaacctgtaccagaattcaaaaaagatttcaattttaataacacaaatgaaagaaagcgtccagatgctcctcagaatcaaaatattgtgaacaatcccttcaagaaaccttccactcagcaacagaagatttccagccaaagttataatcacacttcaccgtctccttacgaaagggcgaaatctgttcctaaattcaaattcaagaaacgcaataagtacggaaagactgataatcaatatcctaaaccggtcagtattgaagataggaagaagagtaaaattcttaaggaatcaaggaaacctttgggtataccaacacctaatactcatatgaataactttttccatgattataaggcaaaggatgaatttaacactagagattttttcactcctccgagtgtccaacacaggtatatggaagggttttccaacaacaataatagacaatacagacagaaccgtaattataacggcaacaatcatggaaataattataacttcaacaacggtaatggctatataaagggctggaacaagaacttcaataaatatagaagacctagctcttccagttgcaccggaaaatcactactttcaagatatagcatgagctataaccacaacaatggttccaccaacggctatacaaggcgtggctccactagtacggttcaacattcgccaggcgcttatattccaccaaatgctagaaaccatcacgtcagccctagcaatcatcttttaagggttccacaatctactgctccggatatctccactgttttagatagcaagccttcatatcacgatcattatactcaggataacatagactccgagggagaacaagattcggacgacgttctattcactcttgaagaaagtgatcacgattttgtcaatggaatggacaatttatccatacatgatcacttgccaccaataacaacaagtgcccaaagcggtatttttgctcatgctaataacagccacgataacagcgatactagcaatactaataataatgatcaccatcacaatagacaatatattccacctcccttagcaacatcattgcacatcaacaacaataatgaaactaacgaactacctgatttattaaaatcaccagcatcttccgaagcacatctaaatttatcttccggaccagttgatccgatattgacagatagtagtaatattggcaacagatattcacgctcatctgattctaaagaacaacaagagcaagatcaagatcaagatcgtaggctcagtatggaacaaaagttcaaaaatggagtttatgtcccaccccatcatagaaagagtttcaacctaggaacgcaagaaccacctctgaacatgaaatcaagtaatgaggctacattatcggtctcgcacaattctgtcaattttggtggatcttacaattcaagacgttctagtatcaatgaccctaacccattgcatatgaacaagacacctgacaatatgcctgcatctccaggagccaagaattcatttgctgggttccctaaaccattattaccgcgtaatcattctagcaccacaattgcattacaaaatgaagatgtattcgcggattccaacaatgatgccataatcttcgaagacgaagaatacgacggggaaagtgataaaatggttcatggcaagatgggagacggtggtgatgaatcatcatcaacttctccagatgaaaggcaaatttttggaccatacgaaatttatgcgcaaactttcaccggctccactcatgacaaaaaactgagggctggtagaaagtctaatattcaagatgaaatggtcgggtcgttggagcagtataagaacaactggctaattctacaacaacaggattaa

SEQ ID NO: 4291 - DNA, 552 bp, Saccharomyces pastorianus
atgactttggactacgagatttataaagaaggaggcatcttgaacaaccgataccaaaagatagaagatattagtgaaggttcatatggttacgtctcgttggctaaagacgtcagggagaaaagattggttgcagtcaaatatattttcaaattagaagatgacggccactatgaaggagacgacgacgacgacgattatgccaatgattgtgacgatgacggcgatgatgaaaataccaaagttgatgcagacggccatgaagatggagatgttaatgctgctacaaacaacgggtcaagtagagagaagaaacacaatctttacaaacataaaaagtctttgatttcttcgaaagtcaaatcaagactgtccaacaacatctgtctcgaagccatgtatgaagtagatatccaaacaaaaattggtagacacaacaatattgcagctttactggattttttcgattcatatatcatcatggagtattgttcgggcggtgatttgtatgaagcatcaaagccgatgctgtcccaagaagaccaatctatc

SEQ ID NO: 4292 - DNA, 234 bp, Saccharomyces pastorianus
atgtcgccggaattgtttgatagcaacttggatatcgacgaaagaaaggaaccttacgattgcgctaaagttgacttgtgggctatgggtatcgttttccttaatattgttttccacaagaacccatttagcatcgctaatcaatcagacaaatcctttggttatttcgctgccaacagagaggctctattcgatgttttctccacaatgcttatgatttcttccaagtactaa

SEQ ID NO: 4293 - DNA, 1032 bp, Saccharomyces pastorianus
atggtagtaaatgagctcaaagtgagggtgttgtacgcaatggtaagtctgttcagtgttcccaagccggtgaaacgaatgtttgacacgttccccttgcaaacgtatggtgcgcaagccgacaaggacgaggcagttgcgttggaagtacaacgcaggtcctatccattcacaggacgcggtgatggcgacttgaagttgactgcggaggacacatacaagctgggtgtctacaacgtcttttccgaggccactacgggggccatgctggccacagacccgtggtgtctattcgttcagcttgcactgtgccagaagaacggtctttgcctgcctacggaatcgcaagaaaagggcacatctcaatcctgcaaccatgaactgatggtactatcacgtctgtccaaccctaatgagactctgcccattctcgttgagggccacaagaagagaatcgtgaggtctacagacgccatcagcaacaccatgcgttcccgggtgctcgaagatgctgagcagcttatgtacgatatgcttctggacacggtgctctatgattgttggatgacacaggtacttttccgtatctccaattcacaattcatggaactgtattcctcccagaagccaaatgagtcgacatccaccttagtggacgtagaaaactctttgctgggcaagttatctgccaacagcttgaaaatgtctttgctgaagagaaacaagttccagctgcgtcatcgagaaattgccgacagtatgcacgccatttatcacaagcgtcataacagcattagccaagagcaggcaatagatgtactctttgagaacagtaagcaagtcctcttggatttccaaagcagtttgagtggtaataatactcaacccgcttctctgcatctaaagatcgcaagctacattctttgtatcatgaacgtcaaagagcctatagagttgaaggtttttgtcgaagatgagtgtaaagacctggtcaactttgcgcacaaagtcctaaataattttatccagtaa

SEQ ID NO: 4294 - DNA, 183 bp, Saccharomyces pastorianus
atggaaccaatgcgacgctgttgtcattggctacacaggacatcgagactcgttagggcggctttcagcgaacaattcctgcctgtcgtactcaagcaaatcgaaattattatcaaggaggggggagagtgcggtaaaaccgcaaacaacctcaagaagctgcttgcgaaagtcttcgactaa

SEQ ID NO: 4295 - DNA, 234 bp, Saccharomyces pastorianus
atgctcgttgaatacggctgtcaagatgagcgtgctagaggcgtcgacagtgatacagcagtttctttcgaagacagcagtgatttgcgaaacccatacttaattccagactgtccgcagccattcgagcatctgaaactgtttaccagagaattgaaagtcaaggatccagctgctaatggaaccaatgcgacgctgttgtcattggctacacaggacatcgagactcgttag

SEQ ID NO: 4296 - DNA, 258 bp, Saccharomyces pastorianus
atgacaaaatcaagaaagcagaagcagaagaaacaggattttttgagaaaaaagttaaaagttggtaagccaaaggaaagagcaagtaatgccactaatacgtctttcgtttccaaaaccatttctattagaaaccagcatctagatcatgatcctcacgatctgacgaaacggttaactttattaaaacaccacaacaccaacgtgagaaaggaaacattaataacattccagaaatctataccgtctatcataaat

SEQ ID NO: 4297 - DNA, 750 bp, Saccharomyces pastorianus
atgagctcgaagagaaaccatatgtctcaattcatttaccccgtccaacaacagccgtctctaaaccatttcactgatccaaacaataccactgtctttattgggggtctgtcatctttggtgaccgaggatgagctccgtgcttatttccaaccttttggcacgattgtctacgtcaagatcccagtaggcaaaggctgtgggtttgttcaatacgttgaccgactatccgccgagacagccattgccggaatgcaaggttttccaattgcgaattcaagagttaggctatcttggggcagatctgccaagcagacggcattgctccagcaagctatgttgagtaactctttgcaagttcaacaacagcaaccagctttacagcaacctacgtacggatacattccctccacttcgtatgaaaatccagctccgctaaatagtaacattacggcttcaatgcttccaggttctcaaactttaaactatgctaactcatacgccaatgataactcgttacttcatgattcgagtaatagcttaggcttaaatgattttggtttctacaataacaatggtgccacgaacgcatctaccgctagcctaatgactaacaacgactccatcagcgctattgatgcccaaggccaacaacaggttataatgcaaggaaacgaagcatttgcgaatagcacaacttcaatgttgaatcgtttggaacaaggtagtaatggatttatgtttgcttga

SEQ ID NO: 4298 - DNA, 711 bp, Saccharomyces pastorianus
atgtcttataaacaattcaattactatcccaataggggagatccgactaggaacgactcatttcaatataatgatgttgcctcttcgaacaacaatagtacaaataataatagtacgaacgtattaaatgtccaaggtgcatccgatataaattcgggcactaccgggaaccaattgtatatgggggacttggatcctacttgggataagaataccataagtcaaatttgggggtctttgggcgaagcaaatattaacgttcgaatgatgtggaataacccttctaatggtagttccagaccatcaatgggtccaaaaaacaatcaggggtattgctttatcgattttccttcttccacacatgcggcaaatgctcttttgaagaacgggatgattatacctagttttccaaataaaaaattgaaattaaactgggctacgtcgtcgtattcaaacggcaacagcagcagcagcaactcgattagtaacagcaagagtggcaataactattccatatttgttggagacttagcgccaaatgttaccgaatcacagttattcgagctcttcattaccagatatgcttctgcgtctcacgcgaaaatcgtgcatgaccaggtcacaggaatgtccaaggggtacggctttgtaaaattcagcagcgctgaagaacaacaactagctctttcagaaatgcaggcgtattcttga

SEQ ID NO: 4299 - DNA, 321 bp, Saccharomyces pastorianus
atgtctaccgtaatcaagtatttctacaaaggtgaaaacaccgatttgattatatttgctgcatctgaagaactcgtaaacgaatatttggaaaatccatccatcggtaagctttcggaagtggttgaagtctttgaaattttcaccccgctagatggtaggggtgccgaaggtgaattgggcgctgcatccaaggcccaagtggaaaatgaattcggtaagggtaagaagatcgaagaagttatcgatttgatattgaaaaatggtgaaccaaattccgttacttccagtctcaaaactaaaggtaacgcctacaaataa

SEQ ID NO: 4300 - DNA, 1011 bp, Saccharomyces pastorianus
atggagagtcccattggtctaggtttcgcctgggctttgtttatgatcggtggtatgacgtttgttccagaatctccacgttacttagttgaagttggcaaaattgaagaagctaagcgttctattgctctttcaaacaaggttagcgttgatgatccagctatcgcagctgaaattgaaatcgtccaatctggtattgaggctgaaaaattagctggtaacgcttcctggggtgaattattcaacaccaagactaaagttctacaacgtttgatcatgggtgctatgattcaatcgttacaacaattgactggtgataactatttcttctactacggtactaccgttttcactgctgtcggtttacaagattctttcgaaacttctattgttttaggtattgtcaatttcgcttccactttggttggtatctttttagtcgaaagatatggtcgtcgtagatgtttattgtggggtgccgcttctatggtttgttgtatggttgttttcgcctctgtcggtgttactagattatggccaaatggtaagaaaaacggttcttccaagggtgctggtaactgtatgattgtctttacctgtttctacttattctgtttcgccaccacctgggctccaattccttttgttgtcaactctgaaactttcccattgagagtcaagtccaagtgtatgtctattgcccaagcctgtaactggttgtggggtttcttgattgggttctttaccccatttatctccggtgccatcgatttctactacggttacgttttcatgggttgtttagtattttcctacttttatgtcttcttctttgttcctgaaactaagggtttaactttggaagaagtcaacactttgtgggaagaaggtgtcttaccatggaaatcaactgaatgggtcccaccaaacaaaagaagttccgactataatgctaatgacttggctgaggacgaccaacctttcttcaagaagatgttcggaaaaaagtaa

SEQ ID NO: 4301 - DNA, 741 bp, Saccharomyces pastorianus
atgtctgaagaaggtgcttatcacgaggatacagccgtccaaaatcctccaccagaagctttgtcaccagttgaatctgactcgaactcagctttatctactccatctaacaaagctgagggagatgacttgaaagacttcgacgagaaccatgaagaatcaaacaattacattgaaattccaaaaaagccagcttccgcttacattactgtctccatcatgtgtatcatgattgcttttggtggtttcgttttcggttgggatactggtaccatttctggttttgttgctcaaactgatttcatcagaagattcggtatgaagcatcacgacggtactcactacttgtctaaggttagaactggtttaattgtcgctattttcaacattggttgtgcctttggtggtattattttgtccaagttaggtgacatgtatggtcgtaaaatgggtttaatcgttgttgtcgttatttacattatcggtattatcattcaaattgcatccattgacaagtggtaccaatatttcattggtagaattatctctggtttaggtgttggtggtattgctgtcttatccccaatgttaatctcagaagtttctccaaagcatattagaggtactctggtttcgtgttaccaacttatgatcaccttgggtattttcttgggttactgtaccaattatggtaccaagacttactccaactctgtgcaatggagagtcccattggtctag

SEQ ID NO: 4302 - DNA, 690 bp, Saccharomyces pastorianus
atggacgttacagggttatttggcggatcttttcatcacgatggtccctttgacgcatgcactccacaaagaaacaaggataataaagtggcacccgtgctagcgtttccagcggacggtccaaacaatacagtcggtggtggtaccagtaagaagtctactctagatgaggtgttcggcagagaaacagtagacgatgatcatgagaggccggataaactgcaagatagagcatatttgtacaataaagccaattccagcactaccacgttggacgcgataaaaccaaacaaaaagaacattactcaatttgactctaagatgaaaaccgaactcgttcacggacccacaacaatgggtctaggctccacaacattcttggatggagcgcctgcatcttctgcagcaataagacaagacgttattaaccatgcgcacgaatctcgtaggaaaaacagcatatcaaggaaaaaatctctcccaagaaggcatttgcaagttaacaacaacaatctaaagctcgtcaagacgcatagtgggcacttggagcaaaatgaaaccagcggcggcaatcctacggccagcactaacacctacggaagcggctatgacgatgtcgccagaaatgaaaataccggaaacaaattgctgagaagagtgaaaagtttgaaaaccagtagaaaaaactga

SEQ ID NO: 4303 - DNA, 141 bp, Saccharomyces pastorianus
atgaaccactcaggtagaaaccttgaagggtcccaaaataggacaaatcccgcggtcaatccattcagaacctcgccttctgacgatagagtaccaagcagggacgacacgcccagaaattacaagtacgtaggaatataa

SEQ ID NO: 4304 - DNA, 10581 bp, Saccharomyces pastorianus
atgttttctttcaagattctttcagaatgccctataacaatggtcactttatattcatcttacaagcagctaactagcacttcgttgcctgaatttacacctctaatcatggatttactgaatattcaaatcaaacaacaacaagatgcgagagagcaggctgaatctcacggagagcattttacttctatctctttggagattactaatagaccagcttactgtgatttcatattggctcagatcaaagccacttccttcttagcttatgtgttcataagaggatatgcaccagaatttttacaggattatgtcaatttcgtcccggatttaatcattagactcttacaagattgtccctctgaattgtcatctgccaggaaagaactcttacatgctactagacatatcctatccacaaactataaaaaactctttttgcccaaattagactatttgttcgatgaacgtatactcattggaaacggctttactatgcacgaaacattgaggccattggcctatagtactgtggcagatttcatccacaatatcagatctgaattacaactgagtgaaatcgaaaaaaccataaaaatatataccggatatctattggatgagtcattagctttgacggttcaaattatgagtgcgaagttactacttaacttggtggaaaggatactaaaattaggcaaagagaatcctcaagaatcacctagagccaagaaattgttaatgataattattgactcatatatgaatagatttaagaccttgaacaggcaatacgatacaataatgaagtatcataccaaatatgaaacaaacaaaaaggagaaagcagaacaactaaaaatctctatagagaataacgacaaagagagcgaggaattcatgaagagtatactggagccatctgacgacaacgggttggtaccagaactcaagcaagaagacaataataaaagtttagacgctgcagtgacagattctgtcaaagaggatagttccattgagatgtttgacataaaaaactatgccccaatattattattgcccataccaacaaacgaccctattaaagacgctttttatttataccgaactttaatgtcctttttgaagacaattattcatgacttgaaggtcttcaatcctccacctaatgaatatacagttgccaatcctaagttatgggcatccgtgtccagagtgttctcatacgaagaagtcattgttttcaaagatctattccacgaatgtatcatcggcttgaagtttttcaaagatcataatgaaaaactatccgcaacacttacaaaaaagcattttgatatatcaatgcccagtttaccagtctcagccacgaaggatgcccgcgagttgatggactacttggcgtttatgtttatgcaaatggacaatgcaacctttaatgaaataattgaagaggaactaccattcgtttacgaaagaatgctagaagattcagggttgttacatgttgcccaatcatttttgacaagtgagattacctctccaaattttgctggcattcttttaaggtttttgaaaggcaagttaaaggacttagggaatgttgattttaacacatctaacattttaatacgacttttcaaactatcctttatgtccgttaatctttttccaaacatcaatgaggtcgttctgcttccacatttgaatgatctaattttaaactccctcaaatactcaactactgcagaagaacccctggtttatttttatctcatcagaactctcttcagaagtataggtggtggtagattcgaaaatttatatagatccattaagcctatactacaagtgctgttacagtctttgaatcagatgatacttactgcaagattacctcatgaaagagaactttatgtggaattatgcattactgtacctgtgcgtttaagcgtactggctccttacttaccatacctgatgaaaccgttggtttttgcattacaacaatacccggatctcgtttcacaaggcttaaggaccttagagctgtgtattgataacttgaccgccgaatattttgacccaattattgagcctgttatcgacgacgtctcgaaagccttgttcaatcttttacaacctcaaccgttcaatcatgctataagtcataatgtggttaggataatgggcaaattggggggaagaaaccgccaatttttgaaaccaccaacggatcttacagaaaaaaccgaattagatatccatgttatagccgatttcaagattaatggtatgccagaagatgtcccactctcaataacaccgggaattcaatctgcattggacatattagaaagctacaagaccgatattcactataagaaaagtgcctacaagtatttaaccttcgtactactgttaatgacaaaatcttccgcggaatttcctgaaaattacacagaattgctgaaaacagcagtaaattccataaagctggaaaaaattgagctaaaaaaagacttcaatttagaaccgactgtaaacaaaagagatttttcaaatcaagaaagtttgtttttaagattattggaaagcgtcttttatgcaacttccattaaagaattaaaagatgaagcaatatctctcttaaacaaccttctggaccatttctgcttattacaagttaataccaccttactgaacaaaagaaactataacggaacatttaatattgatttgaagaatccagatttcatgttggatagttcattgattttagatgctattccttttgccctttcatactatattccagaagttcgtgaggtaggcattatggcgtataagcgaatatatgaaaagagttgtctgatatatggagaagaattagctttgagccattcgtttataccggaattggctaaacaattcattcatctatgttacgacgaaacttattacaacaagaggggcggtgtcttaggtattaaggtcttaattgataatgtaaagtcgtcttcagctttcctaaaaaaataccagtacaacttagcaaacggtttactatttgtattaaaggacactcagaatgaggccccctctgccataacggatagcgctgaagaattattaatagagctattaagcattactttcaccgatgtgaaagaagaagatttgggtaacaaagtcttggaaaatactttgaccgatatcgtatgcgaattaagtaatgcaaatgcaaaggtaagaagtgcttgccagaagtctctacacacaatatcagaccttactagaatttcagtggtgaagttgatggatcattccaaacaatttcttttatcaccaatattcgcaaaacctttaagagcattgccatttacaatgcaaattggtaatgtcgatgctatcacgttctgcctaagcttaccaaacacattcttaacatttaatgaagaattatttagattactacaagaatctattgtattagcagatgcagaagatgagtcgctttctacaaatattcagaagacaaccgaatacagtacttcagaacaactagtacaactaagaatagcgtgcataaaattgcttgccattgctctaaaaaatgaagaatttgctacagcccaacaagggaacattaggattcgtattttagctgtatttttcaagacaatgttaaagacatcgccagaaatcatcaatactacatatgaagctcttaaggaatctttagcagaaaattcaaagctgccaaaagaattgctccaaaatgggctaaaacctctattaatgaatttatccgaccaccaaaagttgacagttcctggtttagatgctttgtcgaaactgctcgaattactgatcgcctactttaaagtggaaattggaagaaaattactagatcacctcagtgcatggtgccgtgttgaggttcttgacacgttatttggccaagatttagtggaacaaatgccgactaagataattatcaacatcatcaacattttccatttacttccaccacaagctgatatgtttttgaatgatttgttacttaaagttatgcttctagaaagaaaactacgacttcaattagattcaccatttcgtacaccactggccaagtatctaaaccgttttcatggtcccgtcacggaatactttaaaaaaaacatgacattaaggcaattagttcttttcatgtgtaacattattcagaggcctgaggcaaaagatttggctgcagattttgagagagaacttgattggttttatgatttctatatttccaacataccaaagaatcaagtacgtgttgtcagtttctttaccaatatggtagacctatttaataccatggtaagaacaaatgaagacgaatggctgaagagaaaaggtgacatggttttgaagttgaaagatatgctaagtttaaccttaaaaacaataaaagaaaactcgttttatatcgatcacttacaactgaaccaaagtatcgaaaaattccaaaacctttatctacggtacactaaattagcagatggagaccaaggttctttatttttagattttattgatttttcgttttcaaatggtatcaaagcctcccattccttgaagaaatttattttccataatataattgcgaattcaaataaaaaggaacagaatgatctcattaataatatgattgcttttgctatatcggacaagtgtttggatgctaagatatttgttcttaaaaatgtgataaattctacattaatttatgaagttacgacggttggatctttgaaaaacttccttgttgacgataaaaagcctaaatggttggaactacttcacaataaaatctggaagaattcaaacgcaattttagcatatgatgttatagatcatcatgatctgtttcgttttgaactattgcaactatcagcaatttttatcaaagcggatcctgatatgatagccgaaataaagaaagacataataaagttttgctggaactttattaaatttgaagatactttaatcaaacagtccgcctatttggtaacatcatactttatatctaaattcgactttcctatcaaggttgtcacccaagtttttgttgcattactgcgctcttcgcatgtcgaagctaggtacctagtcaaacaatcattggatattcttactcctgttctccatgaacgtatgaatgctgctgggactccagatacatggattaactgggtgaaaagggtgatggtagaaaattcttctagtcagaataatatcttataccagtttttgataaatcaccctgatttgttttttaattcaagggatttgttcatatcgaatattattcaccatatgaacaagataacttttatgactaatgcgaatcctgatagtcataccttagctattgatttagcttcgttgatactttattgggaaaacaagtctttggatatcagcaatagaaataatactaagactgatgctgagggtgatgttgtaatgtctgatctccaaaccgataccaatccagtcgaatctgacacaacagcaataattgtagatacaaacaataactcacctatttctttacatctacgcgaggcttgtacggctttcttaataaggtatgtgtgtgcaagcaaccaccgtgccatagaaacagaactgggattgagagctattaacattctgtcagacttaatttcagacaagcactggacaaatgtcaatgtcaaattagtttacttcgaaaaatttttgatattccaagaccttgattctgagaacattctttattattgtatgaatgcactagatgtcctgtacgtattctttaaaaacaagacaccagaatggataatggaaaaccttctaactatccaaaatctactagaaaaatgtatcaaatccgatcatcatgatgtacaggaagcattgcaaaaagttttgcgtgtgatcatgaaggcaataaaagcacaaggtacttcgataatagcagaagaggaaacccctgggaaagtgttctctcagatgctaatctctgtcattactcaagaccttcaagaaacctcatctgttacagctggtgtaacacttgcgtgggtgcttttcatgaacttcccagacagtgttatatcgttacttacccctttaatgaaaacattcagcaaactgtgcaaagatcacctaagcatatctcaaccaaaggatgcaatggccttggaagaggcaagaattacgaccaaacttttggaaaaagttttgtacatattgtctctaaaagtttcattattgggtgattcacgtcggccgtttctttccacagtggcgcttttgatcgatcactctatggatcaaaatttcttgagaaaaatcgtcaacatgtctagaagttggatattcaacaccgaaatatttccaactgttaaagagaaggctgctattttaaccaaaatgctggcgtttgagataagaggagaaccttctttatcaaaattattctacgaaattgttttgaagctattcgatcaagaacattttaataatacagagattactgtaagaatggaacaacctttcttagtaggaacgcgtgtcgaagatatcggcattagaaaaaggttcatgacaattctagataacagtttagaaagagatatcaaagagagattatattatgttatacgtgaccaaaactgggaattcatcgccgactatccatggttaaatcaagctttgcaactgttatatggttctttcaacaaggacaaagaactgtttttaagggacatctactacttgtctcctccatctatcttaaaagagtacctccctgaaaatattgaaatagtaaccgaagtaaatgaccaaaaattgttagattttgtcaaaaatcacatatattctatgcaagacttgtgtcaggtaaactcttcagattttatcgattccttaattgaaatcttttaccaagatccaaaagcaatccacaaggcgtgggttagcttgtttcctcaagtatataaaagtattcccaaaaatgaaaagtatgggtttgttcgttccattattacattgctttccaaaccttatcacaccagacaaatctcctctaggaacaatgttatcaacatgcttttagactccataagtaagattgaatcgttagagttgccccctcatttggtgaaatacctggcgatatcttataatgcctggtaccaatccatcaatattttagaatccattcaaaccaacaccagtatcgacaatacaaaaattatcgaggccaatgaagacgcactattagaattgtatgtcaatttacaagaagaagacatgttttatggcctatggagacgtagagctaagtataccgagacaaatatcggactatcttatgaacaaattgggctgtgggacaaagctcagcaactatatgaggttgcgcaggtaaaagcccgtagtggagcattaccttactcacaatctgagtatgcgttatgggaagataactggatccaatgtgctgagaaattacaacattgggacgtattaactgaattggccaagcacgaaggctttacagacttgctactggaatgcggttggcgtgttgctgattggaatagtgatcgtgatgcccttgagcaatctgtgaagagtgttatggatgttccaaccccacgtaggcaaatgtttaaaacctttttggctcttcaaaattttgcagaaactcgaaaaggtgaccaggaagttaggaaactatgtgatgagggcatacagttgagtttgatcaagtgggtatctttaccagttagatacaccccagctcataaatggttgttacacggattccaacaatatatggagttcttagaggcaacacaaatatatgccaatttgcatacaacaacagtacagaacctggattccaaagctcaagaaatcaagcgtatcttacaagcttggagagatcgccttccaaacacatgggatgatgttaacatgtggaatgacctagttacatggagacaacatgcatttcaggtcatcaacaatgcatatcttccattgataccagcacttcaacaatcgaatagcaatagtaacatcaatactcacgcttatagaggatatcatgaaattgcttgggtcattaacagatttgcacatgttgcaaggaaacacaatatgccagatgtgtgtatcagtcaattggcacgtatctacaccttgccaaatatcgaaatccaagaagctttcttaaaactgagagaacaagccaaatgccactatcaaaacatgaacgaattgacaactggtttggatgtcatcagtaacacgaatctagtttactttggtaccgtacaaaaagctgaatttttcacattaaaaggtatgtttttgtctaagctacgtgcatacgaggaagccaatcaagcttttgcgacagctgtccagattgacctgaacttagcaaaagcgtgggcacaatggggtttcttcaatgaccgtcgtttgtctgaggaaccaaataatattagttttgccagcaacgccatcagttgctacttacaagctgcgggtttatataagaattcaaagatcagggaactattgtgcagaattctgtggcttatcagtatggacgatgcttcaggtatgcttacaaacgcatttgattcatttagaggcgaaattcctgtttggtactggattacttttatcccacaactattgacttctttatcacataaggaagctaacatggtccgccatattttgattagaatcgctaaaagttatcctcaagcgcttcacttccaattgagaacaacaaaagaagattttgctgtcattcagagacaaacaatggcagttatgggggataaaccagatacgaacgaccgcgatggacgtcgccaaccttgggagtacctacaagaattgaacaacatcctaaaaacggcttatccactattggccttatctctagagtcacttgttgcccaaataaacgatcgctttaaatccaccactgacgaagatcttttcagattgataaacgtgcttttgattgacggaacattgaattacaatcgcttaccatttcctagaaataatccaaaacttcctgaaaatacggaaaagaatttggttaaattttccacgactttgttggcaccttacataaggccaaaattcaatgccgatttcattgatagcaagccagattatgagacttatatcaagaggttacgttattggcgtaggagactggaaaataaactggatagagcatcgaagaaagaaaacctagaagtactatgcccacatttgagtaatttccatcaccaaaaattcgaagacatagaaattcctggccagtatcttttgaataaggataataatgttcacttcattaagatcgcaagattcttacctactgttgatttcgttcgcggaactcattcctcgtatagacgtctaatgattcgtggacatgacggtagcgtgcactcatttgctgtccagtatccagccgttcgtcattcaagaagagaagaaagaatgttccaattatacagattattcaacaaatcactatccaagaatgtagaaaccagacgtcgtaatattcagttcaatttaccaatagctattcctctatctccacaagttcgcataatgaatgataatgtatcttttaccacccttcatgaaatacataatgaattttgtaagaaaaagggattcgatcccgacgatattcaggacttcatggctgaaaaattaaatgcagcacatgatgatgctttacctgccccagatatgactatattgaaggttgagattttcacttctattcaaacaatgtttgtaccatcgaatgttttaaaggaccacttcacttcgttgtttactcaatttgaagatttctggttattccgcaaacagtttgcttcacaatatagtgcgttcgtcttcatgtcctacatgatgatgatcaacaaccgtactcctcataaaatccatgttgacaaaaaatctggtaacgtatttaccttggagatgctgccttcaagattcccgtatgaaagagtgaaaccgttgctaaaaaaccacgacttgaatcttccaccagattctcctatattccacaacaatgaaccggtgccgtttagattaactcctaatattcaaactttgataggtgattccgctttagaaggtatatttgctgttgacttatttactatatcacgtgccctaattgaacctgataatgagttaaacacatatttggcgcttttcatccgtgatgaaatcatatcgtggtttagtaatctccatcgtccaataatcgagaatccacagttacgtgagatggttcaaaccaacgtagatctaattataagaaaggtagctcaattgggccatttgaactcgacacctacagtcacaacccaatttattctagattgtattggcagcgctgttagtccaagaaacttagccagaacagatgtaaacttcatgccatggttctag

SEQ ID NO: 4305 - DNA, 405 bp, Saccharomyces pastorianus
atgtcacttacagagcagattgagcaatttgccagtagatttcgcgatgatgatgctaccttacaatccaggtattctacactatctgagttgtatgatataatggaactgttgaattctcctgaggactaccatttttttttacaggctgtagtacctttacttttaaatcaactgaaggaagtacccatctcattcgatgcacactcaccagaacaaaaactaagaaactcgatgctcgatatttttaatagatgcctaatgaaccaaacttttcagccttacgcattggaggtactggagttcttactttcaattctaccaactgaaaatgaggaaaatggtgtactgtgtatgaaagttttgaccacgctttttaaatcattcaatcatactgcaagataa

SEQ ID NO: 4306 - DNA, 843 bp, Saccharomyces pastorianus
atggctctgacgctgccagcgagcgactttctcgaaacggcagagaagtttgtgggctcatgcgatgccgacacctatgtgttagttaaccagccgggactgaggaggctagattttttggaatttcagactgaatttgcctccctacgaagatatgtaaaacagagttcaacagcaattaagtttgaaaaggtggagttactgtctcaggatttttacgatgaccttgcagactacttgaatgagtactgtaatgcaggtcaggtgttgaagctacggggcaaccatacggaggatttccaaccctttattgacagtgagaggagggtcgtcatcatcgagtatccaatgttaccagaagacacgggtctacgtagggaagccataggccattatgacaagtatctgagaaccgtcctcgcacagatcccttcaccggaacaaaaaatcatatacacctcattgaatccaggaaccgctctggctcacgagtcaatcgttcccattgatattttcccagacatttttgacaccaaatctagagctggggaagtggaacagaataacagggtgttggatgttcctccactgtcattcaatgattacgctccacggttcttggagcccccttctaagtatatttcgatttttgacccggaattcatccaggacaatagagtcctacttcaactgatcttgacatctttaatcgggtttgtcctctttcaactctttgccccaaagaaaagggatgtcgtgggtaccaaggctaacacaagtaaaaaagagactacctcatcgtcaccaaagacgcaagaggccaaaaaagtggtctctgagtga

SEQ ID NO: 4307 - DNA, 141 bp, Saccharomyces pastorianus
atgctgaaagtattggggtacctgctgtttatggtatatgtcagcctatgtgcttcggaggagttgcagaaccagacaaatgttccagcaataatgttctcctacaaactgtatgtagagcaagaaatgtttcttcagtga

SEQ ID NO: 4308 - DNA, 321 bp, Saccharomyces pastorianus
atgcattacgaaacatatagaagattaagactagaaggtcacgaaaacacaggggagggcaatgaagacttcactcttccagctattgcaccagcaagaaaattatcacataatcctaaatacaaagaagaagaaaatgcattaaagaaatacttcactgaccaagttaaagctgaagaacaaagatttaggcaatgggagcaaaatattgttaatgagagaattagattgaacggggacttggaagagatccagggcaaagttaaaaaattggaagaacaagttaaaggcttacaattgaaaaaatcacatttgaaatga

SEQ ID NO: 4309 - DNA, 810 bp, Saccharomyces pastorianus
atgagtgccgctactgccaccgctactgctgttcctcccccagtagggatctctaatctcccaaaccaacgctacaagattgtcaacgaagaaggtggtacattcaccgtgatgttgtgtggtgagagtggactgggtaaaaccacctttatcaatacgctatttcagactgtcttgaaaagagctgatggacagcaacatcgtcaagaacccattagaaagactgtagggatcgatattacaagggctttgctagaagagaaacatttcgagttacgtgtaaacgtcatcgacactccaggtttcggggacaatgtcaataataacaaagcttggcaaccattggtggatttcattgatgatcaacatgattcctacatgcgtcaagaacaacaaccatatcgtgctaagagatttgacttaagagttcatgctgttctttatttcatcaggcccactgggcacggtttgaaaccaattgatattgagaccatgaaaagattatctacaagagccaatttagttccagtcattgctaagtccgatactttgactgctcaagaattacaacaattcaaatctagaatcagacaagtaatagaagcgcaggaaattcgtattttcacacctccattggacgctgaatctaaggaagacgcgaaaaatggtgcaggtccagattcagcagccatcgaacatgcaaggcaattgatagaagcaatgccatttgccatagtagggtctgaaaaaaattcgataatgggcaaggcactcaagtggttgctagaaaatacccatggggtcttgtag

SEQ ID NO: 4310 - DNA, 1614 bp, Saccharomyces pastorianus
atgatttccaaggaccatgatcaattatcttcggattttgaaaaccatttagcaaatcaattgagtgggttgttcactaagcttgatatgacgttgagcaagattgctggttttaacgatgatatggtaaacaaaaaggataacatttaccatgagttggaaaaggccaagaaagactatgacgaatcttgttccaccatggaaatggcaagaaacaaatgcactaaagcttctaatgatagaaataaaaaaaagttaaatgaaaaagaggtggaaatgaataagtgtaaaaacgaatacttgattaagatcaatcaggcaaataggaccaaggataagtattattttcaagatgttcctgaagtgctagatcttctacaagacgtgaatgaagcaaaaactcttttcttgaatgatctgtggctgaaagcggcttctgttgaaaaggatttaggtacaagagttagcaaaaggttacagactgctgattctgtagtaaagcagaataaaccctctctgaatacggcaatttttattaagcataatttgaaaagttggaaagagccacaagactttacgtataaaccatcaccagtatggcacgacgatgagaaatttgcagtcccatccacattggaggttgaagacttgagagttaagttggcaaaagcggagaatgactacaatctattgcaagataagactcaaaacgagttgtctagactttccgccttaaacaagataaaacatgagatgaaaactaacgaagattccgtcaatgcggttaagttttacgacacgttaaagaactacttaactgttatttctccctttacttcgcacgagactttgaaactgcaagccgaggtgcagattgaaagtattcagaacaatgttcctgaggaatacgatctatccacggataatattaatttatcgaaaatgaagaagaagtccggaatattcagtaagcttaagcataacatcctgaacgttgattcgaggccttcaagcggcggaaatgctacgagtggcaacggaggacctctacatataaccaaccttttcaatacatcgagaagaacaagactaggtgctgcatccagcaaagctggtgaagatggagagaacacttccatttacactagcgaaaccagcaccacgacaaaaaccacacacacttccaacgaagatggtgggaataaagtattgtatgcatatacaaagcaagatgatgatgaaattagtatttcgccaggtgacaaaatttcattggtgacacgggattcaggttccggatggactaagataaataacgacagtactggtgaaacggggcttgtacccactacatatgttcgcatttctaatgcggatgggggaggcacagctaatggcaggggccctgctccagaagtgccaccaccaagaagaactgcgctgcccgtcaggacattagaagccgcgtatgcgtatgaggcaaaaggtgatgatgagatgtcgattgatgtgggggacgttataaccgtcattagaggcgatgatggccgcgggtggacgtatggtgagtgtgatggtctgaaagggttatttccaacaagttattgtaaataa

SEQ ID NO: 4311 - DNA, 261 bp, Saccharomyces pastorianus
atgagcgcagatttatctattggtaatgaaattaaagatgcgtttaaggaaacccataaatgggttcaaaataatttgaaatggttaaaggatattgagcagttctatcgagaaagggctaaattagaaaaagagtatagtgaaaaattatctcgcttatcggctgactacttcaataagaaatcttcaaccacggtccctatctcggtgggtgatacacctgccaccacaccggttccgttgaagctgccggagtggtag

SEQ ID NO: 4312 - DNA, 387 bp, Saccharomyces pastorianus
atgggaaccaacatgagcaacaccaccaccaccactacgaacgacagcagcgacagcagcgacaactcggcacctccaacacagccgacgtccaggggacccgtcacggatagaaccaaggtcaactacgttcctcagagcaacgacccgtcgtcgttccagtactatccagacgatccggagaacccggtcaataagtacaagttcgcgctcaagggcgatagtcagtattacgatccctgcgaggagtcttccaagctcagctttcagtgcctcgagcgcaacggctacgaccggactaagtgccaggactacttcgatgcgtaccgcgagtgcaagaagcaatggctcacagccaggcggaacaacaggcagcagtgggagtga

SEQ ID NO: 4313 - DNA, 417 bp, Saccharomyces pastorianus
atgtctatgcgacaggtccaacgttgcgtttcggaggtgcttcgactggatccacaagaaaaaccagattggtctaggggttatttaaagaaattgactaatgcgacctcgatcctatacaatacttcactgaataaagtgatgctgaaacaagatgaagaagtagcgagatgccacatatgtgcgtacatagcatcacagaaaatgaacgagaaacacatgcctgacctgggctattacatggacaatattcccttagagccaaaaaaggccaaacatttaatgagtcttttcaggcaaagcttgtctaattcgtcacccatgaagcagtttgcatggacaccgagtcccaaaaagaataagcgaagtcctgtgaagaatggtgacaggttacttcctctgatcctaaagaattga

SEQ ID NO: 4314 - DNA, 381 bp, Saccharomyces pastorianus
atgtcgggcgtgcaggagaacaagaggagaaacgccaaacaagtcaaaaaaatcagaaaaccccaatccgaattgaaaacagcaaaggcattaaggaaaagaggtagagttccaaattcattgttagcgaagaaatattgcaagatgaccacagaagaaataatacgattatgcaatgattttgaactcccaagagaagtagcgtatcaaattgtggatgagtacaatataaacgcgtcaagattggtttgtccatggcaattggtatgcgggctagtattaaattgcacatttattgtattcaatgaaagaagacgcaaagacccgcgtattgaccatttcatcattagcaagatgtgcggattgatgctgacgcactaa

SEQ ID NO: 4315 - DNA, 1041 bp, Saccharomyces pastorianus
atggcacctaatgtcgtcacgttatctgggttcgccttcattgttattaacgtgctgactgtattctattacgatccaaatctaaacgctgaatcgcctcgctggacatgtttttcgtatgccctaggagttttcctgtatcagacatttgacggttgtgatggtgtccacgctcgtcgtataaatcagtcaggaccattgggagaattgtttgatcatagtattgatgctataaactctactttgtcaatttttatctttgcctcggtaaccgggatggggttttcctataggctgatgttgtcccagtttgcgatgctgacaaatttctacctaagcacctgggaagaataccacacacacacattattcttgagtgagttttctgggccagtggagggcattctgatcgtttgcgttgtgtttatattgaccggcatatacggaaaacaaaccatctggcatacttacttatttacaatcacgattggcgataaggtcattgatgtggacactttggatgttgtattctccttatctgtcttcggtttggtgctaaatgcattatccgcaaaaagaaacgtggataaatattacagaaatagtacctcttcgactaacaatattactcaaatcgagcaaggcagtgctataaaaggtcttttgccattttttgcttattttgcaagcatatctttactcgtgtggattcagccacgttttatcacactcgcttttatcctatccatcggcttcacaggggcattcaccgtcggaagaattattgtctgtcatttgaccaagcaggatttccctatgttcaatgcgccaatgctaattcccttgtgccagttagttctgtacaagatatgccaggttgcttggggaattgaactcgacagaattgtctatgccttatcttggcttgggtttggccttgcattgggcgtccatatcatgtttatgaatgaaatcattcatgaatttactaaatacctggatgtctacgctttgtccatcaaacactccaagctaacataa

SEQ ID NO: 4316 - DNA, 792 bp, Saccharomyces pastorianus
atgaaatacacattcgtttccgctttgtttgccgccaccaatttttttgttgctcaggctcaaataaataactcctccgattcattttacctacagttttctaacagcacactttccgacctaaaggggaaactcaatgtctcagatagaatattcgccggcagcgggcctttgccgttagaaattcaaccagatggatcacttgttgctgatttaactaacatagacaaccaaccaacaaccttctctataacttccgaaaaaggtttggtcagcaacgataacagcactttgaattcagccgcatatcaaagcaacgcaacctctttaaccggattcgatgttgctaacggtgttttgaattttaacgggttagaaaagtggactattaatgtgaacggaacattgactaccatcaatttacctgcaactgaaagttctggtgtacctgtttcattgaacgctgtcactattggtgaacctgctttaccgcaacatatcccacaacaaaaaaacatagtcagatcagctgtctatgatgttggtggatggaacggttccttgtatcgctccaatagcactgcagtttctgaccatcatcctgtcagaaagcaagaagctgccgtttctcagattactgatggtcaagtccaagctacctccatttcaactgcaactgctaccattccaagcaatagtacttacatttcttcctacgaaggtgccggtattaagatggaatccaagaacatgggttttgttgttggattggcagctttattatttttatga

SEQ ID NO: 4317 - DNA, 651 bp, Saccharomyces pastorianus
atgtcttcagaaccatataaaaacgtttacttgctacctcaaaccaaccagctgttaggtttgtacactatcatcagagataagaaaacagctagacccgatttcattttctactccgatagaatcattagattattggttgaagaaggtttgaaccatctcccagtgcaaaagcaaattgtagaaaccgacaccagcgaaaacttcgatggtgtttcattcatgggtaagatctgtggtgtttccattgttagagctggtgaatctatggaacagggtttgagggactgttgtagatctgtacgtattggtaagattttgattcaaagagatgaagaaactgctttgccaaagctgttctatgaaaaattaccagaagatatctctcaaagatacgtcttcttattagacccaatgttggctactggtggtagtgcaatcatggctactgaagtcttgatcaagagaggcgtcaagccagaaagaatctactttttaaacttaatctgtagtaaagaaggtattgacaaatatcacgctgctttcccagatgtcaagatcgttactggtgctctagacagaggtttagatgagcacaagtatttggttccaggtttaggtgactttggtgacagatactactgtgtttga

SEQ ID NO: 4318 - DNA, 369 bp, Saccharomyces pastorianus
atgcattcgtatgcgcaggagattctgtacccctacgcatattcatgcgacgccttgcctagagatttggaaaacctgttggaattatcatatgggctatccaaggcaatacgttcaaaatcaggtagaatttacgatgtaatttccgcatgtaaggaccgtggttccgacatattccccgggcttggtgcgggctccgccttggactacatgtaccatcatagagctcattgggcattccaactgaagttaagagacacaggaaaccatgggttcttactgcctccagaaaacatcaagcccgtgggtaaagaagcatatgcggccttgaagtacttctgtgattttttactagatccagaaatataa

SEQ ID NO: 4319 - DNA, 312 bp, Saccharomyces pastorianus
atgtataagaactcgttgggatcattcattaggtgcgctaatactcttttaggtataatctttggtattaggaaaattgaatggtcttcatccttgcaggcagctggtgcatggagcttgttgaatatcgtcttgtggttgttttttgatggcaccctaactgtcttgatttcaggtctagtcgtcggtgcgattagtgcatttagttgcactcaatatgtctcgcaattgtcgcagaccttatattttatagatttctatttttttggttttttgatgtttagcaagttgggcagatatttattcgattaa

SEQ ID NO: 4320 - DNA, 279 bp, Saccharomyces pastorianus
atgggaaaaaaaaagagcaagagccaagtacgttctaatgacactagtggcgctgccgcttctttcaaggaggcaacatctttgccacctttggggaataagctaggtagtgcaagtttcacagctataaacacactaacaaaacctgcatggttctcattttacgacgaagatatcactaagaatgaaggcgacgttcatgataagacattgctgtccaatgcttctcagttggaaatggttgcaccccctgacgaagtgaaacacgagagatcgctg

SEQ ID NO: 4321 - DNA, 762 bp, Saccharomyces pastorianus
atgaccggatcccagggaatagcagctcacaagaaccctcatattcggaatgtagccgttttgcaacgtaagcccaatcaggaatatgcactaaaaataatgaaggaagttgcacataaagtgtcctacttaatgaaggaaaacaactttaaagtggttagtcttgtggaattttaccctcgcgaccaacggcttttgggtatgaacgttaatcgtggactaaagataatgttacgactacgatgtcccacggacgaggttcagtttctaccgatggaatctataatgggcaccatgttgcacgaattaactcacaacttatttgggccccatgacaaaaagttttatgataagttagacgagctgattgggaggcaatgggttattgaacagaggggcctacatgacgcgttcttgggtaacggccaacgtcttggcgggagaccgaatgtagcttcgagtaagtatcccatgacgggggtgagtactaatacgggggtagtgagacgaaggggcaaaggtgtcaagttggggactctgagtctgggaggacagccgtctcccaacaggagcaaaactccaagagagatggcagccttggcagccgaaagaaggtataaggatgatcgttggtgtggagagaaaaagagtagtaaagatcagataaatgattataacgacgacttattggaaattgtggtacttgacgatgagaaggagccctcacagaccaagcgatcagaggttattgaccttacgtaa

SEQ ID NO: 4322 - DNA, 351 bp, Saccharomyces pastorianus
atggcaacagtagtcccacagcaagaacaacaacagcagcagcagcagcagcagcagcacagaggtaggaggctctccgaagagatcgcctcccttctcaggctgaaagagtccaggagactcaacccggccccttactacactccacgcaaggcctcgcaatcgcagtcgctcagcgagtccaccttcaagcagtacaacgagtacgtcaacgagaaggacccgaacatgtcgcagcacaaccgcgcgatggccgtcacactgaacaagcttgcgcaccagttctgggagaacgactgcgcaatcgatggagacatcttcgacgactcttctgacgaagaacaatactga

SEQ ID NO: 4323 - DNA, 432 bp, Saccharomyces pastorianus
atggaatctattgtggccaccgtttattggccgttaagattgtttttcgtcagcttaattcttcatggcgttgattctaatgcaaagacgcctttacccgtgacagttgatatggcaatccacctataccccatcttatatttactggccgatcactacttatccagatccggctcaaagtttaagctatcggattatactgcgtggtttattgtaaccagcctggcattttcatattttcagtatctagctttcctaatagatccaaagaaaggccaagcctatccgtatccattcctagacgtgaaagaaccatataaatctgttatttttatcgcggtttccaccatcacgtggggttattacgtgttttatcaaaaatatcctcccaaagataccaagaggttaatgggcaaggtttataagaattga

SEQ ID NO: 4324 - DNA, 321 bp, Saccharomyces pastorianus
atggcgtcatcttcttcagctataccgccctccacatccgtcgtcgaatcgactcaaacagagtctttctcaacgagaactacttccacattgacaccatcctccaaggtaagcgcgatttctagaacaacgacatctgcgccagcgcaatcttcttctgttcagtcgatatctgtctcgagctcagaaggcacttgttatgtatattatgatgacgatgattactatagtactgtctacctgaccaacccaactcaatctgttgatgcggccactacaataacgagtacgaacacaatatatgccactgttaccatttag

SEQ ID NO: 4325 - DNA, 285 bp, Saccharomyces pastorianus
aaacgacggcagtgcaagcttgcatgcctgcaggtcccagctggctctttcagaagcgtaagcgccacaaattcaagaaataacagtctaaccacacaaaataactcgtatcagtatcttcagcagcagcagcagcagcagcattacaactctcgtgttagtgggatattagaagaaaccgatgttgtacaacccccaagtgttggcggtattttaccacatagtggttcacaggacgatttaagaagacaattaggttcttctcataattacgcaatcaattga

SEQ ID NO: 4326 - DNA, 1092 bp, Saccharomyces pastorianus
atgcaccaatatccatcagaactgaatcatccgtactccagtgactctcaagacttcgtggaaaaagcttttcaacagcctccttcggacccatttgctaatagcatggatggaagcagatataatatgaaaagtgctactccacctggaaataccggacgttggtacgtagatccgttccaacttccacaggaaacgagtgattctaacagtctgagggattttgccatgagagtacaaagcgatggatttggagggtataaagtggctgcaaattccagaaatgctagttcattgtctttacatcctgataacttttcgaatcacacggcaataagagcgtgttcgaggtttcaagaaagcgaaagctcggaatcctactccagtcccatcgataatagtcacatttcaaatggctttgctactgaagatgcatacaggcaaccagcatttcttgataaagagagtagtttagctacagtaagcaaagagactaaagtttcgaacaagttagatgaatcgcccaataacgacgcattcgagtttgaatttgataacgaactagggaaccctcaaagaaagagcatacaggttggtatgaatgataactacgaactccaggatatcaaagatcctgaacatgtggatgtcagtagctctaacaaaggcgaaaacgatgactattatgtgtcacgcttatcagctaatgaggaagaagatatacaaagaatgaaaagtatttatcaagtttatttggatagaaccaaaacagtaaaagacgaacaagagagacagcaacaacagagtgtgaatgtcttgacaagaggtgaaccttgcatggacagtgcgggtcaaaatccactaccttctatccagattggcaacgaagatcctactgatgtgccagaggctgaccagtaccaagaacaatacccagtacaaaatgcacttgctgtaaatgatgtaaattcaaatgcgcatggcctagaaacagctcaacaccaagaccaatacttgacacatgataccctcgccgtaaatggtacagaaggagcagctactaatagaatagcttcctccatttattctatg

SEQ ID NO: 4327 - DNA, 1566 bp, Saccharomyces pastorianus
atgagccattcgtcgttggctgcttcttcagcaacaagccaaggtattagtaaaaaggaattacttcaacaaatcgctggttcgttgttgagtacgtctattgagcggttaaagaccacccattctcccgatgggtcatctatgctggagtactcggaagaagtcccgtacgatgaacaagagtgctatgactgcgatggtcccttcaagtgccctgctcaccttggggaggcggctgcgtattatgatgacgacatcgacgcagagcctgctctagaacccataagttctaatactgagagagatccatttatcgatgtctttttagacaagctaatatcgaggctagtacctgaaaaactgcctgaaagagaacattttagtagcagcgctaccattgagcacgatttggacacaggaagggttcctgtgttttctgcaactgtattaggcgggaacttcaagaaattgtctaagaaaatgggctcgatttttgaactacaggattccatagttcgcctgttgacttggagaaacccgaccggaacggtaacatcactgataatattcactttaatttgctttaacccaatgtatttggtgattttgccaattttccgtttcatctatagtattatagttcccggctacgtacttagacatcccttacaaagaagcatatatccgcttaaacgtaaccatggttcatcgttattgtatgacttttgctatgaaggcaagaacgaatacacttatggtcaacaatttttttccaaatcctttatggacaccttggaatcgagaaatcaagaaaaggatgagatttccgaattggacaaaagacctgaaaacacacgggaatttaaacatggaatgaaagtattgattaatcttcgcgatatgcaagacatgacttctggtacccttcacgtcattgacacaataaataattttctccgaaaggcttctagtttccagaatgaagtactttctactaagaggtttttcacaggcttcctttcaatcgccgtcctaaaaatcctgtcacccttcgtaaattggagttacatgtttagcatatctgcctggtgtctattgatatatatgcatccaagagctcaccctaaaataatcaaattcttccaaagtggaaaggtggaaagagaatataagaacttgaaaaggaaggaaaatcaaacatacaacatgatatttgacgaaaaaccagaaatcagatacattgaaatttttgaaatatataaaaagggcttactgccaaacgattggaagttttttagattctccagtagcatttttgatcctctggattcctatagaagagcacaacaagttccaccaggaacagattcattgcaggacgtcatgccacctctaggatggatattcgatccaaattttgagtggagaatcgacgctgacgtggaaacctgggttacggaacgaggattaaatttaccaactaccaaagaatttttactcgatccaatgtttaagaggaggcggctgattcatcgtgtcattaagagctcaaaaccagtaacatga

SEQ ID NO: 4328 - DNA, 753 bp, Saccharomyces pastorianus
atggttgcagtgcgtgtgttctcagaaaggactgctttaacccatcaattgggggagttcattgtcaggaagcaagacgaagcgctgctaaagaatccatactttaaagtctccattagcggtggctctttgatcaatgctctgtacgactgcctggtggccgacaaaacgctagctcctaaggtagaatggaccaaatggcaggtgtacttctccgatgagagaatcgtgcccttaacgcacaatgatagtaactatggtacatttaagaaagacgtgctagacaaattgccctcggctgttcaagtcagtgtccaccatatggacgattcattgcccttggatggtgacgctcaatctaacaacaaaatcgctgcagagtacgaacagatcttgcccgagtccctcgacttggttctattgggctgtggtcccgatggacacacctgctctttgttcccgggtgaaaaacaccagtatttgctaagggaaactaccaagagagttgcttggtgtcacgattcccctaagcctccgagtgacagaatcactttcaccttgcccgtgctcaaggaggccggggccttatgttttgtggcggaaggcagctccaagcaagatataatgcacgacatttttgatttgaaaaacgaacaattaccgacagtattaattaataaactgtacggcggaaaaacgtcttggtttgtcaatgacgaagcttttgcaaaagtccaaacgcaaactttttag

SEQ ID NO: 4329 - DNA, 1563 bp, Saccharomyces pastorianus
atgacaatagtccggtctagcttccttagaaggcagccatggggtagaggacgttttccaagactatactcgacaaaggtccctgataatgcaccgagagcggctgacaacgaacaatggttggaaaccctgagacatacaacgccggcaaaacaggggaggcagtggcctggtcgtggaaccagccaaactgatctgattgaagttccattgggcgatgtaacatctatcaactatctacaacggtataacaaacacaagcatagccaaggcaatttcgttgatgttcgaatagttaaatgtagaagcggtgctggtggaagtggagctgtctcattttttagggatgcaggaaggtcgattggccctccagacggtggagatggtggggctggaggtagtatttatgttcaagctgtagctggattgggatctttggcgaagatgaagacgacatatattggtgaagatggagaggcgggtgctgccaggcagttagatggtgtaaacggcaaagatattttaatacaagttcctgtaggtaccgttgtaaagtggtgcttaccacctcaaaaagttcgtgaactcgtagaaaaagaactatggaaagatcaaggtactacattaagatctatattggcctccaaaaccattcccttgaacagtccttgcggctcaaatgagaaaacgatacagttataccgacatcaaatggcggaaagctggctttttaaggacaagtccaaggaatatcacgaaactaaggattggttcaagattttgcataagaaaatggaagcgtatgaccattctttgaaacaatctgaaatgttctacgaccggtttcccttaaatggacttgatctggaacagcctatgtccaaaccggtgtgtttgctaaaaggtggtaaaggtgggctcggtaatatgcactttttaacaaacgtgatcaggaacccaagattttccaaacctggtaggaatggtttggaacaatattttttatttgaattaaagagcattgcagaccttgggttgattggcttgcctaatgcaggcaagtctacgatattaaataaaatttctaatgcgaaaccaaaaataggacattggcagttcaccacactgaaccccactattgggacagtttcgttgggctttgggcaagatgtcttcactgtggctgatattcctggaataatcgagggcgcatcactagataaaggaatgggtcttgagtttttgaggcatatagaacgttccaagggctgggtctttgttctaaacctagctaacgaaaatccgctgaacgaattgcgtttgctaatagatgaagtcggtggtctagagaaggtcaagacgaaaaacgtattgattgtgtgcaacaaagccgatatcgatttcgataactcaaaatcattggccaagtacctacaagtggaacaattttctaagggtcaagagtgggattgccttccgataagcgccctcaaagaagaaaacatagaagttttaaagcaaaagttgctgcaatgtgcgcgcccgtctcatgatgagaagtag

SEQ ID NO: 4330 - DNA, 1314 bp, Saccharomyces pastorianus
atgtccgaaattgctaaaagcaccgatttcaagtctttaggcctatcgaaatggcttaccgaatcgttaaaggctatgaagattactcagccaaccgccattcaaaaggcttgtattcctaaaattctggaaggaagagattgtattggtggtgccaagaccggttctggtaaaactatcgcgtttgccggacctatgttaaccaaatggtccgaagacccatgtgggatgttcggggtggttttgacgcccaccagagagttggccatgcaaatagccgaacaatttactgcgcttggtagtaacatgaacatcagagtatctgtggtggtcggcggtgaaagcattgttcaacaggctttggatttacaaagaaagccacacttcatcatcgctacgcctggtcgtctggcacaccatataatgagcagcggggaagacaccgttgggggactcatgagagccaagtacttggtcttggatgaagccgatattctgttgaccagcacttttgctaatcatttggccacgtgtataggtgccctacctcccaaggataagagacaaactttactattcactgctaccataacagaccaagtaaggtcactgcaagatgctccagcacaagggaataaacctccattattcgcttaccaagtagaaagcgtggataacgttgccatcccgtcaacattgaaaacagagtatatcttggttccagaacatgtgaaagaggcgtatttgtatcagttgttaacgtgtgaagaatacgtaaacaaaaccgccatagtatttgtaaatagaacgatgagtgcggaaatcctaaggagaactttgaaacagttggaagtcagagtggcatcgttgcactctcaaatgccccagcaggaaagaacgaactcgttacacagatttcgcgctaatgcggccagagtcctaatcgctacagatgtcgcatccagaggtttggatatcccaaccgtcgagcttgtagtcaattacgatattccttcagacccggatgtattcattcatagatccggtcgtactgcgcgtgctggtagagacggtgacgccatatcctttgtcacccaaagagacgtttccagaatagaggccatcgaagaccgtatcaacaagaagatgacagaggcaaacaaggtccatgacaccgccgttataagaaaagcattgaccaaggtaacaaaggcgaagagggagtcgctgatggcaatgcaaaaggagaatttcggtgacagaaggagactacaaaagcagaagcagatggacagcaaaagtatgcgttcctga

SEQ ID NO: 4331 - DNA, 462 bp, Saccharomyces pastorianus
atggaaggaagcactgatcacgagcatggtggcatgcacatgggagacggagatgatacgtgttctatgaacatgctattttcatggtcctacaaaaacacctgtattgtattcaaatggtggcatatcaagacattgcctgggctaattttgagttgtctagcaatttttgggttggcgtacctttacgagtatctgaaatactgcatccataagagacagcaatcacaaagggttttgttgcctaatagatcccaggctaagataaaccaagccgacaaaatttccaatagtattctatacggtctacaagtaggattctcattcatgctgatgcttgtattcatgacttataacggctggttgatgctagctgttgtatgtggggcaatatgggggaactatagctggagcgcctcttataatcctgacattgatgacagttcccttgcttgccactga

SEQ ID NO: 4332 - DNA, 1299 bp, Saccharomyces pastorianus
atgacagtgaatggcaaacaaagattggctattataggtggcgggccgggcgggctagccgctgcaagagtcttctcacaaagcctcagtaattttgaaatcgaaatcttcgtaaaggatcacgatatcggcggtgtttggcattacccagaacaagagagagatacaagggttatgtacgatcatttggagaccaacatttccaaagagctgatgcagtttagtgggtttcccttcgaagctagtgtacctctctatccttcgaggatacacatctggaaatatttgaagaagtactataagactttcattgccagccaggcttccattaccgtgcaccttagtaccgaggttacttatctggaaaagaaaggctctaagtgggaaatatcctccaaaaatgagctaggaacgaccacatcggatttcgatttcgttatcgttgcctcgggtcattacagcgtcccgaggttcccgtctaacattaccggtatagaccaatggttcgacaacaagagcgccggccattctaaagatttcaaaaactgcgagtttgcccgcgataaaatagtcattgttgtgggtaacgggagttctggccaggatattgccaaccaattaaccactgtcgcgaagaaagtctacaacagtataaggaaacctgcaaacaatcagccgcagtctaaactaatcgagaccgtctcgacaataaatgacgctgattggaagagtcattcagtgactctctctgatgggcaagtaatcagaaatgttgactacgtagtcttcgccacaggctactattataatttccccttcatagacccctctatcagatcggatgtgttgggagagggcgtcactgacgatgcatgctcgtccgtcaacctgcgtggcttatgggaacacatggtctacgtgaaggaccttacattagcgtttgccctgacccctcagttggtcattcccttccccttggcagaactccaagcggccatcaccgtcgaagtcttttgcaagaccttagccatccccgcagattttgactccaccgtctgcggggcccataacttccccaagggcaaagatctagaacactatgcagagctacagcgacttctggactgtatcccacatagagctggtcactttgacccagtcaagtgggacggaagactcaccgacctaagaaacgcaagctacacagacaaggaagagagaaatgtgcttctaacagaacacgcgcaaatcctaaacaaacaaaatctgccgtactttctcccagcgccacacatttag

SEQ ID NO: 4333 - DNA, 855 bp, Saccharomyces pastorianus
atgtttagcgcagtgggtaactggatccgaggatcccataaggataaggacttcgtgacgaagtatacagcagatctctcgcaaataacctcacgaatccatcaactagatgctgcactgaaaaaaagccaaacgattttgggtcaatggcaatccaatctaaccttctacggagccgctttcacggtattggctttgagctacacttattgggagtaccatggctactggccgtacctcgtagtgactttgtttctatgcctaggttcactgatcctggtgaaatggatgctaaccaaactctatgcattatacaacaacaacagattgcgcaagttgagtaaactacgtgccgtccatcaaaagaagctggaaaagttgaaagaagagacccattacaacgccacgagctcgattattcaacgattttcatcgggagacgaccaaaatgacgatgccatggttctcctagatgacgagttgaacgctaaataccaagaactaaataacctgaaaacagaattggaaaaattcaagaagcaaagccatgtggagggcttgaaaaaggaggacagtgacgcctggtttgacaaaatcattggcctgatagcaggtggtaatgaattgagctcaacaaattcactatctcccttcaaaaaaatcgtatgccccgaatgccattggaaatctagctgctacagattagctgacagaccagttctctttgtatgccctcaatgcaaccacagagcagacgaggaaaaggaaagacacgctatcatcgaagccaagcaggccaagcaagatgcacagcctgcactccccgagaaggacaaagaaagtgatttgcattag

SEQ ID NO: 4334 - DNA, 528 bp, Saccharomyces pastorianus
atggcagtctcaaacacaatcgacaacgagtcattcttggtgatgaacttaccgatcttgctcgcgagatattcctgcgcaaacacggtattgaccaaatacagaaccaaagacacgaatgtggtcgtccagaagatgaaaatgaaaatgttgctgacgaggatccatgagatgaacgcgcttatatcgtctgaattgaacggccgggtggattttttcaagaaccatcgtatgttgatcttcaatttggtgaagatgttattggtctgcaccagcagcgaatccctctcggtgatatatttcaagttgcgtttgacctcaggaggaggcccccgtctatgttctggctcattagagtatgccctcgcagacggagctagcagtaccaatgacgagtttcttgttactgttcctggcgggatccccaggtttcttcgaagaactgcacttctagcccagtacacatatcttggcacggcaaacggccggcacctcctaagaagaggcctggcaaaaagcaacatgtaa

SEQ ID NO: 4335 - DNA, 942 bp, Saccharomyces pastorianus
atgctcagaacattccaacgatcattcatcaaatttcagacgccctcattggccatccgtaagcaatgcttcaaaagacaattcgctaatgcgcgctccagtaaatacctgggacgttctggttcatcggttcgttattggccttggctcacagcatcggcattgattgccacctctttgtgcctctacgatgagacgatacaaaatgacgaaaagaatgagggttctttaccccataatgaatcggtacaagtagattcaagcgtatcggattttcccctcacaattacagccctaaacttccccgtctctacaaattttaaactgctaggatacggccaaagacatgtcacatttctaaggttcaaggtttatgccttgggcctatatttagctgaaaatgatgaaaatctgattgcaaacactttcaatgaagcttacttgcataaatatttccttgacgtggacgattccaagactcccaagcagaacctggctagatttttgaagcaggatgattcaaaatcagtcatgatgattgatgatttactggattcgggaatgagaatgttggcaaagataacacctgtgagaaacacagatttcaagcatctcaaagagggtttggtcaaaactatttccaaacatcctgatgtggttaacaataaagaaactttggaaaacgggctggaagaactaaataaagccttttcacgaaacggatccgttcgtaaaaatgatgacttgatcatcgagttactagctaacggcgccttacagttttcgtaccaagataataaaaacaatgaatctgaaattatgggattggtgaacaaccaattagtcggtaaatttttattcagtcaatatttaagtggcgacaaatctccttctcctcaggctaagaaaaccgctattgataaattgattacacttatgtaa

SEQ ID NO: 4336 - DNA, 591 bp, Saccharomyces pastorianus
atgcaacgtcacgtcaaagtcgacggtaaggtcagaaccgacaccacctacccagctggtttcatggatgtcatcactctagatgccaccaacgaaaacttcagattggtctacgacgtcaagggtagatttgccgttcaccgtatcaccgaagaagaagcctcttacaaattgggtaaggtcaagaaggtccaattaggtaagaagggtgttccatacgtcgtcacccacgatggtagaactctaagatacccagacccaaacatcaaggtcaatgacaccgtcaagatcgatttggcctctggtaagatcaccgacttcatcaagttcgacgctggtaagctagtttacgttaccggtggtcgtaacttgggtcgtatcggtaccattgttcacaaggaaagacacgatggtggtttcgacttggttcacatcaaggactccttggacaacactttcgtcaccagattgaacaacgttttcgtcattggtgaacaaggtaagccttacatttctttgccaaagggtaagggtatcaagttgtctattgctgaagaacgtgacagaagaagagctcaacaaggtttataa

SEQ ID NO: 4337 - DNA, 99 bp, Saccharomyces pastorianus
atgaggaactacatgaagcggtacttgaatgtgggggagtccgtgtacgactactctgttgccacgtgtggctcctcgacctacttcgctaggaagtaa

SEQ ID NO: 4338 - DNA, 1962 bp, Saccharomyces pastorianus
atggttgctgcaatgttttcactgactagaagaagagctgctgctgctgttgctgccgccaccacggcgtccggggcagcgtactgggtggcgtcgcagggcgaagggcccctggtacacaatgacccgagttatatggtgcaattccccactgcggctccgccgcaggtgggcaggcgggacctgctggaccggctgggcaagacgcaccagttcgacgtgctgatcatcggtggcggggccaccgggaccgggtgtgccctcgatgcggccaccaggggcctcaacgtggcgctggtggagaagggcgactttgcgtcgggcacgtcgtccaagtccaccaagatgattcacggcggcgtgcggtacctggagaaggcgttctgggagttctccaaggcgcagctggacctggtgatcgaggcgctcaacgagcgcaaacacctcatcaacaccgcgccgcatctgtgcacggtgttgcccatccttattcccatctacaacacgtggcaggtgccgtacatctacgccgggtgcaagttctacgacttcttcgcgggcaagcagaacctgaagagctcgtatctgctgtccaaggccgcgaccgtggagaaggcgcccatgctgaccacggacaacctgaaggcgtcgctcgtgtaccacgatgggtcgttcaacgactcgcggttgaacgcgactttggccatcacggccatcgagaacggcgccacggtgcttaactacgtcgaggtccagaaactgatcaaggacccggcttcgggcaaggtcgtgggcgccgaggcgcgcgatgtcgagaccaacgagctcgtcaggatcaacgccaagtgtgtggtcaacgccacggggccctacagtgacgccatcctgcagatggaccgcaacccctcgggccagcccaactcgcccttgaacgacaattccaagatcaagtccgcgttcaaccaggtcgccgtgatggacccggagatggtcatcccctccatcggcgtccacatcgtcctgccctcgttttactgcccaaaggacatgggcctgcttgacgtcaggacttctgacggcagagtgatgtttttcttgccctggcagggcaaagtcctggcgggcaccaccgacatccccttgaaacaggtcccggaaaaccccatgcccactgaagcagacatccaggacatcttgaaagaactgcaacactacatcgagttccccgtcaaacgtgaagacgtccttagcgcctgggcgggtgtcagacccttggtcagagacccgcggacaatcccggccggcggcaaaaagggctctgccactcagggcgtggtcagatcccacttcctgttcacttccgacaacggcctgatcaccattgccggtggtaaatggaccacttatagacagatggccgaagaaaccgtcgacaaagtcgtcgaggtcggcgggttccacaacttgaaaccttgccacacaagggacatcaagctggccggagcagaggaatggacgcagaactacgtggcccttttggcccagaactaccacttgtcttccaaaatgtccaactacctggtcgaaaactacgggacccggtcctccatcatttgcgagtttttcaaagaatccatggaaaacaaactgcccctgtccctagccgacaaggaaaataacaccatctattccaacgaggaaaacaacttggtcaatttcgacactttcaggtatcccttcaccattggtgagttgaaatactcgatgcaatacgaatactgcagaacccctttggacttcctcttgagaagaacaaggttcgctttcttggacgccaaggaagctttgaactctgtccatgccaccgttaaagtcatgggcgatgagttcaactggtcggataagaaaagacaatgggaactcgaaaaaaccgttaactttatcaagacattcggtgtctaa

SEQ ID NO: 4339 - DNA, 1290 bp, Saccharomyces pastorianus
atgatgatgatggaaaaaaaaaaaacaaaagcaaacttaaagcccaaagaattagaaccgaaatgcaagacacggatataccaaacacacagtcgtaaccaagccatgtccctggatcacgtcgactggccgcatgccacgttctccacccccgcgaagcgcatctttgacacgcagaccacgcaggacttccagtcctcgctggccatccacagaatcaagtaccatttgcacaagtacaccaccctgatgtcgcattgtgcggaccctgacccgcacgccactgcctcgtcgatccccatggtcaccgggctgatggcggtgctggacaggtttgcgcagttgatcgacgacaccccgccgctgccggggcccagaaggtacggcaacctggcgtgtcgtgagtggcaccacaagctggatgagcacctggcccagtggatccgggacgtgctgcctgcagagtaccatgccgtggtgcccgaactgcagtactacttgggcaacagctttggctcgtcgacgagattggactacggcacgggccacgagctctcgttcgtggccaccgtcgcggctctggacctgctgggcctgttcccgcacttgaggggcactgacgtgtttctgctcttcaccaagtactactcgatcgtgaggaggctgatcctgacgtacacgctggagcccgctgggtcgcatggcgtgtgggggctcgacgaccacttccatctggtctacattctgggctcgtcgcaatggcagctgctcgatgcgcacgccccgctgcagccaagagaagtactggacaaggcgctggtccgggagtacaaagacacgaacttctactgccaggggataaacttcatcaaccaggtgaaaatggggcccttcgaagagcactcgcccattttgtacgacatcgccgtcaccgtgccccgctggtctaaggtgtgcaaagggcttctgaaaatgtattccgtcgaggtgctgcagaagttccccgtcgtgcagcatttctggttcggtacaggcttcttcccttggatcaacgtccagaatggtaccgatctgcccgtttttgaggaaaaggaggaagagagtatagaccaggccaacgccacatcggtcgcaccggaccacacgtccacacggttcccaacgtccacggcgatgccccctccgatggcaccgccatctgggaacagtgtgaactctctactaagccaccagaatccccactcgcacagaaaccaggcgtctttgtcaagagacagactacgcaggtag

SEQ ID NO: 4340 - DNA, 930 bp, Saccharomyces pastorianus
atgagggttttccatacggttgaggaggttgttcaatggagaacgcaggagctcaaggataccagatccaaagaatccattgggtttgtccccacaatgggttgcctgcactcgggccatgctagtttgatctcgaaatctgtgagtgaaaacacatacaccgtggtcagtatattcgtcaatccctcgcagtttgcccccacagaggatctagataactatcctcggactctaccggatgatatcaaaatgcttgaatcgttgaacgtagacgttttatttgcacccaacgctcatgtcatgtatccacaagggatccctctcaacgtggaaaagcagagagggccttttgtcagtgttcttgggctgagtgagaaactggagggtgagacgagacctaacttcttcagaggcgtggctactgtcgtgaccaaattgttcaacattgtaatggctgatgtggcctattttggccagaaggacatccagcaattcatcgttctgcagtgtatggtggacgagctgttcgtcaatacaaagttgcagatgatgcgcattgttagaaacagcagtggcctggctttaagtagcagaaacaaatatctctgcccaaagtctctaaagattgctgaaaacctataccgtggactaaaagctgcagaaattgcaatcaagggcttggcatccggggctcgtctctctagatcagaaattattgacatcgtcacccaaatttgggcaccatacgttgattcccacgattttaagatagactacatttcgttggcagattttaaaacactcgatgagctgtctcttgttgaaaacactagagagcaacagccacttgtgatcagttgtgccgtatacgtgactgaccgcgaaaatccgaataccatcgttagattgatagacaacattgttatctag

SEQ ID NO: 4341 - DNA, 2067 bp, Saccharomyces pastorianus
atgcaaagctcgacaagtacagaccagcatgtgctacatcacatggaccctcataggttcacttcgcaaatacctactgcttcatcgtcgcaattgaggagaagaaatagtacgaaccccggtctaacagacatgatcaacaagagtattgcaagaaacacgataggtggtaccggcattcctacgggaggaataaacaaaaagaaaaattcaagaagcacggttgcaggtggtacaaatagcacggcattggccttcaatgataaaccgatcaacagtaatagcagcaataggttatcaataaatcagatcggtaacatacagcagcacctaagtaatagagatccgaggccattaagggacaaaaatttccaaaacgccattcaagaagagatttttgattatttgaagaaaaataaatttgacatcgaaacaaaccaccccatatcaataaagtttttaaaacaacctacccaaaaaggttttatcattatctttaagtggttatattccagactcgacccaggttatggtttcactaggtcaattgaaaatgaaatctaccaaattttaaagaatttacgttatccgttcctagaatcaatcaataaatcgcaaatttctgccgtaggtggttcgaattggcataaattcctgggtatgttacattggttagtacgaacaaatatcaaactggatatgtgtttaaataaagtggatcgttcattgatcagtcaaaatacgcaagaaatgacaatcttaaaccaacctttaaagactttggatgaacaggaccaaagacaggaaaaatacgagctcatggtggaaaaacttttaatcgattattttacagaatcatacaaaagttttttaaaactagaagataattacgccccatcgatgcaagatttgaaatcgggttttgaaaaatttgttcatgtaatcaatgcggatatatctaatttacaaaatcaaaatgacactctttatgaaaagtatcaagaagttatgaaaataagtcaaaaagtcaaaactactagagaaaaatggaaggcgctaaaaagtgattctaacaaatatgagagttatgttaatgcaatgaagcaaaaaagtcaagaatggccaagtaaattagaaaagatgaaatctgaatgtagcgtgaaaaaagaagagattaaagctttagaaactaatattgatgaattgcacaaaattttgaaaagaaaggggatctctactgaacaatttgaattacagaatcacgaaagagaagagctaacaaaggaactggataaaataaactttcaatccgataaattaacgagttccatcaagtctagaaagctagaagctgagggtatttttaaaagcttgttggacaccttgaggcaatacgatctatcaatacaaaacttggtaaaatcgcgtaatcaattaggtcatcatgttgatgaatcgtgtttaaaaatcaacattccagataatctgctagacgcagaacttcacgatagcattacataccagcaattattacccaaaggatccggaatctgcgaatctattaaaaaatgcatattaaaattaaatgatgatatccatgaaaggatcaaagctattgagaaagataatacaacattagaaaaagatatcaaaaacttgaaatatgacataaatgagaaaacccaagtcaacgaaagactcgagttggagttatctgaagcaaactccaaatttgaactttccaaacaagaaaacgaacgactactagtagcacagagaatcgaaatcgaaaaaatggagaaaaaaataagtgactcaaatcttttaatgaaaaccaaaatatcagacgctgaagaattggtgacttcgacagagctaaaattggaagaattaaaagttgatctgaataggaaacgatacaagctgcatcaaaaagtgattcatgtaattgatgtaacaagtaaatttaaaatcagtattcaatcatcattagaaaactccgaaaatagcttgggaagcattattgaagagctaaaacatttggagtttgacaaggaacatcagtag

SEQ ID NO: 4342 - DNA, 216 bp, Saccharomyces pastorianus
atgttcaccagcactttagcagctgggttgtccaacggaatcgacttcaggatcgttgcaccatcattcgtcaccatgcaagtattgctcgatgcactctgcaacaacttgtccatccccttagggcccaacgtgcttttcactaaatcacccacggcaatggctcccacgaaagccgacaaacgagcattttccgctctttcttctgtcacttga

SEQ ID NO: 4343 - DNA, 342 bp, Saccharomyces pastorianus
atggtttctcacaagaccgctcgtggtaaggctgccttggaacgtttaaaggtcttcgaaggtattccacctccatatgacaagaaaaagagagttgttgtcccacaagcattgagagttttaagattgaaaccaggtagaaagtacactactctagctaaattatcctcttctgttggttggaaatacgaaaacattgttgctaaattggaagctaagagaaaggtttcatcagctgaatactacgctaagaagagagctttcactaagaaggtcacatctgctaacgctaccgttgctgaatctgatgttgctaaacaactagctgctttgggttactaa

SEQ ID NO: 4344 - DNA, 666 bp, Saccharomyces pastorianus
atggacaaggacgtactaagaataacgatgggcaataaagatgttaaggatagcgataacgctactactacgttgtttggtttgcctgaagacagtggttggtctgttcctatgccaacaatgactgcggctacaacaagacacaacgttcacgcagtgtttatgacatgtggcacaagcaaatcagatgaaatctctgctcatggatcggatgatatggatgcaattatagagtttcatgcggatggtgactacgaacttggtaggatggatacgattgtagaatttcatgcggatggtgattacgatcttggaagaatggatacgaatgattccatttctgtcacagaagaaaaagatgcttcgttaagtcatatgtgggcagaattggataatttggatagcttttttacaaaagatactaatgtaccaaatatttcctctaagatggacatgggaattcctcacggacgttcagactcaatcgaaacaactcgtactgatcaaacattttcctttgaatctgctccacagctgtacgataaaaaagtctctgttatattgaacaggagcttgtcaagaacgccgtctaatgtttcattcaagacacatttggctgattcgtttgcagtaaaaataaatagaagtggaaaacccagaatataa

SEQ ID NO: 4345 - DNA, 6264 bp, Saccharomyces pastorianus
atggcttcgaaattcacttttccacctcagagggatcatggtaccggtttcactttcccaccgacaaatgcagtagaaaagtccaacagtggtaaccagatatcgatagatattgatccttcgagccaagagcattcagtggaaataagtcaagtccctcaagatccacctcatttgcaccaattccttaccaatgcacccactattgatattccacctcctattgatatttcagagggaaccccattaagtgagcaactactttttcagcatcaacaggaagtaaaggaccaggtttccctagagccctttattgcgcagcaagacaaccataaggatatttcagtgagaataaccgaacaacaagagcagccgagcatgcaagagtcaacacccacggatattgcaacaaaatctgtggcggaagattatgtagctaacctaagacagcaaatggccactgattggaaaagtccatctgaatatgctcttcatatacttttcacaaagtttattcgatatgcggaaaataaattaaatacgtgtctgcagcaactagtcgtgatggaacctgcaatcgtagaaattctaggggaaggaattgatcccagttttgatgaaattataagatccttaggtcacatagcaaaaaaaaagccaaaacccgttattgatgcaatgatgttttggaggaagacaaaatcagaagctgcaaattcagcttcagaggaagtggaaaagctaataaaagattacgagtttgaaaaagtgcaccctactcagtttatgacgaacaggcggttatcaagatcctccagtaatacaacttccaaatataagcataatgccagcataaatggccttcctaacatgaaaaggcatgcttcatcgtctgtaaacaacaaagttccattactcaagactagcagtggcagtaacagtactatttcaggcccatccatagcaaactcgcagctgaaaagcctggagaacgctattgacttggccaaggaagaagctttcttagcggacaggaaatctttaatcagcatatacattctttgcagagtactaaacgaaattgtcaagcaagcaccccataacgaagaagaagatttatccgataagctagaagaaattgttttcactcagttgaaaactacagatccactttctatttcgtctagcttgatcaaatcctcgaactggaattcatttgcagaacttttagggtccatgtctgaaaagaaattcttgtcagttagtgatcgttttatagccgatctagaaataattcctacgtatatccctccggaattagagccaagtacacacttgttaattcttggcatgagatacctgaaattaaagaactatccgctagagaaatttgaagagagtgcagattttatgaaaagtttgtcaaaattttttgcaaaaactgaaaatttccctgtttgtctagcttacgctgaagtcacaaaccaattattactaccattagctggttcgttgaccgcggaagtaaatcatcccacatgggtagaagcaatgtccactctactgaatactgctaaaagactgcaggccgataataagtattgggtaagcggattcaaactaacagtttctattttatgtgcctcaccgccagatttattttccaagaaatggttatcattattggaggcaaacgcatcgaaagttaagtctaaaagtttgaatgaaagaaccatttttgcagttggtttatcaagattagtttgggtttatctgtatagatgtccggagactttgaataacactacaagaacacttacaaaacttttacaactgtacttgaacacgaggaaaaaggaaaattggataaccggcgattttggacttttaaatcccttaacggatgcactgatatcgattgggtttttgcacccaaactttttaatggagcaagccttgattcctttgatacgacaatctttcaatggttccaatctggaaaatgcgaactatgaaaaactaatattaaccataaatacatataaaggtttgttagttactaaggaaaggccgaagtttcccgaagacgataatagattttacgaattgaacctaaacaacattactgtaaaccagattcaagaagcatcctccataaaccataacgaaatatcggattatttttataaattgttccttctactagattctagcattggctctgaagtctggtctcctgaaaatcagcatcaaaagcaatcatcgaatacattcagtccgtttacttttagcttttccaatgacaacgattcaagtaaaaataagtcattctatgttatattgtttggtaccattattgaagctataccttgctgtctctctatttcacgaaatattccatataaatctacgatcgaaatcttatcaaggaacgccgtccattcagagacaataatttcctcgagcagtcaaaacgcactaagggcattagctgctaaaaagaatccatacaccctaattacctggtttgcgaaatattcgtttgattttgacgaaaagacacaatcaagctataacatgtcatatttgtcatcgaaagaatacaacaggctattaatgctttacgttgagctcctagaatcctggctggaggagtttcaatcatctaacaaagaagaaaataagaaagaaactggattagatggaattcgtttgttaccagtcgatccagaacaagaagaaactaatgaaacagaaaaactggaatggaaaaatacagtaaccgttatcgaggaagtggaagggaacggtttatttttcctctgctcgcacgacgcaagaatccgtaggttaggtgtgcagatattgagaattattttcaaatttgacgaggccatgatggaaaaaactgagaaattatctaatggacattcgaggtcatcatctcatttcgcagcggaccgtggtacaaggcttattgatttattgaatgaatgtaacactacagccctaattaatccacacaaggcaacgttaagtgcggttgaaaaaacaagattcaaccggctaaactctaaatataagaagggactacttattaaactggcagaatcagagtatggggtagacgctgcattatggcaaagggcctttcctaaattattggcactggtttttaagacatgtcctatggccatggcattatgccgatctatcgtttgcataaggttggttcaagtacatgaaatcattctgcgcgtagcaaatgacgtcgattttaaacccaagaatgttctaccggaaacaattgtaaaccaatggaaactctatttaattgcagcatgtacttcattaacgtccacgtttgaccaaaaattgcatattccctctaatattcctcaacatggaaggaaaaagagccaacaaatttttactgttcagcatcagaagatcaaatctgcgaaatcaatcttcaaaatggttcttcctttattgaatgcgaaatacgttatgattagggacgccattataacaggattaagttcaatgaatatcaacatcttcaaagcatacgtagaagccatcgatgtattcttaatggcctggaaggagggaagttccaataatcaaattagagttgagatgttccatattgtgacgattttatcaccatatttgaaggctgatatgatatttaatgatgaatggatacttcggaaactatctgagtttttacaaaaaacaaaacagtttcttgaaaaggattccgtacaaatctcttatgaataccaatcactgcgaagctatttcgcaggccttatactaagttattatatggcagtaagggaacacccgcaaatagaccaattattcccttttcaagcccgtgcctcttgtttcaattatttgaaagagtggtgcggttatggtgattatgaaccgatatctgaagagagatatgccataatgatcaaaaatactgaaaatggcagagatagaaccgcgatcactactggaatagagttccaaaaaaatagacttcaaatgatcgtattagagactatggtcgctttatgttcagacccaataacgcaaactttggatgatgatttagaattacccattgtaatttctttcgatactgaagatttacttgcctggattgaagcattattcaactcagataacacaaccgttagaaaccttggggtgcgtgctttagagaatttactggagaaaaacagggaaaactctaaactttttaaagacgttgcattccagtgtgtttcgcaccattctcattcttgggtagctgtcttatattacactacactctgtaaatccgtgttgaaattggatgacttagttttagatgaagacgaattagtttctttgggtttgtatgggctggtggctgataaggaagataccagaacatatgccgttgatttactttcagccgttgaaaccaagttgcatagctcttcttatactaaggtattcaaagaaaggcttgcaaactcttcaaagactgtgtataaatcaactgcaaaggaaatctctagtatctttgccgagctgctatcccaagacttatgtttgagaatattttctagcttggttagaatactagatttgttcccttttgagataaaaagagatttgttagtgctcatggtaccctgggtgaacaaatttacattaaaatcggtagaagagctcgatacctttatggttttgaataatttatttttcatcaccatcgatcttaacgattctttaccaaacgaagtggagcagctctggatttcgctaggcaagggtaattcctttcaaaacatacacgtatcattggaatacattataaactcttcaatgaaccattgtaatccattatttgttcaatatgcgagagatatcgtcttgtatttggcaaatattcctggcggtattggactacttgatacattgttgaataatttagaacccaaatgcatggttccttcaaccaagcatacgttcattgagcccatgaacaataataagtactcttttttggggaatatttgggaacgtttgaattacaacggaaaaagaattatcttttcgaaggcgcagctttcaatagtttttttggtaaatttgctaacgaacctgagtgaatctgtcaaggcaaaaatcccattacttttacatatgtccatttgtttactagaccattatgttcccctcattcatgaaagcgcatgtaaaattgcgtctacattaatatttggattggcaccaacccatgaaaagtctgaggaaactgtcaagctgctaagaaataagcatgtcctgtggtcatatgacaatttgatgaaaaaaggcgctagatcacctaaaactatggatttactgatcaggaacattatcgctatattttcagaattggaggaatttcaagtaacctggcaaagaatcgccttaaaatgggctactacttgctcagtaaggcatatagcgtgcaggtcttttcaagttttcagatcgttattaacattcttggatcaagaaatgttgcgtgatatgcttcatagactctcaaacactatatcagatggaaatgttgatatacaaggatttgccatgcaaattttgatgactttaaatgcgataatggcggaacttgatccaaccaatttaatcagtttcccacagttgttctggtccatcacggcatgcttaagcagtatacacgagcaggaattcattgaagttttatcatgtttgagcaaattcatttccaagatcgatttggattcgccggatactgtgcaatgtttggttgccattttcccttcgaattgggaaggtcggtttgatggtttacagcagatagtcatgactggattgcgatcttcgaattccttggaaattacatggaaatttttggataagttaaatttgttgaaggatagtcgaattatagcaaatacagactctaggctattgtttgcattgattgcaaatcttccaagatttttgaacgcaatggaccgtaaagattttacggccatccaggttgccgcagattctttaattgagctagcaaacgcgtacgagcaaccttcattatcccgcttgattgattctttggcaaagaataaatttaggtcaaaaaaggatttcatgagtcaagtagtaagttttatatcaaggaactatttccccctatattctgctcaaactttggtatatagattaggagctattgttaaataa

SEQ ID NO: 4346 - DNA, 1671 bp, Saccharomyces pastorianus
atgactaaacgacaaatcggtgcgatgcttggtgcacataggtccgagggtgaaccggaaaggaatgaaatctgctccattccagctcatggtgatactaatggtctagcagtgcttaattctcaatcagaagtagacaatgaatcggattttgaattagcgccttattcaaggttcagtaacacccaaaaaatgcttcttgtcgttcagtgcgctttcacaggtttcttttccacggttgcagggtccatatattatcccgtgcttactgtgattgaaaaaaagttcgacatcactgaagagttggctaatgtcactattgtggtttattttgtcttccaaggagtggcaccctcgattatgggcggattggctgatacgtttggaaggcgacccgttgtactgtgggcagtgttaacatactgctgtgcttgtattggattagcatgctcgcgtaattacgcccaaatcctggcattaaggtgtttgcaagcggcaggcatttctcctgttatcgcaataagtagtgggataatgggcgacataactacaaaagtggagaggggcgggtacgttggattagtgtcgggttttcaagtagtcggaactgcatttggtgcactgattggagccggattatcatcaagatggggttggagagccattttttggtttttggcaataggttccggaatctgtttggttgtttccgctctctttttacctgaaacaaaaagaacgttggtgggaaatggctcattaacgccaaggtcgtttttaaatagggccctcatactacgtgttgccagcgtgaggaaaacccttcacttagatgatcctgaactggacacgttagaaccacgtgctagagtggattttttagctcctataaaaattttgcacatacgggaaatagatatcctgttattcattgctggtttgcaattttctacatggacgacgcatcagactgcattgaccactgtcttgagtaagcggtatggtttgtcagtcgccaaaattgggctttgctttttgccagcaggaatttccacactgacgagtgttatctcggctggtagatatttaaattggagctatagaacaaggaaagtcaaatataacaaatggataaaagagcaagagctgcgattgattgaacagtacaagggtgattgcgataaagtggctgaagttcttcagttcgattatcattatacttttaatttggtcgaagcaagactacatccagcatttgtgacacttcttttcagtagtgtagggtttacagcattcgggtggtgtatttctgtgaaagcacctcttgctgctgttttgtgtacgagtgcattcgcaagtttattttcgaattgcattctgaccttttctactactttaatcgtagatctattcccaacgaaagcatccactgccacaggatgtttgaacctatttagatgcattttgtcagctgttttcattgcagccctaagtaggatggcagagaagatgaaatacggaggcgttttcacactactgagtgctttgacttcatcttcgtctttattattatttcatcttttgaagaacgggaaaaggatatcgttcgatagaactaaagaagctggtaaaaaggccattaaagacaagttcgaaaaaacaaaagcatga

SEQ ID NO: 4347 - DNA, 204 bp, Saccharomyces pastorianus
atgaacattgagttcgttactaagtacctgcccgattccacatcacagatcaaggcaaagatcaccgattcgggcctggctacgttgtcctataagcaaaacttgaaaaaaggcatctctttggggatgggcatgtcatttaatgcgctagagttggccgagccggttcacaagttcggctggtctctttcattttcggcatga

SEQ ID NO: 4348 - DNA, 147 bp, Saccharomyces pastorianus
atggcaccaccttttttcaacgacatctccagagatattaacggtcttttgaacagggactttttccataccagcccgctctctttgaacatatctaccacgacgcaaaatggagttaattttgctctgaggggaagcaggctgtga

SEQ ID NO: 4349 - DNA, 711 bp, Saccharomyces pastorianus
atgtctcccatccttactaccccaaagaggcatgcccccccacctgaacaattacagaatgtaacggatttcaattacactccatcacatcaaaaaccattcttacaaccacaagcaggcactacagtaacgacacaccaagacatcaagcagattgtagaaatgacgctgggatctgagggggtgctcaaccaagctgtgaaattgcctcgtggtgaagacgaaaatgaatggttggccgttcattgtgtggatttttataatcaaattaatatgttgtatgggtccatcacagaattctgttctccacaaacttgccccaggatgatagcgacgaacgagtatgaatacctttgggctttccagaaaggtcaacctcctgtttcagtgagcgcacccaagtatgtggaatgtttaatgaggtggtgtcaagaccagtttgacgatgaatctctcttcccctctaaagtaaacggcaattttcccgagggattttttcaacgtgttattcagcctatcctgaggcgactgttcagggtttatgctcacatttactgtcaccattttaatgagattctagagttgaatctacaaacggtgttgaatacaagttttagacacttttgccttttcgctcaagaattccatctattaagaccggctgatttcggcccattgttggagttagtgacagagttaagggataggtag

SEQ ID NO: 4350 - DNA, 2388 bp, Saccharomyces pastorianus
  modified_base (245)..(297): a, c, g, t, unknown, or other
atgctacacggacatggtttgtgggtgttggctcggcccggctccccttttttttttcttgttctgcgcttttctgtgcttcttctcccttccaggagcgccccccttcttgcctcgctggccctcgaattcgccgatcgacggcttggccttccctgtattctaccgcatcgctattgtccgccttttccccatcgcggtgaacgtatacataaatacttactaactttatccatacatattcnnnnnnnnnnnnnnnnnnnnnnnnnnnnnnnnnnnnnnnnnnnnnnnnnnnnnttaaaaacgcgcgcgtacccgcacacgcctcgctctctcacagagtatatatatatttataaatttatatattcgtatattcttgcatttcgagaagtagtgcatttctgcttgtttctcttttgccactccccccctcctttttttcgcaacagcaagaccacagacggtttccacaatatgaagtaccctgctttcagcatcgacaccgacacggtgtgtttgagcgacagccccttggacgactaccagcgtctgtacctcgtcagcgtgctcgacagaaattcgccccccgccagtttcagcagcggtctcagcatcaagaaggccaactacaaatcttccattgctgcgcagtttacacatccgaacttcatcgtccggcctcagaacgccaccgagggtgaagaggacgggcggccaccgcagaacgttctgaactgcttcgagtaccagttccctaatctccagacgattcagagccccctccacgagcaggagttatttgcgcagctttccagctccaacgctgctgccgcggcgaccgcctctcacccaccgctgcatctgcacggcaagaacgttcttatgggtaagatcatactggcagcctcccgtgctaacaggacgcccgtgtcggcgtcgcccatcaagcaggaaaggaagtcgctatcagcggcttcgcgcgagaacggcccctcttctttgacaaagaaccagcagttcaagctgaccaagatggaccataacctgatcaacgacaagctcatcaacccaaacaactgcgtgatctggtcgcacgactccggctacgtgttcatgacggggatttggaggctgtaccaggacgtcatgaagggactcatcaacttgcctaggaaggacgccgcagccgctagccagcagcagttcctctgcaaggccgagttcgaaaaaatcttgtccttctgcttctacaaccacaactcgttcccctccgacgactcttccaacctcctgctgtcgtcgacgtcggcgtcgccgcccaagagacggaagtccacgggctctgccttcttggaccccggttcctcttcttccgccacgccctccgcgcaggcaaacaactacatcgatttccactggaacaacatcaagccggaactgagagacttcatctgccagtcgtacaaggacttcctgatcgacgagctggggcccgaccaactagacctgcccaacttgaatccggcaaacttcaccaagaggataagaggcggttacatcaagatccaaggaacgtggctgcccatggagatctcaagacttctctgtctgaggttttgcttccccataaggtacttgctggtgcccatcttcggtccggagttcccaagagattgcgaagcctggtacttggcccatcaaaacgtcaccgtcaccaccccgacgacttctgccatggcgaaacccaagcagaagccccggcccagaccaagacaaaggtccacctccatgtcccattccaaagcccagaagcttgtcatcgaagacgccttgccctcgttcgactcgtttgtggagaacctgggtctttcgtccagcgacaagaactttatcaaaaagaagaacaaaaggcaaaagtcccccacgtactcctctccctccacttcccccattgggcctaaggaccccacggtgcaaatcctttccaacttggcctccttctacaacacgcacggccacaggtactcctacccgggaaacatctatattccacagcaaaaataccctctgcctgcgtcaggccggctctcctcgccgcaagggcagcagaactacacctatgaccacacgcacccagttccctcgcaataccagtctccaaggcaatacaacatcccgtcttcccccatcgctccggcgccccccaccttccctcaaccttacagtgacgaccactaccacttcctcaaatatgccaacgaggtatacaagcaacgcaactaccaagcggctaacaatacaaacgctaatacggacaccacttcttcccccaaggcgaacaattcactgaacaatctcaaattcaaaacaaactccaaacagtag

SEQ ID NO: 4351 - DNA, 1629 bp, Saccharomyces pastorianus
atggtgaagttatataacaaattgctcggcacactcgccgtgggcgtcggatctgtctgggcgctcgaaaacacgacagtctacgagttcgagtctgtcaagggcttgttcgaacaggagtaccgaagtgtgttctcggacaatgtttcgcaggtgcagttgcgggacgccgttgtgataaatggaacggtggtctacgaggctggcgcaggtggggacggtgggtcgctggacgagtggctgcaggagcagcgtaacgtctccgttcagcgggttctcgagaacatcggccccagcggcttgtatccttctgtgctgcccggggtcgtgattgcgtcgccgtcgcaggcgcacccggactacttctaccagtggattagggacagcgcgctgaccattaacagcctcgtctcgcacacgcacacgcacacgcacacactgctgcagtacttgaatgtcacgttccacttgcagaggaccaacaacaccttgggtgctggggtccagtacaccaacgacacggcgtcgctgggcgaccccaagtggaatgtcgacaacactgcattcacgcaggactggggccgccctcagaacgatgggcccgccctgcgcaccatcgccgtgttgaaaatcattgactaccttaacgaggccggcgctgatctgggcagtgggtatccgttctggtccaccaaagaggtctttgacgatatcgtgcgctgggacttgaggttcgttatggaccactggaactcgccgggcttcgatctctgggaggaagtcagcgggctgcatttctttacgttgctggcgcaactgtccgcggtggacaagtcgctgggctatctcaacgacacggaacagtcgtcgtcggaatttgttgacgagctgcgccaaacgcgccaggccatctcggaattccttttggaccctgcgaacgagttcattcaccctgagtacaactacgtggtcgaaactcccgccattgccaagacgttgcggtccgggctggatatttccactctgctggccgccaacatcgctcatgacacgccaaaggcttcccggttgcccttcaacgtcgacgaccgtgctgtcctgaacactttgcacaacctgatgttccgcatgcgttctctttacccgatcaatagcaacgccacgggcattgccctgggcaggtaccctgaagacgaatacgacggttacggattgggcgaagggaatccgtgggtcttggccacttgtgccgcttccaccacgctttacaaactcatccattggcacatctccaagcagcaagacgtggttgtccccatgcacaatgaaacctcgaatgcattttgggaccagctgattttctccaatctcgcgactttgggcagcgacgatgggtatttgattgtcgagtacaactcccccgccttcaatcaaacaatgcagaaaatctttcagctggcggattcgttcctggtgaaactgaaaacacatgtgggtgcagacggcgaactgagtgaacagttcaacaagcacacgggcttcatgcagggcgctcggcacctcacttggtcctacacctcattttgggacgcccatcaaataagacaagaaattctaaacaccttttaa

SEQ ID NO: 4352 - DNA, 2001 bp, Saccharomyces pastorianus
  modified_base (719)..(761): a, c, g, t, unknown, or other
atggtaaataaatcaaaatttgatggcggtaatggtaccgcaactaatggaaacgcaccatcatcacgaaatcacaagaaaaaatacagtaactgccgtaaaaagagcgtggcatcatctgtacggtgtgggaactttgggatcgcaagaatgggcgatgatgagaaacaggtttctaggatattcgataaaatgaatcatttgaaaaaatttagtgctgaagaggatgatgatagaaatctctttattcaatggtcggatgacataacagacactctatctggattatggtggaccggaacttttctaaaacttctaataagctctgcattaaccggacgtgccaagaaatggtttgattcaactaccgagggcatcgatgaccattcaataaggacttatactttagaaaaatttcttgccttattgtcaggagaatttgatggcataagagtcttaagaagagaaaggtttgccgaattactggagctgtcgattaactctgagacatcattggaaaaattcgcgaaaatttctgaacttctaactccttattacctatcgtctagtgctgcattagatttatttcttaccaagttggagccctgtctgcaaaagcagctgggggatactgcattcccaatgactttggatatagcgttactagtagctgcgtgtgagtttgcgaaggggacatctaaagaaagaaatgacgagcnnnnnnnnnnnnnnnnnnnnnnnnnnnnnnnnnnnnnnnnnnncggcaataccatagatttagaccctagtgtgcggaagaataagaacactattaaaactaacaagaaatgcaagaacaaacatatacatgaaaatattgataatgccatcaaaaagagtaatggtaagaaaaatagaaatgaagagggattacaggtgattcatcctaaacgtcgaaaacaaaatgaatctggaaagcagctttccctctctacggctgtacttgcagatatagtaccattggataatagtatatccaacacaaacgcatcaaataagcattttaatgtaagtaatcctgtggattcttatacgtctaaaaggaatggatctcaaaatcaccctataaatgaaatgccaaccttggacggtaacaggtcctttccaattacaattcctgctgccgccaacctcgcatatgacaaagttgaaagtgtaaaaaatgaaaccaatattcattatgaagcaataaatgacatcccattgtcgttggccagtggtagtgattttgtgaaaagaaatgtagcagaatccatgagctggaaatccattagaggcaacgccggagtgccggattcgaacgcgaagagcgatcttagaggtgatgagtctaatcgtcaaatggctcgtcgatcccatgcggcgcacatttcttcacattcaaacacacctgaacctcgccagacagcatggcacgatccaattgggactaactttgctgagaccaataagattgtagaaattactaacctaaatccatttacgaaacacgaaaatacaataggttccgataaaccaaaaggttccaacaaccctataacttccatgaaggtaaataagccaggctatttcattgatcttgaaaagccacaaagtatgcataatggtaataggaatgtagggctgttagcacaaaaaagctacccacttcataattttgcagtgcgtacaagaaatgcgcattttaatgaccgtccttctaactatacatcagcacatggaaacttgaacgccatccaccctttatctttaaggattaataatattcaatgtttgtccaggcctggtattagggaagcagatactaacaaagaagtacattcacccaagatgacagttcaagaaaaaggaactgtaaatagcgcagttgcgaaagataaggatgggagatccaacagtgtggaaaacccgtttctcgggaacacgttgaacggaacaaaactaaacagctattacatatga

SEQ ID NO: 4353 - DNA, 960 bp, Saccharomyces pastorianus
atgctgggagaggaacaatcacaaaacgctcataacgggcaagaaatcgaaaaggagctgcccttcatggagaggccttggtttaagaaggcctacgaaaaggccatcgagttccacgaaaaggacgaactgctagacgcaaaagacagactggagctgtcgaaggcttacaggtctattgctaaggcccaaatgtggggtggctggctcgccttctcctctgttttttttaccccatttgcgtatcgttactacaagaccaacgctatcaagggcgtcaaagttcccagaaattttgtcctgggggtgatggctctgttttttgctacaaatgtcgctggtcggtccatgtatgatcgcaaactgaacgaacgagacctgaccggttccctgaaggacagtcatgcctacgattatggcgataacgatttcgaagccgctcagcccgaccaaacgaaggaagtttcaagaaacaaaagacagtacgatatgatgcgacttttagatctagggtctccctctaaatggtcaatgtacttttacataacgtaccaaaatccagagagaagactgcccgatccgaaagctaaactagaacaactgaaaaagaccggcgtcttcagtggttcgcccttcatgaaccaaagagatcctatcgggctgtaccgtaacaaaggtaaggaaacttcaggctcaaaagattgggggaaggacgataacgataacgataacgattcattgtcttcgtgggagaaagtgaggaacggcgaagacggctcactttcatcttgggaaagtataaggagttcgaatagagatcaactccaagaacctggtgctcaaaaagatgaaggatccggtgtgtttagctccggattatccgatgacagttttgacaccggaaaaccttcctctgatgacggatatgaacgtctactacaaagcggaagaaatcgctga

SEQ ID NO: 4354 - DNA, 891 bp, Saccharomyces pastorianus
atggattactttaacatcaaacagaattactacacgggaaatttcgtgcaatgtttacaagaagtagagaaattcaacaaagtcacagataacactttattgttctacaaagccaagacccttttagcgttgaaccaatatcaaacacaggatccttcttctaaatttggtaaggctttggacacgtacgttaatttcctagacactaaagacattacagaattggaaggtttactaaaggataaacaaagctccccctatgaattacaccttttggccagtgcccaagctatttttggtaacttggatgaaagtttggagacctgtgttgaaggtatcgataacgatgagatggaaggaaccacggaactgctgttacttgccattgaagttgctttgttgaacaatcaagcctccacggcttccgtcatctttgataattatactaatgcgattgaagaaaatattactggtgacaatgaaatgattttgaaccttgccgaatcgtatatcaaattcggtacaaacaaagaaacagcgacttccaacttctactactatgaagagttatctcaaacttttcccacttggaaaacccaattggggttgctgaatttacacttacaacaacgaaacatagctgaagctcaaggtattgttgagttattactttctgattactatagtgttgaacaaaaggaaaacgctgcattgtacaaacctaacttcctggcaaaccaaatcacgcttgccctcatgcaaggtgctgatactgaagatctaacaaatcaattagtagacttggatcatgagcatgcattcattaagcatcaccaagaaatcgatgcgaaattcgatgaattagtggggaaatatgacctgtcaaactaa

SEQ ID NO: 4355 - DNA, 222 bp, Saccharomyces pastorianus
atgtctttcaaatccatgttttcatttttcagctcacctatggccttgttgattatggtgccgttttttccaatctcgttgataatactttgcaggattgagctatcctcaaagtgtatcacgtcatcatcaatttcgaaatttagctgtcccgacactatcagattagttagttcttctttaatatcctccagatcaatacctaatgtggatgataaataa

SEQ ID NO: 4356 - DNA, 450 bp, Saccharomyces pastorianus
atgattggtgagtcttcttcccattcattccatttgttgaaacagtctgacgccgtcactattcgtaccagaaaggtcatctccaacccattgttggccagaaagcaattcgttgtcgacgtcttgcacccaaacagagccaacgtctccaaggatgaattgcgtgaaaaattggctgaagtctacaaggctgaaaaggatgctgtctccgttttcggcttcagaactcaattcggtggtggtaagtctgtcggtttcggtttgatctacaactctgttgctgaagctaagaagttcgaaccaacctacagattagtcagatacggtttggctgaaaaggttgaaaaggcttctagacaacaaagaaagcaaaagaagaacagaggcaagaagatcttcggtaccggtaagagattggccaagaaggttgctcgtcgtaacgctgattaa

SEQ ID NO: 4357 - DNA, 114 bp, Saccharomyces pastorianus
atgttatctactggttcacagcttagatccatgaaaaactccatcacagtaaaattttgtgtgatcaaaacatctttgctctcattagcatccagaactttaacaaatagttga

SEQ ID NO: 4358 - DNA, 759 bp, Saccharomyces pastorianus
atgagtgttttgaacccattcacttcaaacatgtactctcgtcgtgtcttatctggtgaattccaagtcgtcaatccatacttactacgtgatttagtcgatctgggcatttgggatgatagtatgaaacaatatttgattactcaaaatggctccattaaagatttaccaaacgttcctcaagatttgaaagatctatataaaactgtctgggaaatctctcaaaagactattatcaacatggctgctgatcgttccatttacattgatcaatcccactccttgaatttgttcctacaatcaccatcaatgggtaaaattacaagtatgcatttctacggttggaagaagggtttgaagacgggtatgtactacttgagaacacaagccgcttctgcagccattcaatttaccattgatcaagatgttgccgatcaagccgctacacatgttgcatccactgcagaattgaatcgtcccgtttatatcccaactggtaccaaattctccgataaggaggccgcagaagcaactactgaaaccttggataatgacaaggaaacatctcccgttccatctgaaccatcttctgtctctagtggtatgtcgaacatgaaactggaagacggagcttgcccttcagttccaacagaaaacatcaaagaggattctggagacaaaaaatgtgacatatataatgaaaaagtgattgcttgcagtgcccccacaccagaagcctgtgaagcatgttccggttaa

SEQ ID NO: 4359 - DNA, 1857 bp, Saccharomyces pastorianus
atgttcgttataaagagagacggccgccaagagcccgtgcaattcgataaaatcacctcccgtatcacccgtttgtcatacgggctggatcccaaccgtatcgacgctgtaaaagtcacccaacgtatcatctccggtgtgtactccggtgtcaccaccgtcgaactggacaacctggctgccgagacatgtgcatacatgaccacggtgcaccctgattacgccacgttggccgctagaattgccatctccaacttacataagcagaccacaaagcagttctccaaggtcattgaggacttgcacgactgggtcaaccctgccacggggaagcatgcccctatgatttcggatgaagtctacaatattgtcatggaaaacaaagatacgctgaactcggccatcgtgtacgacagagatttcaagtacacctattttgggtttaagactctggaacgttcctacctgctaagactagacggtgaagtggccgaacgtccccaacatttggtcatgcgtgtggccctaggtattcacggcagcgatatcgagtccgtgctgaagacttacaacttgatgtcgttgagatacttcacccacgcttcccccacactatttaatgccggtacgccacatcctcaaatgtcttcttgtttcctgattgccatgaaggacgactccattgaaggtatttacgacactttgaaagagtgtgccatgatttccaagactgcaggtggtgttggtcttcatatcaacaatattcgttccacaggctcttatattgcaggtaccaacggtacttcaaacgggttgattcccatgatccgtgtcttcaacaacactgcacgttacgtggaccaaggtggtaacaagagacccggtgcctttgcccttttcttggagccatggcatgcagacatcttcgactttgtcgatatcagaaagactcatggtaaggaagaaattcgtgcaagagatttgttccctgctctatggattcccgatcttttcatgaagcgtgtcgaagaggatggggcctggaccttattctcaccaagtgctgccccaggtttggacgacgtttggggtgaagaattcgaagagctatatacccgttacgaaagagaaggtcgtggtaaaaccatcaaggctcaaaaggtatggtacgccatcttgcaagcacaaacagaaaccggtacacccttcatggtttataaggatgcctgtaacagaaagaccaaccaacagaacctgggtaccatcaaatcgtcaaacttgtgttgcgaaatcgtcgagtattcttccccagatgaaactgctgtttgtaatttagcttccattgctctaccagcattcgttgagacttcggaagatggtaaaacggcgacctacaatttccaaagtttacatgacattgctaaagtcatcactcataacttgaatagagtcatcgaccgtaactattatccagtgccagaggctagaaactctaacatgaaacatagacctattgccctgggggttcaaggtttggccgatacttatatgatgctgcgtttaccatttgaatgtgaaaaagctcaaatacttaataaacaaattttcgaaactatttaccatgctacccttgaagcttcttgtgagttagctcaaaaggaaggtaaatattccacttttgaaggctctcctgcctctaagggtattttacagttcgacatgtggaatgctaagccatttggcatgtgggattgggacactttgaagaaggacattgtgaaacatgggttaagaaactctttaaccatggccccaatgccaaccgcttcaacatcccaaattcttagggtacaatga

SEQ ID NO: 4360 - DNA, 690 bp, Saccharomyces pastorianus
atgcaggacaccgcagaattgagcacctcgaagctggggacgaagaagtactgggatgaattgtatgccttagagctggagaattttaggcaaaacccgcaagatacgggagactgttggttcagcgacagtgatgcggaacagaagatgatcgatttcatggtagacaacatcggtgcgcacaggattaccgaagatgcgtctgtggtggacctgggcactgggaatggccacttgctgttcgaattgcacgagacggaattccaggggaagctggtcgggatagactactctgaagaaagcgtcaggctcgccactagcatagctgaggccaccggcgtggaagagttcgtcagtttcgagcaagcggatatctttagcgccgattggagtccgggcaaattcgacatcgtgctggataaagggaccttggacgccatttcgttgagtggtatgaagattaacggcgagcttgacgtggtcgaggtgtatgccggagtggtggagaaaatcctggaaaaggacggtattttcttgatcacgtcttgcaattttacgcaggatgagctggtgcagatcatagagaccgacaaactgaaaatgtggaaaacgataaactatcccgtcttccagtttggcggtgtccagggcgccactatatgtagtatagcatttgtcaaacaaagctga

SEQ ID NO: 4361 - DNA, 381 bp, Saccharomyces pastorianus
atgagacggaggaccaggagttcgaccaagttcaacgcccaatggaagtactatccgccatttgtgttgcacgacgcgcatgacgaccctgagaagatcaaggagactgccaattcgcactccaagaagttcgtgcgccatctccaccagcatgtggagaagcacctgctcatggacatcaagactgccatcaacaagcccgaattgaagttccacgacaagaagaagcaggagtcgtttgacaagatcatctggaattatggcgaagaaacagagctgaacgccaagaaattcaaggtctcggtcgaagtcacgtgcaaccacgacggtgccatggtggacgtggactataagacagagcccgtgcaacccctgatctag

SEQ ID NO: 4362 - DNA, 111 bp, Saccharomyces pastorianus
atggtgaaaaaagacaagaaggcaaagggcccaaagatgtccactattaccaccaaaagcggcgagtctctgaaggttttgaggatctgcacgattttggaacctacttga

SEQ ID NO: 4363 - DNA, 918 bp, Saccharomyces pastorianus
atgttgaaaatactcatacgagccacttgttcacaagcaacacaaccaaccaagcattcaaagatggctgtcgacgctcaaaagcttgtggtggtcatcctgatcgtggccatccccttgttgttaaaactctttagcgggcaaaagcccaaggctgtgctagaccccaagcggggcgagttccaggcattcccactagtagagaagaccatcttgacgcacaacacttcgttgtacaagtttggtttgccccacgctgacgacgttctcggattaccgatcggacagcatattgtgatcaaggccaacatcaatggtaaggatatttctagatcgtatacgcccacttcgttggacgaggacaccaagggaagctttgagctactagtcaagtcataccccacagggaacgtttcgaaggtgattggcgagttgcagataggtgattcgattgagatcaagggcccccgtgggaactaccactacgagagaaactgtcgttcccatctggggatggttgcgggcggtactggtatttcacccatgtaccaaatcatgaaggccattgctatggacccccgcgacaccaccaaggtctccctcgttttcggtaacgtccacgaggaggatattttgttgaagaaggaactagaggcgttggtggccatgaagccttcccagcttaaaattgttcattacttggactcgccagaccgtgaagactggaccggtggcgtcgggtacatcactaaagatgtcatcaaggagtatttgcctgctgccactgaggacaacgttcaaatcttgatctgtggtcctcccgcaatggtggcttccgttagaagaagcgttgttgacttgggattcagacgttccaagccactttccaagatggaagaccaagtgttcgtgttctag

SEQ ID NO: 4364 - DNA, 1869 bp, Saccharomyces pastorianus
atgtttactggtcaggattatcactccgtaaattctacctctgccaaaaaaaatgacagtaacaagcgtagtcgcgacgacacatcaaaaatcatgaacaataaaataccgcataaaaatgcttctgccattgctgctaccactgcgaaacctgttacagctaggcctttggaccccagtgacatgaattacagtaccaatatggccggtatggttgatccaatgcaccattatactgcagccgacatttccggtggcgcttccgttagaaattctttaccgccccaatatgctaacatggcagttggaaacgctagtttgcataaccaagaaattaatgctagtgctagcccaaactaccaccaagctgcatatcttcgacaacaacaacaagaacaacaacccatgaagactgaagacgagtctcaactttacggtgatattctaatgagctctggcgttgtacatgatgtcaatcaggatttagccactcatacaaacataaaccagctgcattctgggcccaaatctgtcccaaacgctgtcaccactgttccaggtaatagcgcaaccgctgcagctgcagcagcagctgccgctacagctgctgccgctacagctgctgccaacaccgctaacacaagtgctttaaataaacaattgtattttatgaatatgaattcaaacaacaatccacatgccttaaacgatccgtccatcctggaaactttatcaccattctttcaaccttttggtgtggacgtggcacacttgccgatgacaaacccaccaatttttcaaagttctctgcctggatgcgacgaacctgttagaagaagaagaatttcgatttctaacggtcaaattagtcaattgggtgaggatattgagacgttagaaaacctacataatacccagccacctcctatgccgaactttcacaattatcagaatggtgcaaataaaaataaaaatttaccgcatagacagaccttcaaccaaatagcgccagtcgatattccgttgtatagcgcaaaaaaaaataccaatcccttgagtggcactagtttggcagaccaaaatgcagactatacgaaagatcagcgtcagcattttgctggctcgctatcaaaaaatattacatcggagagcgcaagcgatcttgagggcatgacgacatttgcgccaactaccgacagcggtaactcaacgaataagaacatgagcaaatctttactcaaagaatctcactccaatcccagtttctcctcaagatcacaagcatctcacatggatttagcaaataatgctcaagaggagccaacccctggtactacggcatggaaaagagcaaggctgttagaaagaaacagaattgcagcttcgaagtgtaggcaaagaaaaaaggttgctcagttgcagttgcaaagggaatttgatgacattaaggacgagaataaaattttgcaaaaaaaactaaattattatgagaagttgatttctaaatttaagaaattttctaaaattcatctacgtgaacacgaaaaattaaccaaaaattcggacgataatggtagtacaaacagtggtatcaagagcgaaagcacgactgtggactcattaaaaattattgaggaattgctaatgatcgattcagacgtaacagaagtggataaagaaaccggtaaaatcattacaatcaaacatgaaccgtattctcaacgtttcgatagttatgtcgatgaagatgatatggatcttgttggtgataaactcacaggaagtagaaataattcagaaaatcaatcattagttgattctgataaggatgtgaaagcatctaacctcaaagaacacgacgttgtttga

SEQ ID NO: 4365 - DNA, 2547 bp, Saccharomyces pastorianus
atgtcattgcttattgtgattgctgtagttttcactgctttatatctagccatttcttatttggtcccaacatcaattggatttggcttgttaaaagtttattttggtgtcattcaaatcactttgcgtggcttatccaatctttattacctctcaaaaattaacatagcctacaatgggttgattaagctagttcctcaactggataccacaatgaactggatttcgaaccacatgattcacaatatcatcaacctctacaatggttacactaaaaacaccatgaaacattcaattttcatccgtgctttacccgctttaacaacatatttaacatcgattagtattgtttctgcttcgtctaatctagtgtctaggggctatggtcgtgaaaatgggatgagtaattcgaccaggagactaattttccaaattttgtttgcgctcaagtgcacttttaaagtttttacattatttttcattgaattggccggattccccattttagcaggtatcatgttggatttctcactattctgcccgattttggcatcaaataatcaaatgctttgggttccttcaatatgcactatatggcctccattttctctctttgtgtattggacaattggtaccctctacatgtattggtttgcaaagtatatcggaatgattagaaaagatataataagaccaggtgttctgtttttcatcagatcccccgaagacccaaatatcaaaattttacacgatagcctaatccacccaatgggtattcaattatcaagattatgcttatccatgttcatatacgctatattcattgtccttgggttcggtttccataccagatttctcttcccatttgttatcaagtctaccttattgtcggtccctgaagcttataaaccaacatctattgttttgtggaagtttgctacaattttattaacactatattttacaaaaagaattttagaatctagttcctacgtcaagcctctattggaaaggtactggaagacaatttttagattgtgttcgagaaaattgcgtttatcatcattcatcttaggtaaagataccccaaccgaaagaggtcatattgtttaccgtaatatgttctacaaatatattgctgccaaaactgcagaatggtcaaatcaagaacttttcactagaccaaagactttggaacaagcagaagaacttttcggacaaattcgcgacgttcatgcttattttatcccggatggtgttttaatgcgtgttccttcttctgatattgtatccagaaactacgtgcaaacgatgtttgttcctgtcaccaaaagtgataaattattgaaaccattgaatttggaaaggataaaagaaagaaacaaacgtgctgcgggtgagttcggttatctggatgaacaaaacacagaatacgaccagtattatatcgtttatgttcctcctaatttccgtttaaggtacatgactctacttggtttggtgtggttatttgcgtcgattttgatgattggtgttacgtttgctagtcaagcattaataaacattgcctgtagctttggcatacttccagtcataaaactggtactgggtggaaacaatagattttatgtcgtgtggaaggaactttccgacattacttattcccatctgaacatttattatgtttgtattggatccatttgtatatctaaaatatccaaggatattttacatttcacagaaggccaaaacactctggatgaacacaatatcgatgaaaatgcgccagaagaggtggaacatgatatccctgaaagagacgccaacaacgctcctgttgataatttcaacaatgcggaagagggccagggtatattaatgaccatcatcaatagtgtatttgatagtatgttggtaaagtacaacctgatggtggctattgcaatcgtgattgcctttatcagaactataacttcatggattgttttaaccgacggcattctagcctgttacaactatatcactattagagcattagggaattcttcatacaccattggtaattccaaatggttcaagtacgatgaaaacgttttatttgttgtttggattattttatcgatggtcaattttggagctgggttcaaatcactaaagctattcttcagaaacagaaataccagcaaatcaaaccttttgaaaactatggcattagagctattcagacaaggtatcctacacatggcaatttacatattgcctattattactctttccttcctatttcttcacgatgttcctgctaagcaaatcattgacgtcaggcaggaatccagaagttttgctctatcgcttaatgaatctttccccacatggaccaaaattcagcacatctactttggattattggtatcactggagtcatttacgttcctcttcaaggcaacggtactgtttatcaaatggttcaagagtactgtacagaacgtcaaagacgaagtttacaccaaaggtagagctttagaaaatttacctgaggaaaattga

SEQ ID NO: 4366 - DNA, 882 bp, Saccharomyces pastorianus
atggttttccacaagatcggtccaaggttttctccaaaggacttgaaatcccgattaaaggagagattcccaatgatggatgatagaatggtagaatatttggcaagagaaatgagggcccatgatgaaaatcgccaagaccaaggccatgatagactggacatgccagctgctggtgctgataacaacaacaacatcaaccgtcccgaaggtgttgatagaccactgcaggatattcgtgaacaccgttatttcgagaatctccgtcatgttgatgaactagataatgatgtgaacagtaacgacgattcggataatagtctgccactagataatgactcatccagcaatatagccgagcccctaagtgaccataatcagaacgacgacgagggcgatgataatgaagaagaagagcaccaacaacagccggaggaagaaatagattatcgtgaccatgtagatccgaatccaatggacatgtgggccaaccaccgtgcccagaatgaatttgatgacatagtagctgctcaacaaaacgccataaataggccgaacgctccagtcttcattccacctccagcccaaaatagagccggcaatgtcgaccaagatgaacaagatttcggcgcagctattggtgtaccgccggcacaagctaatgcagatgagcaaggtcaaggccccttggtgataaatctgaaattgaaactgttcaatgtcattgcttattgtgattgctgtagttttcactgctttatatctagccatttcttatttggtcccaacatcaattggatttggcttgttaaaagtttattttggtgtcattcaaatcactttgcgtggcttatccaatctttattacctctcaaaaattaa

SEQ ID NO: 4367 - DNA, 2310 bp, Saccharomyces pastorianus
atgttgcacttatcgatctggattaaaaactatccagaatatttcctcaaggtcacatttttgaaatattttggctggctactcagcgataattccgtctctgtcaggttacaagttgccaagattcttccacatttgatcatccaaaatcataacagcaaatccagtgataattccgcgatccgccaagtctttgaaaggtttaaatctaagatcctggaggtcgccatccatgacgtcaatcttgatgtcagaattcatagtgttcaaattctaactgaagcgtcatcactgggctatttggatgattttgagattctaatgatttctagcttaatgtttgatgaagaattcgaccctttcaaaacatcctcattcaataaaaggtccaaatttttatctactgtagccaagttcttagcaagagtaataagcgaaaaacatgaggaattcaccaagacccatgaagagttgcctgaagaagtcgatggattagctgttgctccagtcgtgcaagttgggatctttatcaagatcttgagcaactccttgatttatcatttaaaggattcggcggaagttgattcaaaaactaagattcgtatgctaacgcaggccgccgagtttttatctccatacatttcatcacacttgaaaactatctgtgatcttttgatctcggatactgaatcgaacgaattgatccagacactacaaaactcgactgacaataacaacgatgacgacgaggaagatggtcaagaactagacatcactccgctgtttcccattgacagaaacagcactatattatatcttaacgtattcaatgggttgtgtacgggtgcgaataacccaaagattcaaaccaaaggcaatgttcgggaaatagtgttacctttattccataacttattgaacacaacatcaattgaatccgctgatatcctatgcccgcttctggagagttttattacattttctttggatgattggatatccattggctatgaaacagaattgaaaaaaattaccgacaaaatcatcaaagtatttatggattcaacaattggcgactcaaaagtcgatttgaaatatgacatttttgctaaatttattcatcacatccattattttgagaaaaaggaactagaagaaaaactattgaatcaaataagcacactggatgttcatttaaagaaattcttacgggaaaagatggatcccaacaattctagagatgattataatgatttgacctgttctttatacgaactctacatcaataaattgaccatccttgggagggagtatccaattgaagttgatgaagagttattacaactattgctgaacaattttgtctcacgtatccctataatgttccaagattttgatgacagcaccaaccaagaaataaacttcaaaatattagtgctgttagctacatggaatttggaaaaatggaggggcataatagaaaatgtaaaggatcacgaggcttcgactccaaaaaacctcaaatcaatttggaaacctatagctgctataataggtcgtttaaatacactagttatttccttggcggctatacccgaaaatgctgaaaatataagcaacttactttacctaaaatggtcagcttgcacctcgttagtggacatcatcgttgctgtgaaagttttcgagttaaaattacctacagatgctacatcatggaaatatagtatgagtgaacagttcccatattaccttcatgacagtgcgtcaaaagtccttttgcaagtgtttttatatttagagagtcttttcgctaaacagcttgacgtccaattagacagagtggccgatgaagacgccaatcttaatgatttgccagaaaccggttttttcaacgatatcgaaacccaattccttttgttcacggtcaaactgatggggctgatgaaattaaatattttggatggacgacttgcttctcgtatggcattgaataaggaaaaacttggctcactattcaacaaaatattggatgataccatgacagaaggttcggaacctaataagaagaacatacagaagacgaaaccaattcaaatgcaaaggggaagggagatttctccacaatcaaacaatgaaagggaaccgaatcatgcgaatattgaagagaataattcagatattcccatgacagatgacctagaacctattgaagaaagttcacaaggcaatcaagaattagcaccgattgaggaacatcctaccatggtagattctatagatgacagcgatgctatcactcaagattga

SEQ ID NO: 4368 - DNA, 1419 bp, Saccharomyces pastorianus
  modified_base (1149)..(1150): a, c, g, t, unknown, or other
  modified_base (1160)..(1161): a, c, g, t, unknown, or other
  modified_base (1170)..(1171): a, c, g, t, unknown, or other
  modified_base (1174)..(1174): a, c, g, t, unknown, or other
  modified_base (1186)..(1187): a, c, g, t, unknown, or other
  modified_base (1205)..(1205): a, c, g, t, unknown, or other
  modified_base (1208)..(1208): a, c, g, t, unknown, or other
  modified_base (1222)..(1223): a, c, g, t, unknown, or other
  modified_base (1231)..(1232): a, c, g, t, unknown, or other
  modified_base (1239)..(1240): a, c, g, t, unknown, or other
  modified_base (1258)..(1259): a, c, g, t, unknown, or other
  modified_base (1261)..(1261): a, c, g, t, unknown, or other
  modified_base (1270)..(1271): a, c, g, t, unknown, or other
  modified_base (1279)..(1280): a, c, g, t, unknown, or other
  modified_base (1287)..(1288): a, c, g, t, unknown, or other
  modified_base (1296)..(1297): a, c, g, t, unknown, or other
  modified_base (1303)..(1304): a, c, g, t, unknown, or other
  modified_base (1311)..(1312): a, c, g, t, unknown, or other
  modified_base (1320)..(1321): a, c, g, t, unknown, or other
  modified_base (1336)..(1337): a, c, g, t, unknown, or other
  modified_base (1353)..(1354): a, c, g, t, unknown, or other
  modified_base (1361)..(1362): a, c, g, t, unknown, or other
  modified_base (1376)..(1377): a, c, g, t, unknown, or other
  modified_base (1386)..(1387): a, c, g, t, unknown, or other
  modified_base (1406)..(1407): a, c, g, t, unknown, or other
  modified_base (1415)..(1416): a, c, g, t, unknown, or other
atgactgctgtgcgtcgttcgactagaattagaaccaaatctcaggttacagaggaggaaagctccgatgacgagcaagacgcaagtgtgcaacatatagaaactgatgaggccactgccgctgtgcagcgtgatgttgaagaagaagagaacagtgatagcgagagcagtagtgaggacgactttgaagatcaggacgatgatgactacgtagatgctgctgccgcaaagagaaaacctagaaagagaaaacccaagtcaacatcaaataccagtagtaaaagacagaaaaagaaaccgagttccagtgagagatctgctgcatctcacgccccaagtggccaccgctccaaaaaagaccaggagcagtacctggaagttgtcagagatttccagcctacagagctgtttgaggtcatatctacttcagaagacgtttccatcgaagaactactacgagaatggctagagacttacactgaaaatagagatcggtttttgcaggagttcatcaatcttctgctaaactgttgtggctctgttgcccgtgtagaggatcatgatgttcatagtaacgaatcttctaacgaaaccgtaggtgaaattcaattgcttttccaaagacaaaaactacacgagttttatcttctgataagtaaggacaacagaaaacggaaaaatttcaaaatgggacctctctatcaaaattttgtggagctgatgactaaattactcgaagttgcaaatgacctacagctgctctacgttgagtcggatgaagacgacactcaaatagtcacgggcaacctggtcctggacttactgacttggctgtcctcattctctgtctgtaagatcagatgctttagatacatttcaacactaacattatttcttttccaagactacttgactgaacaagctgtaaacttggagaagaattacttagccaaattgactagacagttgtcactagaagaaaagaaaaaaaggcccaataagaaaactttagaaaagctcgaaagcaccattgctgaaactcaaggtagtaaagttgtcattgaaggtgttattgataatattgtgaagttgtgtttcgtgcacaggtacaaggacatatccgattcaattcgttctgagtccatgttnngcacttatcnngatccctanntangtgagtcgtatnntatgcgggcgcgcgaatnttnctcatgttgtgacnncgcttatnncatcganntaagctttctgctttttnngnttgacttcnncattgttnncattccnnacggacannaaaacnnagagaannaggaaacnngacagggaggccaannaaagctttcgctttcnnagcaccnntgttcgtttccttnntcttttcanngagggtattttttaaatannaaaacatnntaa

SEQ ID NO: 4369 - DNA, 90 bp, Saccharomyces pastorianus
atggatcttgctcagcacccgacatcatcacgtcttcgttggttcccagcatgtttgaggcggcgttgttatcgcccgatgcgaaattga

SEQ ID NO: 4370 - DNA, 222 bp, Saccharomyces pastorianus
  modified_base (58)..(99): a, c, g, t, unknown, or other
atggagtgcaaaattagccgtatttcccttttttggttgcttcgtactttagattatnnnnnnnnnnnnnnnnnnnnnnnnnnnnnnnnnnnnnnnnnnaatttttttgttcgttcgcttgtttgtttggttgtttgttccctcttatatgcccacttcaaaatcaccaagcattgtcatacccgcctgatgatccagtattacccatttgagatgcgttga

SEQ ID NO: 4371 - DNA, 156 bp, Saccharomyces pastorianus
atgaatccagttgaccatcctcacggtggtggtaaccatcaacatattggtaaggcttctactatttctagaggtgccgtttctggtcaaaaggctggtttgattgctgccagaagaaccggtttactacgtggttctcaaaagacccaagattaa

SEQ ID NO: 4372 - DNA, 1314 bp, Saccharomyces pastorianus
atgatgtggccgatcgtcaccgatctatcgaccggagaatcagtgccaaacccccaagttgatatggaatcgtcaaaattcaacggcaatttttggtcaaattggagaaagttaagtagtgggagaggttttgtcttgacaatgagtgaaaaagacgttcctttgtttttaaagcaattaaaagtaatggaatttctgaaaaacgtcttaccgtttcaaataatcaccacaggaaatgacttatcactagaatctattggcaagatttccaagattgccaaagaggtgggacaaaaggtctacttaattgattgttcaacaatgcttgactctgaattttccaaggcattcatttctttttttcaaaataaatgggttgctactttattcaatacatttaaagagtttatcttgctagatgctgacgtggtaccattcgtaaaatctgattatttttttaattctccctcttataaaagaagcgggatacttctgttcaaagatagagttatgcaaaacgagcatactttcgattactgcgtagaaatgttaagtggagtggaaccctccggacaagaacacagactgattagtagtaaacttatttttgattcgtcactgtcattttcttcttcatcgtctgaagaagcctctgtgtactacaatttctttgaaaagttacaacttcatcatgttgatagtggtttggtagtagtaaacaaacgagaaaaaataaatgggctactgatgtcatttatgttaaatttggacggaaaaatgcagagatgtgtatatggtgacaaagaaatattttggttaggtcagctttatgctggtcaagattattccatcaatcctgttgacggtagtgttattggtcctgtcgatggacagactggtaacgatggcgaatcttcgaacagtaactactatatctgttctgcccagattgctcacagtgactccgaaaatcaactgttatggacaaatggtggtttgaagacttgcaagattccaaacagtgcggaaaatgacttccagagagagccagattatttcaaagacagatataacgaagtgtctactttaaaagggatatatgacgctccattacacgtggaaggactaattgtccctgatgtttctgttaatcaatggatgcaaatcaaggagtgctccaattacatgtattgtgcttatgctacaggtgacaaacacataaactctgaacttgatgcgggtcgcgtaatcaggttcgatgatgaaaaactaaagtacattaatgatatttcccaagtctggaatgccaactaa

SEQ ID NO: 4373 - DNA, 252 bp, Saccharomyces pastorianus
atgttttcgaccttaaaatcgagaagattgctcataagacgatccgcgatacttctgctttccgtatttttttcatacattatactttctgcatgccggaaccatgcatcaactaaatcgaacggccacgaggacgagagaactgcggttgaatcatctgtgtataagtggattgagaagcggcaacaacgaattgcctctgacagtccaatgaagcgattattaggtcactttttgccccctttcagtacc

SEQ ID NO: 4374 - DNA, 4230 bp, Saccharomyces pastorianus
atgtctctttctaaatatttcaatccgattcccgacgcttcagttacgtttgatggcaccaccgtccagctggaagaatcgctcggaactgtccggaacgatgaagaatccttgtcggatttcgagaatgcaggccatctggaaatctgcgatatcaccttccgtgccaatgaaggtgaggtcgtcttggtactggggaatccgacatcggcgctcttcaaaggcctgttccatggtcacaagaatctgaggtactctcccgaggggtctatcagattcaaggacaatgagtttaagcaatatgccgccaagtgtcctcaccaaatcatctataataacgaacaggatattcacttcccgtatctgacggtggaacagaccatcgatttcgcactgagttgcaagttccatgtctctaagcaagaacgcattgaaatgagagacgagttgctgaaagaattcggcctgtcgcacgtgaagaagacgtatgtcggaaacgactacgttcgtggtgtttctggtggtgaaagaaaacgtatctccattatcgaaaccttcattgctaatgggtctgtgtatctgtgggataactccacaaagggcctggattctgcgactgccttggaatttctctccattacgcaaaaaatggcaagggctaccagatcggttaatttcgtcaagatctctcaagccagtgacaaaatcgtcaacaaatttgacaagattcttatgctgagcgattcttaccaggtgttttacggcaccatgggcgaatgcttgagttatttccacgacactttacagataaagaaaaatcctaacgattgtatcattgaatatctgacgtcaatcctgaatttcaaatttaaggaaatatccaattccatcgttggtctcgacgcaccattccccgtctctaaacccaaacaagcttcgaacatcaataacgaagcagatttacacacattatgggtacagtccccatgctataaacactggaaggcaatcacctcaaagacaatacaagaatgcgtcggaccggacataaatccagacgacgtttctcccgtattcagcatcccactaaaattgcaactgaaaacctgtacgataagagctttccaaagaattattggggatagaaattacttgatctctcagtttgtttccgtcgtcgttcaatctttagtcattgggtctcttttctataacatccccctaacaaccattgggtccttctccagaggatctctgacatttttctccattttgttctttaccttcctttctctggctgatatgcctgcttcttttcaaaggcaacctgtggttcgcaaacatgtccagcttcatttctattttaattgggtcgaaacgttggcaacaacctttttcgattgtttttccaaattcctacttgttgtcgtcttcaccatcattctttactttttagctcatttacaatacaatgctgctaggtttttcatctttttgcttttcctttccatctataacttttgtatggtttcattatttgccctgacggctttgatcgctccaactttatcagtggcaaatcttttagctggtatcttattactagctattgccatgtatgcgtcttatgttatttacatgaaagatatgcacccatggtttatctggattgcttatttgaatcctgctatgtttgccatggaagctatcttgagtaacgaattgttcaaccttaagctagattgtcatgaaagtattatccccaggggcgaatcctataacaatatttcattcagccataaagcttgtgcttggcaaggtgccactctaggtaacgattatgtcagaggacgcgattatttgaagagtgggttaaaatacagttatagtcatgtatggagaaatttcggtatcattattgggtttctttgtttcttcttattctgttctttagcagcctctgagtacatcactcctttgttcaccagagaaaatatgctgcgttggaataactacgtgaaaagacactgtcccttcccaagtcacggaaagagacaggaaaaggctattactgatagctctggtgtatacggtaccaagcctccggcaactaattcatccacttcatcttcatctgtcccatcattctcccgtccatgcgatgctgactataatgttaagtgtcctgatgaatctgttaacaaccacactaaggagtccatagccgtagaaactcaaaagcacgtcatttcctggaaaaacatcgattataccattggtgataaaaaactgattaacgatgcttctggttacataagctctgggttaactgcattaatgggtgaatctggtgctggtaagacaactttgctgaatattctatctcaaagaaccgaaagtggtgtggtgaccggcgaattgttaatcgacggtcagccattaactaacattgatgcttttagaagaagtattgggttcgtccaacaacaggatgttcatttagagctgttaactgttaaagagtctctagaaatttcctgtgttttaagaggtgatggtgatagggaatatttaggaactgttaccaatctattgagattaccttcggaaaaacttgttgctgatttgtcccccactgaaagaaagttactgtccattggtgttgaattagttaccaagccttctctactattgttcttagatgaacctacttctggtttagatgccgaagcagcgttgaccattgtgcagtttttgaaaaagctttcgatgcagggccaagctattttatgtaccatccatcaacctagtaagagtgttatcagatattttgataacgtctacttattgaaaagaggtggtgaatgcgtctactttggttcattaattgatgcctgtgactattttgtggctcatgacaaaagcttagtttttgagagcgaaacggataatccggctgatttcgttatcgatgttgttggtagtggaagtactgaagctaatactggggaaaaatcaaccccaggtgaatttgacgaacagacatctcatcttagacagtcagattgctcaattaattgggcaaatatatggcaatcttctcccgaaaaggtgaagattgctgaaaatttgcttatattggaagaagaagctcgcaactctggtattgattttacgacttcggtatggagtgcaccttcatatatggaacaagtaaaattgatcaccagaagacagtatatttgtaccaagagggacatgacttacgtctttgctaaatatgctttgaatgctggtgctggtttattcatcgggttttccttctggaggacaaagcacaacatcagtggtttgcaagatgctattttcttgtgtttcatgatgctttgtgtttcttcccctttaatcaatcaagtccaggataaagctttgcaatcaaaggaagtctatatagccagagaggcgagatctaatacctaccattggacagttcttttgatcgcccagaccgtcgttgaattaccactagccatttctagttctacattgtttttcctgtgttgttacttctgttgcggctttgagtcttctgctcgtgtagctggtgtcttttacttgaactatattttgtttgccatctattatttgtcgtttgggttatggttattgtactcagctcctgatttacaaactgctgccgtctttgttgcattcctgtatagttttacagcttccttctgtggtgtaatgcagccttacgcattattcccacgattttggacattcatgtacagagtttcaccatacacatatttcatcgaaacttttgtgactttgcttcttcatgatagagaaatcacttgtttaacaggtgaaatggtcccaagtcaacctgtagtgggtcaaaactgtggtcaattcatgaaacccttcatagaagaatatggtggaaaattactcaatgataaaacatttaccgtttgcgcctattgtatgtacactgttggtgacgatttcttggaacaagaaaatatgagctatcaccacagatggagaaatttcggtttggagtgggttttcgtctgcttcaattttgcagccatgtttgttggcttctacttaacctacattaagaagatttggccttcagtgatcagcagcgtcaagaagtgcattccgtcaatgagaatgtccaaaaaaacaaaaaaacaccaaaaagtcaatgcatag

SEQ ID NO: 4375 - DNA, 285 bp, Saccharomyces pastorianus
atgccgagagtagttctagaatccaattcggggcaagtggactcaatattcttacaaccatggataaagccattaattgatgataattccgatcatcatcatcatcaacttccttctgatcatgtgattccggccttggcccagcaagacttggcacttccgcacatgtgcccacaaatcctgaccaacccatatcattttgcaagaattacaagattctataacgtttgcgattatagagtgtacgcatcgataagagattccgctcatcaaatacttagttga

SEQ ID NO: 4376 - DNA, 189 bp, Saccharomyces pastorianus
atgataattggtgatgctgatttggcatacgtaacaagcactcaagcgatgggccgttttatggttcgcttgagcagtatttcaacgaacgaaacagtgccgatcctaactatcaatcaagccacgatattcgatattgaccaggtcggatccctaaataatttcccatttgtatataagtatttgtaa

SEQ ID NO: 4377 - DNA, 1161 bp, Saccharomyces pastorianus
atggctgcgataacagtactaaagagagcagttactggcaccatgacgcaggctgataatcccgttcccacctgcagtgtgctgcccaagcggcagtatactgcagagcacgaaaagcccctgttgctgcatgaagaacaactgatattccctgatcatgcctcacaactatcctccgcggacatcatcgagcccattcagaagaacaacagcatggactccatcgccgggaccacgctgcggagcagtcctgtgtccttgtcctcgacgcagatcactgctctttcaggcgccattgctgggttcttatcgggcgtggcagtgtgtcccctcgacgttgctaaaacacgactgcaagcacagggtctacaaactcggtttgagaacccttactacaggggaatcctggggaccttgagcaccatagtaagagatgagggcccacaggggctatacaaagggctggtgccgatagtcctgggttatttccctacttggatgatatacttctccgtgtacgaagtcagcaagaaattcttccatggcgttttcacccagctcgacttcatcgctcaatcgtgtgctgccatcacagcgggggccgcatccactacgctgaccaacccaatttgggtggtgaagacaagactcatgttgcaatcaaacctcggagagcatcctacccattacaggggcacgttcgatgcgctcaagaaaatatcttcccaggaaggttttaaagcactgtatgcggggctggtcccctcattgttaggattgttccatgtggctatccattttcctatatacgaagagttgaagataagattccattgctattcccgggcagataacggaacatccattgacctacaacggctgatcatggcgtcatccgtgtccaaaatgatcgcatcaacagttacgtatccacacgaaatcttacgaactaggatgcaattaaagtcggacgtaccagactccattcaacgacggttgttcccgttgatcaaggcaacatatgcacaggaagggctcaagggtttctattccggttttactacgaacctaatacgaaccattccggcttctgctatcactctagtgtcctttgaatattttagaaatcgcctggaaaacatcaactctgtggcaatataa

SEQ ID NO: 4378 - DNA, 432 bp, Saccharomyces pastorianus
atgaaattatgtagatttacagggggcaacgcttatcaacgtgatactggtaggacacaattgtttggaacgccagatggttcaagtaatctcgatgacactgcttcttcatcgtttggtagtacggggaaactagactactctcaaagtaatttggcatcactagaatctcaaagtgaagaacaaatgggagccatgggtcaaaggataaaagctttaaaatcattatcattaaggatgggcgacgaaattagaggaagtaatcatacgattgatcagcttggtgacaatttccacaacacctccgtcaaactaaaaagaaccttcagcagtatgatggaaatggccaggagatcaggaattagcataaaaacatggttgataatatttttttttgtaggcttgcttttcttctgggtgtggattatatag

SEQ ID NO: 4379 - DNA, 861 bp, Saccharomyces pastorianus
atggcggaagaacaagaaatgggtgtcccagcagcctctttggcagaaatcaaacatatcattttgatcctttccggtaagggtggtgttggtaaaagctcggtgaccacacaaacagcactgaccctttgcagcatgggtctcagagtgggggtcctagacatcgacttgaccggaccgtctttacctagaatgtttggcatagaaaataaatctatttatcaaggctctgagggctggcaacccgtgaaagttgagactggttccaccggttctcttagtgtaatatcactggggtttttgttaggtgacaggggcaacagtgtgatatggaggggccctaaaaagacttctatgataaagcagttcatctcagacgtcgcctggggtgaactggattacctgttagttgatacgcccccaggaacctcagatgaacacatttcaattgcggaggagctgagatattctaacccagatggtggcatcgtagtgactacaccgcagggtgtggcaactgctgatgtcaaaaaagaaatcaacttctgcaaaaaagttgacctaaagatccttggtataatcgaaaatatgtcaggattcatatgcccatactgtgcagagtgtacaaatatcttttctagtggaggggggaaaaggttatccgaacaattctctgttccatatctaggcaacgttcctatagatccaaaatttgtagagatgatagaaaaccaaacatcgagtgaaaagacactggtagaaatgtacaaagaatcccctttatgccctattttcaaaaaaattatggatacactaagagaacaagacattacatctcgtgttgcggagaaacacgattaa

SEQ ID NO: 4380 - DNA, 261 bp, Saccharomyces pastorianus
atgtcaggaagaggtattaagtgggcaagagtttattcattggtcgatagtatgactcgtgaaacacctgaagatgtcaatgatgcaggagcaaaagatattctagaggttttaaaccttattaaaggaggagaagagaagatatcggaagtcgagcttaagctggatgaaatggaaaagaaaatggactctctattagttcagttagaaggtttgcacaaggataacgatggtttggcgaaggaatctggccagaagtag

SEQ ID NO: 4381 - DNA, 1524 bp, Saccharomyces pastorianus
atggatttaaatttcgaggaactatgctattcatgccgaacaggtgatatggataatgtggaccgactgatttccaccggtgtgaatgtaaatagtgtggataaatttgataactcgccacttttcctagccagtctttgtggccacgagggagtcgtcaaacttctactgcaaagaggagccgtttgtgatagagatagatatgaaggagcccgttgtatatacggggcattgaatgactctatcagagatacccttttgagttatgatatttccaaggccgtagatgttaagcaacccttcgctactcatatttcgtccatatataatgatgaaagctttcttaacaaagatatttcatttacacttgcaaatgatcagcaattcacagcacacaagttcttattatgcgcgaggagcaaggttttggcagaaaaactagcaaatgaatgggcagaaaacaatgtccttctcactgaagtccgcccagatatatttgatatctttctcaaatttctttacttgattcctatcctgcatgtaatccagccagagcaatacgaccagcttataaaattatcaagtgaattcaatgtggaactcttgccagattttttagacaaagctaagcattctaatcctatggaaaagtctaggctgatgtcagaatatcaatataaattcacagaggttgtaagaaaacaacttttacaatttgtgaaccattgtattttcaactctgccattgacgttgttgatgataggcaacaaactacttccttgagagactgtccggcatatccggatatccaactatcagtaagaaatcgaagcggcaatttacgaatatacccttgccatttagccgttttgaaccgtgcagaatattttaagagaatgttcacgaacaactttaaggagaaggttacatatgtaaaggccaagcatatttcaggaaaacacaacaacgtcattccgcaacttacacttcctgactgtgaatttgaggttgctgagataattattcgctatttatacgctgatagcacgaacattccatggacgtatgccgttgatgttttgttacttgcagatattcttttagaagaccgtctaaaaactattgcttcaacaattatcacacaatcaaaagattttattcagcagcacaatgctctcgatgtgctctatctatcatgggagacaagagtggagcgactggaattatttgctgctaaatttatagctatccatttgcaagagttatctaacgacccggagcttaaaagggcgattgtcttaagttcagaacgaatctcgctccgccaggaaaccgacactattgagttggtggatgacatcagatactatttactccgaaaatattccttcgatccggatgatgtggagctatttgagacccaggatgatttagagtacttgaaacaagttggataccttgaatatagaagagatatggaaactttggacaacatcttgaccgaactagggctcgaagtgtaa

SEQ ID NO: 4382 - DNA, 2187 bp, Saccharomyces pastorianus
atgtcatcggacgatatcccaaaaataccctcaaggccttcgaggaagaaaacagtggaactgactccattacctggtaaagaggctgaaggtatgaaaacgaatagtgagcctccaacaccaacaaaagggcctgctgttccaaagcaaaggcccatattaaaagcgaagacgatgacttcgtttgagagtgaggcggttgcagacagtttaccccacatgccatcacaaaggccaattagacgttctacgactgaagaactgaataatgtaatgaataacaccagcaaggagctggaagagattgagagtttcatttcaagacacaatgtacataagaaaaagagcacgactactacccgaggcggagacgcagaaacgtctgccgtccctaaagaccaacagagaagaccattgttaagtgacagtgattcttttactccagatccgtctccacgggaaaccaacaaacaggaaaatagcagtgtagacgagggtgctgaaccttccttgaatttagcgagctcgtccagtgatgaaatcacaaagactagtaactctgaaacgcgcactagacaacaagatgtaagagccgcttcagacgataatataaatgttggaggtgaattgagtaaaaatactactcctgaggacattacaccaccattagatgtttgcagggatttgaaagagggtaataatactgctccggtttcagctggaactactagatctggtgatgaagctggaaatgccactgaactcccggaaccaagatccgaagggctggagaagcacgaagaagaacaagagaaagaattatatgagaatccggctcaaaaagaaagtatcgggtctaatgaaaaattagaaattaaaaacaatacgaaagaagacttacaggagggaaagccttcttctcctggaacggttactctagccgtcgactcaaaggtttcttcacaactaaagagtgaagcggaaaatactccagcagttgactcgcaggtttcttcacaactagagattgaaccagaaaatactccagaggtcggcttgaaggtttcttcacaactgaagagtggaccggagaatactccagtggttccacaaagtagaccaaagaaggatctcgattcagatgtgaagaaggaagagtcatcaaaccaggaaaatgaaccctttccagaagagcaggacacaactgaggatgatattgaagcaaaagatacaagccccaaagtccccgttgaaaggcccagaaaacgtgccccacctccagtccccaagaaaccttcttcaaggattgcagcctttcaagaaatgttacaaaagcaacaacaacaaggtttacgaaacaacgaaccttcactatcttccaccagttcaccggataccgcgaagcaagaatcgaatccttctgccgctggaaacacagtaaaggctgattttacaaacaaattgaatgggctgtttgcgctccctggtatggtaaaccccggccagcttccagcttctctaggaaaaaagttgtcctcacctagcactgaatccacaggagagcaacatgaacaaccacaggcaaggagcacacctttaagtggcactaggagagccagagggcctcgtggacgtaaattaccttctaaagttgccgctgtggagaaggttgaagaagacggtaataaaaacggtatagaaatcttcaacatttggcatgtttactctatcccctctaaacaagagagttctggagatattattccggataaggaatcagaagtttttccaaaggagcaaccaaaaaatacctcggatatgaagccaggaaacactccaagggcggaaatagaacactcgccgaacgagacagtgaatgctattcatcccatcgatctggaggaagagaaagagcttactgccaatgttgaaccaatacctctttctccgttgccgcaggcgtccaccgtgcgtaagaacgaaggtggaagggaagaatcgttgtccccagcggaggctattgccagtagagaccaagatgatgtgacagagatactagaacagcaaatggagggcctaatggaatcggaaatggaggcggaactctcgggtggctacgaagacatcgattctgctttgcattcgaatgacacgtccgccccctccacactagaacctactatataa

SEQ ID NO: 4383 - DNA, 1419 bp, Saccharomyces pastorianus
atggtggccaatagaaaacacagagtccgtgtgcttgtcgaagtatgtgtgcgagttgttggacatatcgacctccaaattgtcctcctcatcttcgttacccatcgcatcatcgtcactctcctcttcaatgtccataggagcgtcctgttccgcctccacagagggcacaatctcttgctcaacttcttcggtggtaataaactcttcttggggctccatcatgatctatacgtcgctatacggtgctcttttggtcatcagaagacctcatctggaggcatcgaatgtatttttctagatattcatagtgaaaaatttgccagaaaaagaaacggcgggcgggttatgcggcgaacgagaaagtcctacttaaaaatacctttagtatacatttctcacttgaaaggttcgaaggtatcagcaaagaaagcagcaaacacaagacagtatagcattatgatgggatttgcgtggggttttaagcccgctggtaaggtgtctcaagacacagcaggctcacagagctcaggccacatggtggtggcaaattctgtagggaaacagaaaagacggtatagcaacgaggagcaacaagaagaaccctctcggaataagtgtatgacgaaattcggaggcgtctccaagaggaggccccatccgagctcactaataagaggtcagcctctgcccttgcaacgaggcatggaattaatgagcaaagagcaattacagcagttgctggtggacctgatgacaaagcatccggaaattcaacagagtgtccacacgaggattactggactggattttagtatacaaaagtgttttgacgttttgaaacagaaatccgaagccgtttaccaaagcataccttacaataggtcctacgagagtaataagttggacgactacgcatttgtgagaatgaagcctcaaattttggagtttttgaactgtttagtggattttatactggataacatcccaccacggctggaaaacttacacgcatcgttaaaatttttggacatctgcacagaattagtcattaaattaccaaggtttgaattggccagtaacaactactactacgataagtgcatcgaacaattatcgcacgtatggtgcacgctcattgaacatgtcgcccgagacaggctaatcctcttggcagataacagctctgtgtggaaaactcacatgacaaggttacaaatctataatgaacaatcgaacggattattggaacgccctcttcaactgttcaagtcattagacatgggggcttctcctgcatcaccatcatcatcatcatcatcatcatcatcatttcaagagacgatcatttaccaccacgataccatgaccaacgaaaataataacagtggtaacactaatgattcacccttcaactaa

SEQ ID NO: 4384 - DNA, 777 bp, Saccharomyces pastorianus
atgctaaaggagcgcacagcaggcatcagggcaagagaccggaagacaatgctgtatttagagtgcgacaatgtgcgacaaaggtccgtcgttgccaacctgcagaagttcgtttattgctgtctgtacatacggttcattaaagacggatcggtgctcctgatcctcatgggatgggtgatttcgtcgctgtgcgagttcgtccaagaattgacgctgagatacctgaagaagaactacctgcaggcggaccgtggtgacgagcaggatgacgacgaaagcctggccatcagagggctggagacgcccattgtaagagtcatcataaacaaggccatacggtactaccagggactgatactcctggagacggcgtactgcatagtgtaccacatcaggctggacgtggcaagggacatatgttcaaagccgtacgggttcgtcgtgatgctgctgataagagagtttacgtgcccggcgccggcgggattccccagcaagctgctgctgctggtgcttgacttcgcggtgcttttcggccagcttctgatcatgaacggttcgttgagttccagtttccaaaacgtcaagctgatcgtcaaggagctggacgcggacaagcaaggcgccctgaacctcctcaagttcaacacctggcacacggacgccaacgggcccgagctcatcgtccaccggaaccgcgatgaacccttgccccaacacctagatacatataccgtcgacgagtccacacccttactaaacaataccgaataa

SEQ ID NO: 4385 - DNA, 504 bp, Saccharomyces pastorianus
atgtcgcaggacctgtccagggcgctggagatgtcttcgttgtgctccagcccgcccgcccgggagcgccaccgcagctccgtcagcacgatctcctcgattctcctccgcccggggagagccgacccggacgagacggccaggagcctcagcgtccctgcccctgcggagcacgagcggccgggcttcttcgcaaaggcctccagcatcttcttccgcagaaacagcacgcccagagatcagtacacccaggccgtcccgggaaccgttaaccgccaacggcctcaaccggccctcccggcggctaaatccgcagccgccgactccctgcgccaccagcagcagctcgaggacggactgtacgcccgggtgatcgcaaacttccgcgccatagggtggtgctcctctcgcgaaatagagtcggtggaatataaacggtctttgatcaatgcgcagtgggacgagaagatctcgctcttgtcgcacgcgcagtgctataaataa

SEQ ID NO: 4386 - DNA, 546 bp, Saccharomyces pastorianus
atgagcatgaacatggacatggacatgaacgtgaacatgaacgtgaacaatctatccgaacatctacagagcctgatctcgaacgactcggagctgggctcgcgtctactatcattgctactggttagcagtggcaacgcggaggagctcataggcatgataaacagcggccaagacgtgtcgcaattcaagaagctgcgcgagccgaaaaaggggaaggcggcaacggcaacggccacggcacaggaagaggaagaggaagaggaagaggaagaggcgcccgtgaacgagctggacaagatcaagcaggagcgaagaaggaagaacacggaggcgtcgcagcggttccgcgtgcgcaagaagcagaggaacttcgagaacctgaacaagctgcatggcctgaacgtgcagatcaacaagctgcgcgaccgcatcgcgcagctgaacaaggagaacgagttctggaaggcgaagctcaacgacatcaacgaaatcaagtcgctgaagctgctgaatgacatcaagaggcggaacatgggcaagtga

SEQ ID NO: 4387 - DNA, 705 bp, Saccharomyces pastorianus
atgtccaagatccatgtgtccaagaactggaagctgcctccaaggctcccgcaccgagctggccagagaaggaagagacccctcccaccccacgacgagtacgagtacgagggcgagggcgagagcactgggactggcaacgaggagctccagaaaaagaaacgccagaatagggacgcccagagagcatacagagaacgcaaaaataacaagctgcaagcgctcgaggacaccatagagtctctgagcaaggtcatcagaaactacgagtcgaaactctcccgcctgcagcacgagctgcaagacagcaactccgaaaaccgtgcgctgcagtcgaaactggacgccctcacctcgcggcaggcctccatgcccgcccaggaccccattctgcagaacctgatcgagaatttcaaaccaatgaaggcaatacccataaaataccagcaccgcaaccgcaaccgcaaccgcaaccaccaccacgggccaaacgagctgcccaactccgcgaagtgcggcttttgtaacgacaactccacctgcgtgtgcaaagagctggaaactggcgccgacaaaaatggcgccgcgctaaaggattcctctccgcctcattctcactgcaacaaggacaactccagtgggctctgcagtaactgcgcaaacatcgacaagtcttgtatcgacatccagtccattgtccattga

SEQ ID NO: 4388 - DNA, 306 bp, Saccharomyces pastorianus
atgggggtcaactggcaccagaaggcattgatgaattcaggattgcaaatggctgcaaacagacgaggtttttcgtctgtagaagaaagccgtaccccttggcatttggcgtatagaagatgttccaggatgtttgattgtagcttgtctgtgaagtccattaggggcgttcggtacctctctatggagacaaaattggtcattttgggtgataccccaagaagagatatgatcttttcggtcgcgaagagcgtatcggtgggcaccaaccccatacgttgtttgttatcgggtgcaaatgtataa

SEQ ID NO: 4389 - DNA, 312 bp, Saccharomyces pastorianus
atgctctgccaattgaccaaactggtattgaaattattgtcaatagtcatcttgcaaaatgcaaacgaattcttcttcaataacacgctaaacaggttgattttgccctcgtcaatcaaacgggtcctcaattgctcaaaaacggcacaacgagccaccataaagcttcgcaccggtgtttttctatcatgcgaactcttattgcacaggatcaaagacatgtattttagcgttttcaagtttgccttgcggcaatacaagtcaatggcggggaccacagaccgtgctaagttctttggagacatttcttga

SEQ ID NO: 4390 - DNA, 1098 bp, Saccharomyces pastorianus
atgtctccaaagaacttagcacggtctgtggtccccgccattgacttgtattgccgcaaggcaaacttgaaaacgctaaaatacatgtctttgatcctgtgcaataagagttcgcatgatagaaaaacaccggtgcgaagctttatggtggctcgttgtgccgtttttgagcaattgaggacccgtttgattgacgagggcaaaatcaacctgtttagcgtgttattgaagaagaattcgtttgcattttgcaagatgactattgacaataatttcaataccagtttggtcaattggcagagcataccaatcgattatacatttgcacccgataacaaacaacgtatggggttggtgcccaccgatacgctcttcgcgaccgaaaagatcatatctcttcttggggtatcacccaaaatgaccaattttgtctccatagagaggtaccgaacgcccctaatggacttcacagacaagctacaatcaaacatcctggaacatcttctatacgccaaatgccaaggggtacggctttcttctacagacgaaaaacctcgtctgtttgcagccatttgcaatcctgaattcatcaatgccttctggtgccagttgacccccattagggcctcgttaaagaaaaatcgctttgttgctgtgcctcaggaatttcaaatacaggatgcgtctgtactgactgctataaaggagattgtcacaaagcgaatattgcgatccgcttttgatggagacaccaactcatcaaagggtctgcatttggatagtagctggaagttcaggcttcccatgctggcctcgacacccgacctcgatttctgcctaaaggattgtcttggcttggatactagagaagatacattcgacatgacggaagcattcctctctaatatggcttggagtaacagtctttgtacgtataataacatagcgaacattgtgatgaaagacaacggtagattcgactcgggcattttaaaggagttcaataactacatcaagctagaaaagactaatttacaagacttccaagctatctcgtcggaatttcttaaagacataaaactaaaaccctatatgtag

SEQ ID NO: 4391 - DNA, 1113 bp, Saccharomyces pastorianus
atgagctattccacaccgcaaaaattcaagtcaaattctactttaactttagcttattttgcgacagaaatcacactacataggaaaatcatctgcaccttaacccccctaacaccaaaggaactggtccaagtatgcaggactgcagcaagaacaaggcttgttgctgcaattgaattcataagagaccttaaaaatgagcatatcaactccttttggtacaattgttccacgggaagcctgatgctgattggtacatttgctgctctattgtatgtgacttcaacaacaaaggaggaggcaacgatttttagagattacctcagaaattatatttgggtattgaagatcgggtccaagtattttgaaaagttgtcaaatgctttgaataatatgcatttattgtttgcccaaattcctggtttattaaccgatgaaccaatgggcttgagccctaactccaacatcaatgctgtcaacctgccacggtctggcacccaatcgcaaatcccaattcagtttaatgtggggtctcctgcgataactgagcaaggttcaccactaaaccagtggaaaaatctaccccaagaaatcctgcagcagttgaactcctttccaaacggtacaaccactacaacaacaccaatgaaccctactccaaggcaaacgcaattagaatctcaagggagtccgactgtaaacagcgctaataacaacagtaacgatacacccttaccgttgatgctgaataaaccctacaaaaggactgctcactcttcaccgaacgttacaccttcgcatatgaataaacacccagcatctaatacgtcttcgccaagagttaattccattgcgaacgtgaactccagtacacaaatgaatgccccacccttgagctctatacacgaacccagacaagattcaacaagtgtcgtagcaaacgaaacatctataggaacggaaaggtcccccaatgagcattcattagcagaactcaaaggcgacaattcgaacctaaaagaggaaccaagtgcggctgacaaccaaactatagaaatgaatgaagtcaatgataaaaatgtaacaattaacacaaaggaaacccatctgtaa

SEQ ID NO: 4392 - DNA, 1542 bp, Saccharomyces pastorianus
atggaccctcaccattcaccaactggtaaagccgcattatctacgaaaagtgtggagactgcccctaaaaactcgtccactaataacaatgccaataacaataatagtaacattaacaataatcatgacatactaaactttaatgacaactatacaaccatcctgcaacacttggcaaacgaccatcctaatttattgagggaaaaggggagctcgcaacagcagcagcagcagaacctggatacgcttttacatcattatcaaagcttgatttctaaaagcgataatgcggcagcttttgaggacaatgttaacaatagcaccgacaataatgcacatagtaataacagcgccaataacaataataataacatagcaagtccaagcaacctgatgggatcctgtaaccaatgtaaatcgaagaaattaaaatgcaactattttcctgacctaggtaattgccttgaatgtgaaaccaacagaactaaatgtactttcaacagcacgccaaattacttgaagagaacgtcttctaatgcaaataataattttacagcttcttcgcattccaaacgaatgaagaatcttgaagaatatccgaatcgcctacctagcagcatgctgtatagacagcaacagcagcaacagcagcaacagcagcgcgtacaataccctagatcttcattcttcgtggggcctacctcagttttcgatttgaacttaactaaacatgtaagattagacaacgtggaccaaatacaactatcgaaaacattatcattaagaaaagtttctcccacagcacagttcatcctacaggacgattttgactctgctctccatagcaaacaagaatacgaggttgatctagtggagaatctagtgcatccacatggttatctattagtagaaatttttttcaaattaattcatcccttcctaccgatcctacacgaacgtgtctttttagagaaatactctaggtcttatagggaactcacagcacctttattggcgtccatctactcgctagcattacagtattgggactttcaccctgctcttttaggatttcctaaaccagatgtcgtatctcagctaaacagtatcgcgctagacacgttttacactcgagttggaagaccaaaattaagcattattcaaaccggtcttttaatcttgcaatgccgcagcgagtgtcataacaattgggttctttgttccagtgtagtagcccttgcagaggaactgggccttggtgtggaatgtaatgactggaaactgcccaaatgggaaaaggatttgaggaagagattggcctgggcggtttggttaatggataaatggtgtgcattgaatgagggaagacaatctcatttgattctagggagaaattggatgatcaagctgttgaatttcgatgacttccctatcaattcaccaactatcctaaattctttacaaaacgaccaattggcatcttcgccttcttcgtcaggcgatgtgagaaaccatcaaataggggatcctctagagtcgacc

SEQ ID NO: 4393 - DNA, 72 bp, Saccharomyces pastorianus
atgatcatgaaccaaccaggtgatttaaatgaaattgctaaagagaatgctaaaatcccaaaatttctgtag

SEQ ID NO: 4394 - DNA, 1473 bp, Saccharomyces pastorianus
atgactgagtttaatatcgatccaaacaccattactaaaagtattggcttgattatcgttttatcatatcttgactttgccttagcacctgcactcgtcgatgtgacggttctaaccgttaatctcatgggactaagacttcttattagcctggttcttaatggaaatcttactaaagacatatttttattcacctgtctatatatggtctctactttctctgtcttttacgctcccccaattccttggtcagatcgatgttatataaaaatgaggatgcgtgaaatagctttatcgttacgactcgtttcaaaaggaattaaaagagcatataacaatagtaaaagaaaagaagggggcaaagaaatggtgagagcattaagagatatagcactattcaacgacattaggaaagatcaaaactccacggggaccaagcatgaaaggtatagcataagagatcttcgggttaagaaaaacattcatggaaacggcttagatgacgatgaggatgattctctggagagatttataaggagaaagaaatctaaaagcataaaatatattccctcattggcggcctataacgttttcaatgagtttccttattatcctacatcgtctagtcaattacaagagggcaggttggacgaatttatcatgctatcagagcaatataaaaacaggttgcccagaatacgtaagctaggatggaacaggttcaagccaataggcattaataaaaccatgcatgatctagaaatgttacgagtccgaacacaagcacaaaacgaagaaatgaataatgaggaagaccttagggaacaagatcttagggaacaagatttcagagaacacggctctatagggcatgcagtattgccccatattctacaggaaaatgatgatgataccgatgaaggtgttgctggtactcataacgctgtgaatgatggtataaccatgtttactcataacagcgctaataattcacatgaagtaatttctgaggaagacgagatatcttatgattacgatgcagaatttgatcatgttgtagatgaggaagaggatgaagaagccgaagtgcaggaaggaggaatagaagtcgatagggaaaggattgttccggatgacttattaatgaggtccacttcattatcacgctccttacaacaattcgtggaagaggtccaccgtttggaccgaaatccatatgatatcgacagcgataatgacggagaggactcaaagatagaagtaggtacaaaccccgactttgaagacgaagacgaaaccaggagagaagtaagggggtatgattataacagtgagtacgctcaagcgcccgcttcctatggtgagatcacacctgatctagcgagcaattggagaaattggaccagagaaagaataactagcttagatgaactaatggaaagacgtgccaggcaacaacggggcgaagactaa

SEQ ID NO: 4395 - DNA, 1071 bp, Saccharomyces pastorianus
atgcccctgaatgctgtccctccgacgacgaatgttgagaatttccatgctaaattgaatgctgctcgaggccaactgtggtgcgatgttggctttttgggtggtcttgtcccagacaacttagcagacttggttccgcttgtaagggccggtgttcgcgggttcaaagggttcttgctggattcgggtgtggaagagttcccccccattggtaagaagtacatccaagaggcgttaggagtcttgggtcaggagaacactatgatgatgttccacgccgaattgcccacagcggatgcccatcacgaggaaaacagtcatgaatattcctcgtttctgtcttcaagaccggattcttttgagattgacgccatcaatttgattctcgagtgcttgtgcgctagagatggaccagtgcctcccgtacatgtagttcatttggcatccatgaaggctgtcccgttgatcaaagaagcccgtgcttcagggctacaaatcaccaccgagacctgtttccactatttgtgcattgcagcagaacaaatcccagacggagccacttacttcaaatgctgtccacctatccgttctgaatctaaccgccagggcctatgggacgcattgcgtgatggtgtcataagctcggtagtgagtgaccattcaccttgcacgcctgagttaaagaacttgaaaaagggcgattttttcgattcctggggaggaatatcgtctgttgggctgggtttacctttgatgttcacccagggctgctccttagtagatatcgtgacatggtgctgtgaaaacacttccaagcaggtgggactggctcaccagaaaggcgctatagctcccgggtacgatgctgactttgtggtctttgatacagagaacgaacatatgataactaactcaaccgttttcttcaaaaacaaactgacagcatataacggaatgaaagtcaagggtattgtcttaaaaactatactaagagggaaagtaggatatacaaatgttgatggagtgacgaaagcaccattgggccagactctgctagagcccagaaagtaa

SEQ ID NO: 4396 - DNA, 153 bp, Saccharomyces pastorianus
atgaatggtctggacgacaaattaggacagattaaaccagggttctttgccgatttattgatgatgaactcaaatcccttagaaaatattgagattttggatgaaccagagaccaatctattgcttgtaatgaaagatggaagaatttactaa

SEQ ID NO: 4397 - DNA, 2286 bp, Saccharomyces pastorianus
atgaagaaagcgaaaggtaagaaatctagagttttggtattatcgagagatgcgggcaccaatgaattaaagccaaccagagggagaactcatcgagcctgtatgacctgtagaaagagaaaagtacggtgcagtggacaaacaccatgtagattttgtcacactaacaaactcgaatgctcatatgacaggcctccacggaacccaccggcatttggtagagaattaagtgaagataattccctgtactctcaggaaacctcccagcaaggcgatgtcctcgctaaaagcagtcaaagtaccgttgattacaaaagtattgttgaggcgataattccacctgaggcgcttcatcagatagtcacttctccttctttcaacaatgagattttcttggagactgtcaaagcatattcactacagggtcaattggatgttaacaatataatacgtgagagtctaccaaaaaatactccgtggcgcatcaagacaagcataccgttacctcccagggatattgctttgaaatttatccaaaagacttgggattgtgcctgcgtgctattcagattttaccatagacctacaatcatttctatcctagattctatttacgcagcagaaaaaattggcaaggagtatactccggagcaagtgaaaacgaaacctctgatctactctgttttggcggtcggagctctcttttccaaggatgacttaagcaaggatagtaatgcaaccagggaattctatacggatgaaggctataggtactttttagaggccaaaagatctttggatttttcgaacattgctgatatatattccatccaagccatatttatgatgaccatatttttacaatgctcagcaaacttgaaggcttgctattccttcattgggattgctcttcgtgcagcgctaaaggagggtttgcatagaaaatcatctataactgggcccactgcgattcaggatgaaacaaagaaaaggcttttttggtctgtgtacaaattggatttgtacatgaattgtattcttggtttcccaagcggtattgacgaatctgatatagatcaagaatttcccctagatgttgacgatgaaaatatatctacagcggggataaagtttcaagattggcgaatgataagctcttgtggaatgaacaatgaacacacaaagcttatattgattatgtctcggatttacaaattaatgtattctttgagaagaaagcctttggaggaagattcgagattgcagatcgtatctctaaatgatcaattagaaaattggtatgcgcaattacctgatatattgaaagttgaaaaaataatctatcgtgagccacaactaccactacatatttgcgcaaatgatagcagttctccatacacgaaacctaaaaaattgctgtatctggactttctattatcaaaaattgtactatacaaacccttttaccattatatatccatagacccactagatgtcccagaattccaatttcaaattcatatggctgagaactgcattgaaatagccaaaaaagtcatccagttatcttatgacatgattgttcaaaatcttttgagtggtagctattggttttctattcatacaattttctttagcgtcgcatgcctcaagttctatgtttaccaaacagagaaggggttaatacagaagggcaaggttgactcagacatatataacgctacacagctaggcagtgaaatattatctcttttgaagggtgcttcaaacgcaagtgaacgaacttttaaagttttgaaccaactattcaaagagttcaacgaaaagacctctgtactatctgaacaaattctaaacatagtcaagttgcaacgtcaggaaagcagcggcactttaagttcaccgttaaatacaaacaatagttttacgaaatgcagagtaccgccacaaaccggacagatatccggacagatatccggacaacaacagcaacaacagcaacagcaacaacaacaaactccagccacgagccttcgttccattctaaatttcccgcaacaagagaccgatttacgttttcaaactgccaacaatggagttcatacggcgactactgcgcaggaagaatacctggataaacttctagcagaatttgaagagtttgattattcaattaatagagtgctgccagatgtcatcgatttttccgcactaattggccctgatactgctgttaacaaccaacttgtcagttcaaattacaattccaatcccacggtcagctga

SEQ ID NO: 4398 - DNA, 456 bp, Saccharomyces pastorianus
atgttattgacgtttatatcaatcatcctggcctcctgcacgctgccaattctgttttccattagagccatttcttcgagaatttcacttactatatacaaaaaatgtcaacatgaaaaagacgccaaaatcaagccgtgcgagatgatgcgggtgcgttattatgatgtactttcagcgtgtatatacttctatctaactctggcttgttttacttatttcttgttcttctttagccttgtctcccctgctgctctaattttacgtttcttacttccaggggctcctcccttagacttcacctggtccagggccgccttttgttcttcattcactggactgacacggtcaaatatcttcatattgggttgtactcttcgcagcctcatctgggataaatcgagagcatctaccaatgtatctgtgtggtcaggaataaagaatttcgccacttga

SEQ ID NO: 4399 - DNA, 1845 bp, Saccharomyces pastorianus
atggctctaatggaaaacagaattggcagcgtgcaggaggccaggatgattgatataaacgtcaataacattttttttagatcttactcggttgaccccaactccggacatgcgatttatgtctttgactcgacgtatttacctgcgcccgatgaaatcggtgataagcaggtttatgatttacttattaatgcacttatggatcgattggtgatgaaattgccacaggcaccgtattcgctagtaatcttttcatctgggttttcccagcgaaaaattagctgggtttacggtattaaaatgtttgccaaattgcctaaagagaccaagttctatttacaaaagatattcattgttcatgaatcattttttgtcagatcggtgtaccaagtgctctcaaatgccatgaatttcaatttcttggactcaaaggatagtcagcatgattttccgagtctggttcatgtcttagatctgacttctttatccgagctattagatattacacggctcaggatatcgttgaacgtgtatttatatgactatcagataagtgagcgtatagatgtttcggaggaatattataaccgattgacgcctttggcgataagacagtatagacaattaatatttgacaaaattttcaagaaattgcaaagcgatgctgtgatgtgtgaactgattttccaaaaaccaggaaactataaaaaggtaaacattttcttagacattatcaagagaaacaactatattgatttgtctcaatgggacatttattcattggcctccgtgtggttgaacttttttatcaagaataaggccaaggctttgattcctattgaattgattccgttaccaattgttgatgatttcatatccacaagagaaacatttcataaaatcatcaaatttaatcagtatcaagacctctttgtggtgatattccccttctttaacacgattatagcgcatggtgaggtgactaggcatgactcaaggacgttaagtaaagctttgacccctgcactatgtaaggagaaactctctatcatgactaacgaccgtttagccattggatcaaggtacattaaaaatttgttagattttttccctgaaatcgtgaaggatataacatcgtctttgtcatcggcatcatcatcttctacaatacctctattacctaaaccaagaaaatcatccccaaccagatacagcgaattgggttgcttaaccttacctagaagtagaagtcccagtccacagagatccgttacgtctccaatattcgcacctgtagcattacagaatacaccaatattaaaacctgagtcatcaaatagaaatgtttcctccccattaattaatactaggcctttgcccccacccaagacacttctacaaccacagttgtcactaacttcccgttcaaataccgatttaacattagccttgtcttctacagataccttatcttcgccaacaaaaacaccatctactgagttacttccaatgagcaacagcagcacagatttgttgatatcggacactatcaaagaaatggttaaggatgagcctgtaaaggacaaaaactccacagacacagatgcgttgatacagcagttcgagagtttggctgttgagcaaaattcaaagatcaaaaaatttgataaagaattacaggaaaagaagaggaaaagtgaaaatacttcaaagatagcagacaaattttcccaaaagggatattcggatattaaagcaggtaataaagtcagtaggctagctgcattatacgaagaacgtttgcaaggtttacaagtaatgaatgaaatgaaacaaaagtggtaa

SEQ ID NO: 4400 - DNA, 945 bp, Saccharomyces pastorianus
atgcaaacatatacgctaagcacttcgaaaaaattttgtctcgaggaagtcgctaaatttcgcccaacggtggatagaccttttttcaatatttatctgtgggaccatttcaacgatgcagtcaagtgggtcactgcaggccgttttcagcccaagaattttgagtttgtggcaggagagctacctttgagtgaggtaaatagcgtgcttatcttcattgcattttactatgtggtcgtctttggtgggaggtatctattaaagtcatgtaggcctctcaaattgaccgttttttcccaaatccacaatttgttgttgacttctgtttccttattgtggttggtgttgatcgtggagcaggcggtgcctatggtgtatcgccacgggttgtacttcgccatttgtgacattagatcttggacccaaccaatggtggcattgtactacttcaattatatcaccaagttcgtagagttcacagatacgattctcatggtattgaagcataagaggctgactttcctgcacacatatcaccacggtgccacagccctgttgtgctacactgaattggtcggttacacagcagtgcaatgggtacctattattttgaacttgaccgttcacgttctcatgtattggtattacttcctttctgctagcggagtctgtgtgtggtggaaagcctgggtaactaggttgcaaattatacaattcatccttgatatgattttcatatatttcgtactttaccaacagaccgtcgccgcatatttcatggactctggtctacccttctgcggaaagtgtctgggttcgttaaccgctatttattctggtgcagccatcgtcacatcttatctgtttttgttcatttccttctatattgaggtttacaaaagtggtggtgccaaagataaaaagaagattgacaggaaagcttga

SEQ ID NO: 4401 - DNA, 453 bp, Saccharomyces pastorianus
atgtttttgatttgcaaagtggggccattcaaatcttggaaagaatcaaaaatcttttggaaaatggaagacggatcgcttagtgatatacagttaatactggtcaccgccacagactccagtctaccatcaggcaattcaaaccaagacaggttctgcaagtgcgggttcgtgtgccttggtgggtgggccgaacttgacattgatagtgacagtggtaatgattggaacttctgtcttataatcatgtccatctgggcagttttgccggtgcctggtggccctgtgatgtatagcgaatcagatttgtgctcagagatagattcggacaaaaatttcatcacatgctcatattccttggttcttgctggtaaagcaccgccattgttattcaaggttaccaactctgatgatttctgcagaagtgccttcgtccttaggaagatagattga

SEQ ID NO: 4402 - DNA, 279 bp, Saccharomyces pastorianus
atgaaggttaaggctgacagagatgaatcttctccatacgctgctatgttggctgcccaagatgtcgccgtcaagtgtaaggaagttggtatcaccgccgtccacgtcaaaatcagagctactggtggtactagaactaagactccaggtccaggtggtcaagctgctttgagagctttggccagatccggtttgagaattggtcgtatcgaagatgttaccccagttccatctgactcaaccagaaagaagggtggtagaagaggtagaagattatga

SEQ ID NO: 4403 - DNA, 120 bp, Saccharomyces pastorianus
atggctaaggctaagaagcaaaacagaccattgccacaatgggtcagattgagaactaacaacactatccgttacaacgctaagagaagaaactggagaagaactaagatgaacatctaa

SEQ ID NO: 4404 - DNA, 1809 bp, Saccharomyces pastorianus
atggaattattaaagcgcgaagaggaaaagacgatctcgacgttaaaagccattatttatggttgtcaaacatatggatcgataccgcatcatttacatgaacgtttaacaaaggtcgtcagtgctgctagatcgatcgtcgctacttattcatttcacggctcaatcggtggtatctcagatgtgagggcctatctctcagtttggcttaaagatctgggggttttacgtttatatcaaacgattctattggaaagtatttccttgatactcgatccagctacacccatttttaggaaatgctcggaaatggatgattttccgcatttgattatacgtatttactccagattagaaggctaccagaaccttataaacgataaaatattagccaagttttttgtagactttgattttacatttagggccgtatacaataaggcaaactgtaccacttacacctatgataacgttcatcttatatcggacgaagcgtatccattggttgcgtctatgaagataaatcttacgcatgtcatcaaaagaggttattttagactctcaatcccgacattaaacgtttccgatatattagtcgagatccttcatatacccgatggattggcattttttaaagtttgctatggcaatctgcccaattcggatgattctatcaaaactattttcaacagcgtttctgaagagaatcaccaaatcctagaattgggaaaaagtttgatgtatccgattttcaggattggagatctagagatcaacaacattaatgaaatcggagcagtgataacgttttccgaagtggaaaacttaaaattggaaatacttagcctggatcaaatctcatggataacacaatggaaatcgagtttccaaaagttcgcagcaaaggcggctaatgacagtacattcatcaaaggccacatgagattcaataaactaaacaacattgatgaaattaatattgggctaggtctcaatctcgatgtggaggcccaaggagagaacttcgtaccattatctgcagaaaacaaaagatcctcgccctcaaatacagtttgctcattacacaggtcaaaacctctacaaattcctttatcgtttgctattcaaaacgattttgatgatatttctttgaaggggcatatatccctcgatgaagatatcagtgatgaatctgttagtggtttagagagtagtatatcagactatgagtttcatgacaacacgtttggtagttaccaatcaatttcttacccttctacggatgtagaaaataactcaatggacatggtaatcaccgatgaaaacactgtcctttctatcaagaatgttcgaataagtcattggtcaaacaactcgtggaaaaaaatctcttcggctcaactgcaactcagtgttattcgactacgtatgggaagctttatggtagctcatgaccctgagttcaagaatctccaccatttgattattcgtttgagtgatgatataaaatgtacgcaatcaacaaaacaggacatacaattacgtgtcccaccaaacgaattaatgtgcacctttaccggcattctgaatatcaggtctagcgacaacgataagttactaccattattaaacttttatacgacatgccatgcggaaactatgtcacattcaagcaccatggaatctgtttcaagtgaagtttcctctgtttcatcagcgatggaacacaggcattcgatactgaagtgctcttcagtaataataccccatactttgacgcaggacgtcatcgattcaacacttgactag

SEQ ID NO: 4405 - DNA, 798 bp, Saccharomyces pastorianus
atggtatcaaagagttggatttgcggttttgcctgtgcaattgcagtggcccagtcgttatcctgtgagaagcacgatgtattgaaaaagtaccaagtgagtcaatttagcacgctgggttctacagaaagagacaccccgccaagcaaaaccactgaaaagtggtgggttaacgtttgtgaggagcatactgcagactcccccgaaggctgtgataaggacgatatgctatgtggcctaacgagtgttatgttgcctgaaaacaaggatgctatcactactcagattattgattttaacagaaacataccctttggcgtcgaggaaactgagaatgcactgtcattgtcattaaagggcaccagatgggggtccaacgtcatcgacgcagtcttggaattccagtgcaatgacaacatgaaagaagacgaactggtttccaccacatgggccgataaaagaattcagctgaccataaagggtccctctggttgcttgaagagcaaagatgacaagaaaaagggcgacgacgacaaggaggaaaagaagccagcaaagaaatcaagcggtgcttcatggtttacttggttattcctatacgccttactgtttacattaatatacctgatggtcgtatcgttcttgaacaccagaggcggctccttccaagatttccgtgccgagttcacccaacgttctactcaatttttcacttccttacctgaattctgtaaagaagttgtctcgaaaatattgggtagaaacactacccaaagaggtggttacagcgccgtttaa

SEQ ID NO: 4406 - DNA, 324 bp, Saccharomyces pastorianus
atggcaagatacggtgctacttcaaccaatccagctaaatctgcatctgctcgtggctcttacttgcgtgtttctttcaagaacaccagagaaaccgctcaagccatcaatggttgggaattgaccaaggctcaaaaatacttggaccaagttttggaccaccaaagagctatcccattcagaagatttaactcctctattggtagaaccgctcaaggtaaggaattcggtgtcaccaaggccagatggccagctaagtctgttaagttcgttcaaggtttgttgcaaaacgcagctgccaacgctgaagtatgtttaaaatga

SEQ ID NO: 4407 - DNA, 279 bp, Saccharomyces pastorianus
atgaaaggtggtgttgtttttgattctagtgggaatgttgtctcttttatctctgatgacactacttttggtcaaactgtttctgcagacgctgttaatgagttgttagctgctattcctcaagacgaaacctactcttctcaattaatgagtatttctgctacggctcctactacttcatcgaaatccaacggtatttctttaacaaagatgcaaaacggtgtatggtattacattatggccatttttactgcttttacacaagtgtttttgatttga

SEQ ID NO: 4408 - DNA, 639 bp, Saccharomyces pastorianus
atgttgcaaagtatagtcctttccgtgtgtgtgtgtctgttacacacagtcgctgcaagcgggcctcagtcgtatcagaagctggatttcacgaacgtgggttttgcaggtacgtacaatagcgtaaaaaagtttacaggtatcactaacaatgatacatgtaattgtgaagtgggtgacaaagaatggttttctggtgtaaacgccccattggctgaatacttgtctgttcatttccgtggtccattaaagttgaaacaatttgccttttacacttcccctggattcactgtcagcaacaatagaagctcttccgattggagccgttcggcctactatgactccagctcgaagacagctaataacgtcactttcttaaatcatggaggtgaagcttccccttgcctaggtaatgctttgtcgtatgctagttccaatggtaccggtaccgccagtgatgccactgttttggctgatgatactttaatttcttctgatgaagaatatataatctactctaacgtttcgtgtccaaaatcaggttacggtaaggattgtggtgtttaccgtagtggtattccagcttattatgggttcggcggtacaacgaagatgttcttgtttgaatctgaaatgccc

SEQ ID NO: 4409 - DNA, 705 bp, Saccharomyces pastorianus
atgaacattcttttatcgtgtaatatttatgttctagtaccagcaatttctcagaatagtacgaaaaacaacatgccaatttcatccagcagaaagaataaaatcagacaactaaccgcgcctttcgaagatgatgagaatccctggatgaaaaaataccattgccaatgtaaatcatgtcaaatgagcgcatctatgcatccttggttaccaaggtttttcattttcggcatcctgtgccccattttctggttggtaaatcttttaggttggtggtacctgcaattttggcaaccacacgaattggaatttcaaaactttcaagaagacgagtaccctggattctatgaacgtgatatcgtcaagaaaagatcactagtacacctgaagaaagaagtgctacaagagatccgcaccattcaagatcttagcgatagcaacagcgaagaagacctaaacaacgacgatgtctacgacacacagtcgtcttctgtaaaagcggacccggaacaacccgagagcgatgaagaggcactagagaagtaccgctacgctttcctgaagaaagtggctcatgatatcttggcgacgcacgattcattacgtaaaagtttccgcgactggaatctgcgctctttgcttggcatcgtcatagattctgtactgatattgtttatagcccttctctgtaaggaaactcgatag

SEQ ID NO: 4410 - DNA, 132 bp, Saccharomyces pastorianus
atgaattctttaaccttatgctttttctctttgcttaaatcatcgggtggtgctctcgataaatcttttttcaattcctttgtggttaacattttcacaatatctttagcacactgtttgatattttcatga

SEQ ID NO: 4411 - DNA, 114 bp, Saccharomyces pastorianus
atgacgtgtcagtttgatgatgttgaaggtgggggagaagacatcctaattgatgccgatgccgagatcgatgcctttttttgcttctttttgagaattatcttgtccatataa

SEQ ID NO: 4412 - DNA, 1224 bp, Saccharomyces pastorianus
atggggggattatcggataggataggcagagttcgtgttttcaaatacatgagcggtatcagagtcatcggacttgcagctcaagtgtttactgtgtcgtctagaatcgggtaccataaatgggctattattcttaccgcctgcatcgttccatctctcggtgggttatttgccctagtggcaaatggaaatagttatgtctcagatgtagtgaaaaccgaacatagaatggtgacgataggaataatgatgagttgtatttatgccaccatgggcgtaggcccgatgtttggatctctcctagtcaagtggactcatggcaacgcatttgttcctatctacacagctatactatttgccatactcgcactcgtaatatgcgagacaatgatggtggaacctcgtcacgaaactcagttggcccattcacaatcaaattacaccaagaggagggagaaactaagatctcaatcaggctctgatgacacgcgaaactatcagtctgttacttatggtaaatttcaaataatgaaactgatggaactactggctccggtcaagaaactgtggttgaagccagatgtcacaggttccttagtgccgcggcatactgttatattactcattgtactggatgtattatttgtttgcggtaccacgtcctgtatgccggcactagttctattttccacatacgagtacaagtggcatgctgtagaactaggctatttcatatcgatattaggtattggaagaggtctcgttttactgatcgtgtcgccaacactgttatatgcattgaaacggatttatcaacacttggaccattccatagataagatagacatcttttgtatacggttttcgatggtcgtcatagcgctaagtctccttgtcatgatccaattcggcgaaaaaagttacgtatcgttagtggtttttgccctcttacaagcattgagtgcgttctgttcacccactctacagtcgggtatcatcaaatacacctccaagaaacacacaggcgagatgttcggagcaatggccctagtcaggtcttgcgtcatgcttgttatcccacccatcttgcttaagatatacggcagtactgtctccgttaaccccggcctattcatatatattccgtttctggcaagcattgttgccatctttttgacatttttcctgaggatttacaacgccccaccactgacctcaccctag

SEQ ID NO: 4413 - DNA, 321 bp, Saccharomyces pastorianus
atgtcagacgaagatgaaacaacgcgtttgatgtctccggatgagatggactatttgttggaaacgacaggaattaacgccttggaagggataattaaccaagatggcattgagagttctggtgcttacgttgatgccaatgatagtacacaaatcattagtcatgaatctatcaggcagagttcgcccagcgttgccaagagcattgacggaggaaatggacggagaaagctattttgcctatacggtcttatcatggtatattatgtatttggcggaagtctatattgcatagactggccagtaatacccgctaagtga

SEQ ID NO: 4414 - DNA, 1593 bp, Saccharomyces pastorianus
atgatacaatcgagctcggtaccggggatctctagagtcaaatgcgaggaattgttcaaagctgtagtacatgcacactctgtcttaactgataaagaagaaaaacttcggtacgatcagaatttgaaaattaaaggcttacatacttaccaaccaaataaatcctgccatactttcaagaccacaataaaggaaccccatgaaacaagctgcatacctacgaaatctgaggtccatcataggcaaaataaaccgtatgaacagcaaccttatggtttcggagtaggaaagaaaatgaatatatcatccaagagcaaggtaccaatatttaaatcctttaacttaaaagactaccagcgaagtcacaattattcatccaaaaaggaaaggaaacatggaaatccagacatagattctttattccaggaaactaatggagcttcaaaagtaagaatggctaattcaaacacagtggatgcgaatccggagttcgaagagatatgggaaaccttggataaaaaaactagtgatagtgaatcccactgtgaagatccagattcacgtttgggatcagttttgagtgacgatgatggagaggaattttgtagagtaccatcgaattccagtagtcctgaggaagacaacaaatacaatgaaggatcgaaaaaggagaggagaaattcctcagaagaaaacagagaagaaatgagatacaagcagtttaaattgcccaaagttaatgtttttcctaatctctctcatcaatcaaattttcagtctccttttatcactcatgagtatcgacattatgcaaggaacaaattcgaaaatagaaaccaaaaccgaagagcagtctcgcccattaaagagatacctgcaaccttggaaactgctgaagggtggactattttgaaagacattgttgagaaactaaacataagcaacacagatgatcgaaataaagacctctttttcctcaagaatgaaaattccaataaaaactacgatgatacaattaaaatagaaaatctatccattaaagaatctaaaggaattaaaaaaagaaaaaaagatgacatatcgttggaagagttgtcaaaatctctaccgaaagaaaaggatttttttgtaatgaatgcagttaatgaatcgttggactcgatctatctccccaaaaaacctaagacagctcagagccaagcacaaagtgagcgtttgtcccaaacagaaggaaatcaggcacagcgtacaataccgttggaaaagtatggaatgagttccaagagcttaagtatacaaataccagaggtcccagacttcgctacaatgacagacttgaaatttttgaatgccagtgtgcaactttttaacctccaatgtaacaaaatcaaggaggaattattccaagcgtccttacagcgtctcagagcagacacgtacttcagcggcacactaatggaaaaacaaaatatcatgacttggaaaacgtgcttggaatttgacagaagtttaatggacaaactaaatattctacaagaaagacaaatgcatgtcgtggagttcttttccaagatatatggcggcagagaataa

SEQ ID NO: 4415 - DNA, 105 bp, Saccharomyces pastorianus
atgtcccaggtattagaaccgatattagatagaactacatattactccatattaggtctaacatcgaatgccacatcttcagaagtacacaagtcatatcttaaa

SEQ ID NO: 4416 - DNA, 837 bp, Saccharomyces pastorianus
atgtattacaagaaagcatttataacatctctattaactagtatcgctttgagcgcatatgctccgcctgaaccatgggcaactctaaccccaggttccacaatggcaggcgcaacaaccgattacagaacttcgtttggtcttgctgttgtccctttcactgtaagtgaagttaaagtcaaaaggaatgtcatttcacaaattaatgacggccaagtgcaagtaacgacacaaaagttgccttcggtagtgtcaaaaatagtgtcgcaaataggcgacggtcagttacaagtaactacagcaaagaatgttgttacaaagtccaaaacttttacctcaactgcaactgcaactgcaaccgcaaccacaactaaaatcaagaccaaaaccaagaccaaaaccaaaactgccatatcacaaattcatgatggccaggtgcaagccactacttcatccatcagcagtaagctcgacccttcaaagagtaaatcagagccagcgaagaaatcgagcgaagtaactgtagttaaggttcaagcttgcaagaatgcaggtactttggaaataacattgcagggtggtgtactcattgattccaaggggagaataggttctattgtaggaaacaggcaattccaatttgatgggcctccaccacaggctggtactatttatgctggtggctggtcaataaccaagcaaggtactctagccattggtaatagtgacatattctaccaatgtttgtccggtactttctataatctctacgataaatcaattggaggccagtgcagcccggttcatttacaagcagttggcctcgtcgactgttga

SEQ ID NO: 4417 - DNA, 1221 bp, Saccharomyces pastorianus
atgcaatataaaaagactttggtcgcctctgctttggccgctactacattggccgcttatgctccatccgagccatggtccactttgactccaacagctacttacagcggaggtattaccgactacgtttccactttcggtattgccgttcaaccaatctccaccacatcttctgccgctgccacagcctcctccaaggctaagagagctgcttcccaaatcggtgacggccaaatccaagccgccactaccaccgctgctgtctccaccaagactactgccccagctgtttctcaaattggtgacggtcaaatccaagctaccaccaagactactgccgctgctgtctcccaaatcggtgatggtcaaatccaagccaccaccaagactacctcagccaagaccactgccgctgctgtttctcaaattggcgacggtcaaatccaagctaccacaaagaccacttcagctaagactactgccgctgccgtttctcaaattggtgatggtcaaattcaagccaccaccaagaccactgccgctgctgtttctcaaattggcgacggtcaaatccaagctaccacaaagaccacttcagctaagactactgccgctgctgtctcccaaatcggtgatggtcaaattcaagctactaccactactttagctccaaagagtaccgctgctgccgtttctcaaatcggtgacggtcaaatccaagccaccacaactacttcagccaagtctagcgccgctgctgtatctcaaatcactgacggtcaagtccaagctaccaccaaaacctctactactcaagctgccagccaagtaagtgacggccaagtccaagctaccaccggtactgctacctccacctccgctgaagcttcttctacctctactgacccagtcgatgctgtttcctgtaagaactcgggtactttggaaatgaacttgaaggaaggtatcttaactgacggtaagggcagaatcggttccattgttgccaacagacaattccaattcgatggtccaccaccacaagccggtgccatctacgctgccggttggtccatcaccccagatggtaacttagctatcggtgacaacgatgtcttctaccaatgtttgtctggtactttctacaacttgtacgacgaacacattggtactcaatgtactccagtccacttagaagctattgatttgatagactgttaa

SEQ ID NO: 4418 - DNA, 84 bp, Saccharomyces pastorianus
atgtcttctaccaatgtttgtctggtactttctacaacttgtacgacgaacacattggtactcaatgtactccagtccacttag

SEQ ID NO: 4419 - DNA, 225 bp, Saccharomyces pastorianus
atgaagcaagataccttcgcatttgaaacttcttcggtgcgatggcattgcctatttccttttcgggtatttttctgtggaatgaccgcatgtaaaaaaacacatcgcagaaaaaacatggacatgcaaacaaaagaaagtagcattctgaaacggttgtgtcccttctgcttgccttacaaaccaaaagaggaaactgacacacacacattatttcctcactag

SEQ ID NO: 4420 - DNA, 2112 bp, Saccharomyces pastorianus
atggctagattttttgctttgaacaagaaaaaggagaaagagaaaaaggagaaagagaaagacaatacagagtctgcagacgctgaagaaaacgtaatagaaagttcatccagttatctaactggaaatgaggaagcattagatcctaaatatggcgatcttcccactgcgaatacagccagtgatgatgtgtccactacttttgactcgtctatacaatcgtcgtctatattttccagaagcaggttaacttctggaacaggtgcctcttccagtatagccacatcaggaatgcgtagtcatagtagtgggaatatcgggtctaagaataccaagaacttacaggggttcgtggatgtcgggaaaccattaagggcagttagttttttgaatcccgttaaagaggaggaatctcaggacgaacagaaagcttcagatgttagccctctggctcctacaacattagctacttcaggcggtgtgcgggaaaatactttcagttcaagaagagctataactttagataatgtccataaaagcctgtcggaattggaggacaatttagtggacataatggatgatattcatcaagacgtcatcagtatctcaagagcagtcattgaagccatcgagtactttaaagaatttttaccgacgataaaagacaggattccatataggataagtgttgaaaaatcttccgcattacgaaagattaataaaattgttctacatttcttagacaacttgttagtgtctgatgcattttccaattcgaggtcgattttattaagaagattttatttttttttgaagaaattaaacttaattaccgatgatgactttatattggagtcaggagttttgccgtgcttgtcagttttctgtatcgacggtcattgcaacttgccaagtatggacaaattagatttaattttgaatgagttggccaagatggactcctctattatttctgatcaagaaggtgcttttatagcacccatattaagagggataacccccaaaagttccatcctcacgataatgttcggtttgcctaatttacagcatgagcactacgagatgataaaagttctctactcgttgttcccagacgtacacttgtactgtgtgaaagattacatcaaaaaggctgcatctgcagtagaaagtattccatctcatacagagcctgatgttggcccaatggctcccgtcaagttccagttttcgcccccatacgcagtttcagaaaatccattggaactgcctatttccatgtctctatccacagaaacaagcacaaaagtaacaggaacgttgggaggttatctttttccgcagactgggattgatacgaaattctcgcagtttgcaaactgctcgttcgccattacatgcgcccatgttgtattgtcggaaaagcaggattatccaaacgtgtcggtaccatctaatgttttacagacttcatataagaaggttttagcaaaagaatccgacagataccccgatgattcagtagaaaaaaccgccttcttggaagaagtacaaagaatagatcagaatctaaaatggcagaaatcaaacaagttcgggcgggttgtttggggcgaaagagccatcgttgatcaccgattgtcagattttgctatcatcaaagtgaattcgtcgtttaaatgtcagaacactttaggtaatgaatcaaattccttgcctgatccaactttgagatttcaaaatttacatgtcaaacgaaaaattttcaaaatgaagcccggtatgaaggtatttaaaataggtgcttctacacgttacacttctggccaactgaattctacgaaattggtttattgggcggacggaaaattgcaaagtagcgaatttgttgtggcatctccaactccattatttgcaagtgctggagattccggtgcatggattttaaccaagttagaagatcggccaggtttaggaattgtaggtatgttgcattcatatgatggtgaacagagacagtttggtttattcacacctataggtgacattttggagaggttacatgcagtgaccaaaattcaatgggatatcgacccacaagtagatggatga

SEQ ID NO: 4421 - DNA, 1602 bp, Saccharomyces pastorianus
atgacggaagatactactgccctaactgcttctgtgagagtgaccagcaacaagtgcacgtacacggacaacgagctgcttaccaagtacagttatgaaaacgctgtggtgtccaagacgtccgatggccgctacgatgtcacgcccaccgtccaggactacgtgttcaagctggatttgaacaagccggcaaaactggggatcatgcttgtcgggctgggcggcaacaacggctccacgttcacggcggcgatcttggcaaacaagcacaacatcgagttccaaacgaaagaggggctcaagaagccgaattacttcggctccatgacccagtcgtccactttgaagctgggaatcgatgcgcagggcaacgacgtgtacgctcccttcaactctctcttgcccatggccaatccgaacgattttgtcgtcaccggctgggacatcaacaatgcaaacctgttcgaggccatgcaaagagcacaggttcttaagtacgacttgcaacagcggttgaaaaccaagatgtctcccttgaagccgctgccctccatctactaccctgattttattgccgctaatcaagacgaaagagccaataactgcatcaacttggacgagaaaggtcacgtgtccacaaaggacaaatgggcccatctgcaacggattaggcacgatataaagagtttcaaagagaagaactccctggacaaggtgattgttctctggacggcgaataccgagcggtacgtggaggtctccgccggcgtcaatgacaccatcgaaaatcttttgcaatccatcaagaatgaccacgaggagattgcgccttccacgatctttgccgctgcatccatcttggaaggagttccgtatatcaacggttcaccacagaacacgtttgtcccgggacttgtccaactggctgagcgtgaagggacttttatcgccggagacgacttcaagtcgggccaaaccaaaatgaagtctgtcttagcccaattcttggtggacgccggtatcaagcccgtctccattgcctcttataaccatctaggtaacaacgacggcttcaacctatccgcaccgaagcaattcaggtcgaaggagatctccaagagttcggtcattgacgacatcattgcatccaatgacatcttgtacaatgataagttgggcagcaaagttgaccactgcatcgtgattaaatacatgaagcccgtgggtgattccaaagtcgccatggatgaatactacagtgaattaatgctgggtggccatagcagaatctccatccacaacgtttgcgaggactcgttattggctacgcccttgatcatcgacctgctagtgatgacggaattctgttcaagagtgtcttacaagaaagcgaactcatcccaagacaacgacagcaagttcgagagcttttatccggttttgaccttcttgagctactggctaaaggcgccattgacaaggccaggcttccatccggtgaacggcttgaataagcaaagaaccgccttggaaaactttatgagattgctaattggattgccttctctgaacgaattgaggtttgaagagaggctttcgtga

SEQ ID NO: 4422 - DNA, 1302 bp, Saccharomyces pastorianus
atggcaaataaaggcttactttatgcccttggcatttttttaccactatggacttttttgatctgtatttttttcaaacagatattcctcatacataaaagtcaaaacattgataattcatatacttatctatcccaaagggcaaaagagcaatatgactcaagccgaagaagaaactacttaccggatttgaaactgtctcgtaatagttatgaagactacactttagattatagaagacaagatgaatttggttgcttttatcagagggaaaatgcaacgatattgatgttagtgagaaactcggaattggaaggggcgttagattctatgagatccttagaagatagattcaataagagataccgttacgattggacgttcctcaatgacgttccctttgaccaagaattcattgaagccactacagctatggcaagtgggaagacccagtacgccttaatcccgcctgcggattggaaccgaccacaatggattaatgaaacattatttgaagctagactacacgagatggagacagagggtgtcctatacggtggatccaggtcgtatagaaatatgtgtcggttcaattctggattcttcttcaagcaatcgatattgaataactatgattattattttagagtggaacctaatgtcgagtactattgtgatttcccgtatgatccattcagggtcatgagattgaaaggtaaaaaatacgggtttgtcatttcattgtatgaatacgaagagaccataccgactttatggaacgtcgtggaggaatatttggagacgaatgaagggaaaatcctgagtaaagaggacagcgcttatgcgtttttgaccgattcaaacttagtcgggaagtactatcctgttgtcgaggcaaactccgattacaatttgtgtcatttttggtcaaacttcgaaatcggtgacttgaattttttcagaagtgacgaatacaagaccttttttgagacattggactccaagggtgggttttattacgagagatggggggatgcaccggtgcattccatcggcgtgtccctgttactaaggccagacgaaatcattcattttgatgagcttggctatttccattcaccattcggcacctgtccggcatctcacgcagtaaggctcgaccaacgttgtagatgcaagagcgatgacgtgagcgtcatagacatagagccacacagttgcttgatgaggtggtggaaaaatgggagcggcaaacactttctaaaagaggtgcaaggcaagaattttgaatatgtcttgtaa

SEQ ID NO: 4423 - DNA, 66 bp, Saccharomyces pastorianus
atgcccgctaccgctatatcatggacagcttatgaatgcgcaaagcattttctaatgacctgttag

SEQ ID NO: 4424 - DNA, 4023 bp, Saccharomyces pastorianus
atgacaagaatcgataaatggttcttgaacaagttacatgatttggtccagtttgcccagaaaataagctcatttggtactaaagaagatttaccttcattagttttgagacaagcaaaacaattaggttttgatgataggcaaattgcaaagttcttggattccaatgaagttgctattcgtaggttaagaaaagagtacggtattacaccatttgtcaaacaaattgataccgttgctgctgaattccctgcatacacaaactatttatacatgacatacaatgctgactctcacgatttatcctttgacgaccacggtgttctagtcttgggttctggtgtctatcgtatcggttcttctgttgaattcgattggtgtgctgtcacagcagttagaacattacgtgctaacaaaatcaaaaccatcatggtcaactacaatcctgaaaccgtctcaacagattacgatgaagctgatagactatatttcgagactatcaatcttgaaagagtcttagacatctatgaagttgaaagttccagtggtgttgttgtctcaatgggtggtcaaacttccaacaacattgctatgacattacatcgtgaaaatgtcaagattcttggtacatccccagatatgattgattctgctgaaaaccgttataagttctctcgtatgttggatcaaattggtgttgatcaaccagcttggaaggaattaacatcaatggatgaagctgagtcttttgctgaaaaggttggctatcctgtgttagtacgtccatcttacgttttatctggtgctgccatgaataccgtttattctagaaacgatttagaatcctacttgaatcaagctgtcgaagtttcccgtgactatcctgttgtcattaccaagtatattgaaaatgcaaaggaaattgaaatggatgcggttgcaagaaatggtgaattggttatgcatgttgtttctgagcatgtcgaaaatgcgggtgtccattcaggtgatgcaacattgattgttccacctcaagatttggctcctgagacggttgatagaattgtcgtcgcaactgcaaagatcggtaaagctttgaagattactggtccatacaatatccaatttattgcaaaggataatgaaattaaggtcattgaatgtaatgttcgtgcatcaagatctttcccatttatttcaaaggttgttggtgtgaacttgattgaactggctacaaaggctataatgggattacctttgacaccatatcctgttgaaaaattgccagatgattatgttgcagtcaaggttccacagttttctttcccacgtttagcaggtgctgatcctgttttgggtgttgagatggcctctactggtgaagtcgctacctttggtcactctaagtatgaagcttacctaaagtctttgttggcaaccggtttcaaacttccaaagaaaaacattttattgtccattggttcttacaaagaaaaacaagaattgctttcttccgttcagaaactatacaatatgggatacaaactatttgcgacatcgggtactgctgatttcttatccgaacacggtatcgctgtccaatatctagaagttttaaacagggatgctgatgaccaaaaatcagaatattcgcttactcagcatttggccaacaatgaaattgatctttacatcaacttaccatccgccaacagattccgccgtcctgcatcttatgtttcaaagggttacaaaacacgtcgtttggccgttgattactcagttccactggtcactaacgtgaagtgtgccaaattgttgattgaagccatttcaagaaacatcactttggatgtttctgaacgtgacgcccaaacctctcacagaactataaccttaccaggcctaatcaatattgcaacctttgttccaaatgcgtcacatgttatcaagggtccggatgaattaaaggagactacacgtctatttttggaatcaggttttacctactgtcaattaatgcctagatctatcagtggaccagttattactgatgctgcatcattaaaggctgcgaactctgtttctcaagattcgtcttatacagatttttctttcactgttgctggtaccgctcataacgctcaaagcgtctcacaatctgctagcaaagtcacagcgttgtttttgcctttacgtgaattaaagaacaaaatcacagaagtagctgaacttttgaagcaatggccagctgaaaagcaagttatcgctgaagctaaaactgccgacctggcatccgttctattgttaacctcacttcaaaacagatctattcatattactggtgtttcaaataaggaagatcttgctttgattatgacggtcaaagagaaagatcctagagtaacctgtgatgtcaacatttactctctgtttattgcccaagatgactatcctgaagctgtgtttttgcccaccaaggaagatcaagaatttttctggaacaatctggatggcattgacgccttctccgtaggcgcacttcctgttgctctagccaatattactggtaataaggttgacgtcggtatgggtatcaaagattccttaccattactattagctgcagttgaagaaggtaagttgactatcgacgatatcgttactcgtctacatgataacccagctaaaattttcaacatccccgcccaggattctgttgtcgaaatcgacttggattattcctttagacgtaacaagagatggtcaccattcaacatggacatgaacggtggtgtcgaacgtgttgtttctaacaacgaaacactagttttgagtggtgaattggtctctccaggcgcaaaaggaaaatgcagtattaatcctgccacagcttccactacagctcccgcagaaattcaacctaccggtactaagagaaggttttcttttaccgatgaaacaatggctgataatctagatgccgcagaggatgctatcccagaacaacccttggaacaaaaactgatgtcttcgagaccaccaagggaacttgttgcaccaggcgctatccaaaacttgattcgtagcaacaatccattccgtggtagacatatattgtctatcaaacaattcaaacgttctgacttccatgtcttgtttgctgttgcacaagaattaagagcagccgttgatagagaaggtgttttagatttaatgaagggacatgtaattactacaattttctttgaaccatctactcgtacctgttcttcattcattgctgctatggaacgtttgggtggtagaattgtgaacgttaacccattggtctcttccgtcaaaaagggtgaaactcttcaggatactatcagaacattggcttgttacagtgatgccattgttatgcgtcattccgaagaaatgtcagttcatattgctgctaagtattctcctgttccaatcatcaatggtggtaatggttctcgtgaacatcccacacaggccttcttagatttattcactattcgtgaagaaataggtaccgttaacggtatcactgttacatttatgggtgacttgaaacacggtagaactgtccattcgttatgccgtttgttgatgcattatcaagttagaattaatcttgtttctcctccggaattaagattgccagaagggctaagggaagaactaagaaggggtggtttgctaggtgtagaaagcgccgaaatgacccctcatataatctccaaaacagatgctctatattgtacaagagtccaagaagagagattcagtagtcctgaagagtaccaacgtttgaaggacacatatattgtggacaacaaaattttggctcatgctaaggaaaatatggctatcatgcatcctttgcctcgtgtaaatgaaatcaaagaggaagtggattacgatcatcgtgctgcttactttagacaaatgaagtatggtttgtatgttagaatggcattattagccatggttatgggggttgatatgtga

SEQ ID NO: 4425 - DNA, 2535 bp, Saccharomyces pastorianus
atggccgctatcgctcccactgccccaatttctcctccaatggagtctacaggtgaccgtctaatcacattggaactaaaggatggcacagtcttacaaggttattcgtttggtgctgaaaagtccactgctggtgaattagttttccaaactggtatggtaggttatcctgaatctgtcactgatccatcttacgaaggccaaatcttagtcatcacctaccccttggtaggtaactatggtgttccagatgtgcacttgcgagatgaattggtcgaagaattgccaagatattttgaaagtaataaaatccacatcgccggtttggttatttctcactataccgacgaatactctcattatcttgctaaatcttccttgggtaaatggttacaaaatgaagggatcccagctgtttatggtgttgatacaagatcattgaccaagcatttgagagatgctggttcaatgttaggtaggttgtctttggaaaaaaccacgtctgatagaaccatttctggatcttcttcttggaaagatgcgtttgacgttccagaatgggtggatccaaatgtccaaaacttggttgctaaggtctcgaccagtgaaccaaaactatacctacctccaacggataacaaggacattgaattgcaaaccggtccagatggcaaagttttaagaattttggccatcgatgtcggtatgaagtacaatcaaattcgttgttttatcaaaaggggtgtggaactaaaggtcgttccatgggactatgatttcaccaaggaagattacgatggtttgttcatttccaacggtccaggtgatccatctgttctagctgaactgtctcaaagattatcaaatgttttggaagctaaaaagactccaatctttggtatttgtcttggtcatcaattaatagctagagcttcaggtgcatccaccctaaaattaaaatttggtaaccgtggccacaacataccttgtacatcaaccataagtggtcgttgttatataacatctcaaaaccatgggtttgctgttgatgtgagcacccttacttccggttggaaaccattatttgttaacgcaaatgatgactctaacgaaggtatctaccattccgaattaccatacttttctgttcaatttcatccagaatcaacaccaggtccaagagatacagaatttttgtttgatgttttcatccaagctgttaaagaatataagcacacacaagtattgaaaccaattgcattcccaggtggtctactagaagataatttgaaggcgcacccaaggatcgaaccaaagaaggtcctagtcttgggttctggtggtttgtccatcggtcaagctggtgaatttgattattctggttctcaagctatcaaagccttgaaggaagagggtatttatacgattttgattaatcccaacattgctacaattcaaacttctaaagggttggctgataaggtctactttgtacctgttactgcagaatttgtgagaaaggttattttgcatgaaagaccagatgccatttatgtgacatttggtggacaaactgctttgtcagttggtatcgacatgaaagatgaatttgagactttaggagttaaagtcttgggtactccaattgaaaccattattactactgaagatcgtgaactgttcagcaacgctattgacgaaattaatgaaaaatgtgccaaatctaaggctgctaactcggtagaggaagctttagccgctgttaaagatatcggcttcccagttatcgtacgtgctgcttacgcattaggtggtttaggttctggttttgctaataatgaaaaggaactagttgacctttgtaatgttgcatttgcatcctctcctcaagtcttagtagaaaggtctatgaagggctggaaagaagtagagtatgaagttgttcgtgacgcttatgataactgtattacagtttgtaacatggaaaatttcgatccattgggtattcatactggtgactccattgtcgtagctccttctcaaactttatctgatgaagattacaacatgcttagaactacagctgtgaatgttatcagacacttgggtgttgtcggtgaatgtaatattcaatatgctctaaatccagtctccaaggaatactgtatcattgaagttaatgctcgtttatcacgttcttctgctttagcatctaaagctactggttatccattggcttataccgcagctaaattaggtttgaacattccattaaatgaagttaaaaattctgttacaaaatccacatgtgcttgttttgaaccttctttagattactgtgttgttaagatgccaagatgggatttaaagaaatttaccagagtgtctaccgaattatcctcatcaatgaaatccgtcggtgaagttatgagtattggtagaacatttgaagaagccatccaaaaagccatcagatctacagagtacgccaacctaggtttcaacgaaacagatcgacagcttgatccgccataa

SEQ ID NO: 4426 - DNA, 936 bp, Saccharomyces pastorianus
atgacaaaagggaaagaaattatttacgatacaaatcaacaaatccaaattgcattagaaatccacttagtggagcatttaggtattaataaagtgacttccaaaatcggtgaaaaatatcattggaggggaatcaagaatactgtttcagaggtcatttcccaatgccagaaatgtaagatgaggtataaagatggaacaggggtgatcattgaacaaaagagggcggtcaagcaggcgcacatgctaccgacgcaacacgtggaaaccatcaataacccaaagaataacaagaagcgtgatggcgcattattgggccagtcaatgaatttcccccaaaacatgatttccagtacactaaatgatgcggagggccaacctactccgccggatactaacgtcgtacgagctgcatttctaaatgccgccaatagtccagcctctaccagtgaatccaaccaagtagacaaaagaaacgagtaccttgcttcgatacagaacacacccttgttggatgacgaacagtcaatgaattcatttaacaggtttgtagaggaagaacattctaggaaaagacgtaaatacctggacgttgctacaaatgggatcgtaccacatttggcgaacgacggttctcaaaatgctgcaagcaccgtcaacgatagtgaacatgacatgggcaaccctgttgccggattagacaggaacgatcatgccataatgaacgatgctatgctgagccttgaagataacgttatggctgctttggaaatggttcaaaaggaacaacagcaaaagatagaacaaggagaagaggatggggaagcctcacgcaacgatatcgatggcactgaagacagtgacaccacggttaacagaatggttaacgatgcatctaacacatttacggggcataattctaatatttactactag

SEQ ID NO: 4427 - DNA, 891 bp, Saccharomyces pastorianus
atgttgatgctgaatcagcatacaggtttagtacgagatgacgaacatctgcacgcgactaaccataataatggtgtagaaatgagggacgatctggcggtttccgatcaaatattgacgcctttacaaccacataccattctgctgaaagacggagagacaatagctactatgtatcctgtaccggcctatcctgatttattgccgctgggacttgtgagtttccttctggatgagtttaatatggaagtggaaaagggagatagctttccctattatgagaatttatcgttagatgaattcaagaatgtctggttccataacgatggccacgtttgtatcatggtgctaggcgaaatacccgaactagattacagtatggacgctgatacagatgtagataataattatggaactgatatagaaaccatgaggcatacctctcaatataagaaacggaaagagcgtcgaaatttaaatctcactatacagtgggagaagcagtgccttggcatttttgatcttaagccggcataccctggacgttcagcacatgtggtcacaggaacgtttctggtgaatgctggtattaggggtaagggcattggcaagacattagtggaaacttttatagagtggtccaagaaattaggatttacatcatcgtttttcccattaatatacggaacgaacgtagggatcagaagaatcctggaaggaatgaatttcagacgaattggtaaacttcctgaagcaggtattctcaaggggtttgatgtcccagtggattcgtttatgtatggcaaagagttcacacatatcacaaagagcattgatgttgtacgagatgcctgcaaaaaagtattgaaattggtaaatatgaacgattga

SEQ ID NO: 4428 - DNA, 1164 bp, Saccharomyces pastorianus
atgacagcaagatgtttttcagactacaaagacctgattgaggagggcgatttaaccctaatatgggtttctagagacaatatcaagccagtaagaatgcaatccgaagagacgttcaacactcgttatggttcgttccctcacaaagatattataggcaaaccttacggttcccaaattgccataagaacaaagggttcaaataagtttgccttcatccatgtcttgcaaccaacgcccgaattatggactttgtcattaccgcacaggactcaaatcgtatatacgcctgactcttcatacatcatgcaaaaactaaactgtagtcctcacagtaaagtaattgaggctggtactggttcaggatcattttcgcatgcttttgcaagatctgtaggtcaccttttcagttttgaattccatcatgtaagatacgaacaggctttggaggagtttaaagaacacggccttattgatgacaatgtcacaatcactcaccgagatgtttgccaaggcggatttactattgagaagggagacactacgtcttatgaatttatcaacgatgagacagctgcctcattgaatgctaatgtagtatttctggacttaccagcaccttgggatgctatacctcacctggattccgtcattgccacagaagaaaaagttggcctgtgttgcttttcgccttgtattgaacaagtggacaaaactttggaagtattggaaaaatacggttgggctgatgtggaaatggtggaaattcaaggtagacaatacgaaagtcgaagacaaatggtcagatctttagatgatgctatggagagattaagagatatcaagagacacaagctccaaggtgtagaaagacgtaagcggatgtttgacaatactatagataccagtgatgaaaaaattgaaaaaagaaatgaagacggtataccgttaacagaaaaggcaaaattcaacccattcggtaaaggttctcgtatcaaagagggtgatagcaattacaaatggaaggaggttactaaagttgaatccgaaattaaatcacacacctcatatttaacttttgcgtttaaagtcataaataaatgcagagatgaggaacaagttaatgaaattctccagtcgataaataaaaaatcaaaggactag

SEQ ID NO: 4429 - DNA, 636 bp, Saccharomyces pastorianus
atggaaaagaagtcttctgttgtggatgccgactctaaaaactcgaaaaaaaaactgcaattcaatctatttgatggcaagataacagacggtgaaaaattagcattcgctaacctggaaaacgccctcaagttattcaatactgcacacgatgaataccagaaacagcagaaggaagctgatgttggaccagatgacgacaagagctccatcagcagtaacggcaataaaatcagtgatttgtttatatccattctcccaattgcaatcccgcaaaagcaacaggatggtgataacgactttcaaataaccgattccaacacacccggcaatttcaattttacacttgtattgaaggacatcaccaatgacatcaccaccataacaagatcgcaaggtttcccagtgaaatgggtcaattggctagaaggctccatcgaaaagagaggaccggacgggaaggaactagaaaaggaagctggcgatgacacgaatcaacacaagagcgcagacgaagatgatgacgatgagattgttgaccctagcgaatgggtcaaagaatggatcgaagacgggctaagcttatcctttggggtcatggcccagaattatgtcatagaccgtatgggtctttga

SEQ ID NO: 4430 - DNA, 714 bp, Saccharomyces pastorianus
atgtctgaaaataagaactccgaggctgaggacgtgtttgaatttttagattcacttccagaagctaaaaatggtggtaaaatggataccgccaacgtaaagggtaccaaaaaagaatctcaggatggttctgattctgcagcagaacagaaaggcaatgatgggaccaagggtgatgacgatatttttgaattcttagaagaactggagaagagcaacttgagcttgactgacaaaaaaaaggtcgaagaaaaggcccgtagtgaactggctagtaagaaagcggaagcccaagaggcagtagaaccaaaggaagttgagaaactagaggaaaaccagcaaaaagaacaaaaagaacaagtggaggaagcggaggaagcggaggaagcagataaagaagaggaggaagaggaggaagaggaggaagaggaagctccgttacatgacccaattgcgtctatctcgaactggtggtcttcctctgggtctgccaaagtgacaagtatttggaacaaaactgcagaacaagcttcccaaataaaaaaccgtcttgcacaagaacagctcgacctctcttcgaaaattagcacaaacacaattactgaaatagccagaaacttacaaaaaattgttgttggcgaaactgaagaggtactacgaatccatttagtacacgatctggtcaactatccatcattacagtataacatttga

SEQ ID NO: 4431 - DNA, 759 bp, Saccharomyces pastorianus
atgcaagaaaagctacaagaacagataaacatacaagaaagaatggtcaaacctattgtagcccccagcatccttgcttccgacttttccaatttgggttgcgagtgtcacagagtcataaatgctggcgcggattggttgcacatcgatgtcatggacggacattttgttcctaacatcacattaggccaaccaatcgtcacttccctgcgtcgttccgtaccacgtcctggtgacgccaccaacacacaaaagaaacccaccgcgttcttcgattgccacatgatggtcgagaacccggaaaaatgggtcgacgacttcgccaagtgcggtgctgaccaattcaccttccactacgaagccactcaggatcccttgtccttggtcaaacagatcaaggccaagggcatcaaggccgcctgtgctatcaaaccaggcacttccgtggacgttttgttcgagctagctcctcatttggacatggctttggttatgaccgtggagcctgggtttggtggccagaaattcatggaggacatgatgcccaaggtagaaactttgagagccaagttccctcatttgaacattcaagtcgatggtggtttgggtaaggagaccattcctaaggctgccaaagctggtgccaacgtcattgttgcaggtaccagtgttttctctgcggctgatccacacgatgttatctccttcatgaaggaggaggtttcaaaagaattgctctccaagggtctactagattag

SEQ ID NO: 4432 - DNA, 558 bp, Saccharomyces pastorianus
atgagtgaatcatccatataccaatgtcctccacgggatcatcgctttttttcttcttctcgtccagttttgttgatccgacattctgtatcaactgtatatacatgggtcgcttcccgcaccactcaggttatccgtgcggccaaaaccgtcgtcaaatggtttattatcgtcgacccattgataaattctatactgatcaactatctcacagataggctttgcaatttcgggcgtgcagtattgcaaataaaagagcacaagcccgaggagagacgtctctgcccccccggcgcacagcatatatactctaggagacgcaagcgtccccgtctgcgaatcgtggccatcaagagaaagcggagacgtcgacagcagcagcagcatcgcatcgaacgcccactcacaaacacgtacccgatggaggtccaaatgatcgccgttccgcttgtcttcccgagtacagctgccctggcacgctaccagcagcagcggaatcatccttggtatgatctgccgctgtcggaagaagccctgtcaacctgttgttgtagttga

SEQ ID NO: 4433 - DNA, 174 bp, Saccharomyces pastorianus
atgtctaagataggcgcgtttgatatgcgagaaaaaaaaactttacagaggcttttgtttatatatagaaagaccaagaaaaaaacagtgatggtttcaagtgaggaagtttgtttcccggtcgcattcttggcacaagtcgcagtcgtcgagcccatcatagtgcaacgttga

SEQ ID NO: 4434 - DNA, 1455 bp, Saccharomyces pastorianus
atgccgataagtaacgatacgaacttcaaagttgaacgtaagcccttgtccaattctacttcgactaacgtgggagcggatgtaaatactctacaccacatattacccaaaaatcaactaaggagtagtggaccgatgacagataccagcggtgatggtagtatatcgagtgacgtgaatgttccagtgtgtaaaaattgtttaacttccacaacgcctttatggagaagagatgagcatggtgctgttctttgtaatgcgtgcggtctatttttaaagctgcatgggaaacctaggccaattagtttgaaaacagatgtaataaagtctcgaaacagaaaaagtaatacaaatcatgcacataacttggataattttcggaatcaaacattagttgcagagcttaaaagtgaaggtagtgtagaatcaagcaatcgcaaggtaagcaaactcccagctgacgacaaaaagaaaaaaatctcacatatttcagttgggttggcatccgcaggaaaaatctcgaaaatctcgaaaatggatcaaaaagataaaagcgactctcacatatcagcaacaaaactggaagtgctaatgtcagcagattcttcgaggccgaagttgaaaccgaaacttttgaagcaagaagcgcctgtgcaacaggaaaggctgcttactttcccaagctacacagatatcaaggaacattcggaccctctccttcagtctacagcgactaaagagcggccgcaatttggcacaggatctcttacatccaatgctacgcattcagtagcgtcaaagacaggcgcagattctccacaattaccgcacctatcaatgctacttggtagtttgaatagcggttcagtatcgaataacataagtgagacagtttccagctgcaacaatggaatagtctcaaccgccgcaactttagcaccgacatcttcacgcacaacggactccaacccatccgatataccgaaccaaatcagatccacgatgtcttcaccagatatagtatctgctaagcgtaatgatccaacgcctctatccttccatatggcgtctatcaatgatatgttagagacaaaagacggtagcgcgaaaaccgatgccaccgtatctcattttaaaccgttaatacaatcttccaaagctccatatctacctacagccaattcttcagcgacgtttaatagcgttttaagcttagatgttgcatctgagcgaaaacgaggtggtcatccaactgagagcctaactggcgactatcctttatccgctaaattacacaaagaagaagaaacaataaggctgaagacgagaatcaacgagttagaacttgtcacagatttatatcggaggcatatcaacgaattagatgggaaatgcaaagctcttgaagaacgtttagaaaacgcagaaccgcagaacggatataaaagcagatag

SEQ ID NO: 4435 - DNA, 198 bp, Saccharomyces pastorianus
atggcatctcatgctacaacacttgacagctatgacactaggaaaagaaataatgtgttcgagtcaaattcaaatgaaaccctaacaatccaaatcaaagcgaagacgaaggccataatgggaagtggccccctctgggatatgaaaccgtttccagtgaacctaaatcatcggttcaattgcctaaaccacaaataa

SEQ ID NO: 4436 - DNA, 2412 bp, Saccharomyces pastorianus
atgggtgctcacagtattcgtcaagatgacgaatttaccaccaaggttgttgagcgtacaatattgactgttgttcctgccttgattaagaatagtaaagacaacgaaaaggaagaaactgaatttttactattgagttttaccaccgctttacagcatgtcccaagacacagaagagtaaaactgttctccacattaattagaactctcaatccgatcaaggccttgggtccattccttttcctgatttctcaacaatactcttcagctttagttaactttaaaattggtgacgccaggacattaattgaattcacgaaggctttactcgttgatttacacgtgagtgaacagctatcaggtttaaatgacttactcgatatcattaaattgttgacgtcatcgaaaaaatcatcagaaaagaagaagttattagagtcccgtgtcttattctcgaacggtatcttgaatttctcagaaactgaatttttagctttcatcaataacactttcgaatttgttaataaaatcaccgaggaaactgatcaagattatcacgacgtaagaaagaatttacgattgaaaatatactctgttctgttggatgtaacaagcgatgataaatcaattaaaaagattagagatgaatttgcaatccttttggaaacgattctttcctttattaattccgtggaattgactttttcatccatagcttcacaagaaaacgacgaagcgtcggattctgaaacgtcgttttcagaccatgccagcgaaataaaagaaattttgttcaaggtgcttggcaatgtattgaatattctaccagttgacgaattcgttaacgcggtcttaccactattgaacacatccagtaatgaagatattagataccacttgaccttggtaattggctccaagtttgaattggaaggttcagaggccattcctatagtcaacagtgtattgaaggttttgctcgacagaatgccggtggaatcgaaatctgttgctatatctcaagtaactttaaacacgataactgccttggtgggcaaatatggtaaaaaacttgacggttctacactaacggaggccttgaccctggctactgaaagaatctcttctgatgtgacagaagtcaagatatcatcgctagctttgataaccaattgtgttcaagtgttaggtgtcaagtcaatcgcatactacccaaagatagtcccacctgctatcaagctgtttgatagttctgtagaagatgacaccaactcgctaaaggagcagttacaagtcgctatattgctactatttgcgggtttgattaaaagtattccaagtttcttaatgtcgaatattttggacgtttttcacgttatttacttcgctaatgaagtcgacagtagtattagattatcagtgatttcattgatcattgagtttattgatttgaaggaagtattaaaggtcttatacaaaatctggtcgaccgagatatcaacatgcgctgataccgttgctgttagtctgtttttaagtacagtggaatctaccgttgaaagtatcgataagaaatcagctacttcacaatctcctgtattcttcaaattgttactatccttattcgagtttagatctatttccacctttggtaataacaccattagtagaatagaggcatctgttcatgaaattgcaaacgcatatgttttgaagatgaacgacaaggtgtttaggcctctgtttgttctattagtgagatgggcattcgacggtgaaggtgtcacgaatgtaggtatcactgaagtggaaagattgctagcgtttttcaagttcttcaataagctacaagaaaatttgagaggtatcatcacttcctacttcacgtatttgttagagcccaccgatatcttattaaagagatttgttgctaaagatatagaaaatgtcaacttaagacgtctggtgattaattctttgacctcctcattgaagtttgacagagacgaatactggaaatccacatccagatttgaaatgatttctgaatccttagttgatcaattgtccaatatagaaaactctattgggaagtacttggttaaggcaattggagctttagcgtctaataatagtggtgttgatgagcacaaccaaatcttgaacaaacggattgtcgaacacatgaaggcttcctgtacctcgactgaaaagctatgggctgttagatccatgaaattgatctactccaagataggtgaaagctggttggttcttcttccacaacttgttcctgttatagccgagctgttggaagacgatgatgaagaagtcgaacgtgaagtgagaactggtttagtcaaggttgttgaaaacgtcttaggggaaccttttgacagatatttggattga

SEQ ID NO: 4437 - DNA, 1191 bp, Saccharomyces pastorianus
atgtctttgctaagtgaccaattagctcaagttgcttccaataatgctacggttgcgttggatagaaaaagaagacaaaaactacattcagcttctttgatttataactcaaaaacagccgccacacaagactatgacttcattttcgagaatgctgttaaagcactagaagagttgactcaaattgaaccaaagttcggtgttttctcaagaactttgttttccgagtcttctatttctcttgatagaaatgtgcaaacaaaagaagagattagagatttggataatgctatcaatgcatatttgcttttggcttcttctaaatggtatttggctcctacgttgcatgcgactgaatggttggttcgtcgtttccaaattcacgttaaaaacacggaaatgctgcttttatctaccctcaattattatcaaacgcctgtcttcaagaggatcctgagtattgttaaattaccagctctcttcaactgtttatctaacttcgttagaagcgaaaaggctccaacaagtttgaccatggtgaaacttttcaatgacatggatttcttgaaactatacactaactatctggatcaatgtattaaacacaacgcaacttatacaaaccagcttctgttcacaacgtgctgttttatcaacgtgattgctttcaactctaacaatgatgacaagttgaaccagctcgttccaattttacttgaaatttctgccaaacttctagcttcgaagtccaaggattgccaaattgctgcacacaccatcttggttgtgtttgctactgccttgcctttgaaaaaaccaattattttggctgccatggaaactatgctctcgaatttggatgataaggaagcaaagcactcagcgcttgtcacaatctgtaagcttttccaaacgttaaaaggacaaggtaatgttgatcagctaccttccaaagtttacaagttgtttgacagcaaattcggcacagcatctgttatagcgttcctagataaggcggataaaccagcttgtgacaagttcatcacctcctatactagagctattgcaagatatgaccattccaagttgaattctattctaaatctattaaagaacataaagctagagagatatgaagtcaggctgatcattactgatttgatccacctttccgacattttagaagaatag

SEQ ID NO: 4438 - DNA, 768 bp, Saccharomyces pastorianus
atgatagattttgttctcaacgctctaaactcggattatgaacagctggctaacttggctgcggaaagacttatcagtgtattcccttcactaagtaatgctcaaaagctaagaattgtccaaaatatggtggattcatctaccaatgtagaattatcatatgatacagtcggtgtattgcaatcgttacctctcgatgctgaaatttttgtatctatactgaaccaaaatagcatctgtaacgagatgaatcaaaccgatttttccaagagaagaagaagacgctcatcaactagtaaaaatgcattcttaaaggaagaggtgtctcaactggctgaattacacttaaggaaattgacagtaattttggaggcactggacaaaatcaagagcgtaggttctgaaaaacttttgtccactctgttttctttattgtcagatttagagaccctggaccaagacggtggattaccagttttatacgcacaagaaactttgatttcctgtatgctaaacaccatcacctccttaaagaataatggttgtacagagctaacaaatataagggctgacatattagtgtccgctatcagaaattcgccatcccctcaagttcaaaacaaattattacttgtaattgggtctcttgctactttgagcccagaagttattttacactccgtgatgcctatcttacttttatgggtgctcacagtattcgtcaagatgacgaatttaccaccaaggttgttgagcgtacaatattga

SEQ ID NO: 4439 - DNA, 1269 bp, Saccharomyces pastorianus
atgtgcagggccctcatgatgtatggtgcccccacacacagactcgaggaatatatgattatgacctcaagagtccttgaaatagacggccagtttctgtatcttccaggttgtatgattgtctcatttggtgacgccacaacaagaacatctgaagttcaattagtgagatgcaaccaaggtttaaacctttggaaactacaccaggttcacgccatttacaaaagagttgtccatgatactatgggtgccgatgaaggtaattccctacttgatcagatattggcagacacgaacttatacccaccatgggtgtgtgttttattatatgcattttgttctgctatggtcactccatatgcctttggcggtgattgggtgaacttggcaatctcatttttcatgggtctttgtgtagggtctttgcaattcattctttcacagaaatcctacatgtactcgaacgttttcgaaatttctgcatccattgttgttagcttctgtggtagagctttcggctctattcctcattcaaatatctgctttggtgccgtcacacaaggttccctggctctaattcttccaggttatataattttgtgcggcgctttagagctacaaagtcgtagtctggttgccggtgcggtccgtatgttttacgctatcatttactccttgtttttgggtttcggtatcacgctgggctcagctttgttcgggtggatgtataccaatgcaacaaaccaaatttcgtgtcctcaaataatttctccgtggtttaggtttctcttcgtccctgcatttactatcagtatatccttattgaatcaagcacacatatcgcaattgcccgttatggttttcatatcttgcagtggttatgtcgtgacatactgggcaggtaagcattttgaaaactctacagaatttactgctgctttggctgcattcgttatcggtgttatgggtaatttatactctagaatttggaaaggtttagcagtatctgccatgttacctgcaatctttgttcaagtgccctccggtattgcttcccaaaactctttactttctgggctacaaagtgcaaacacgattgttaatcgtaatggaagtactgccacctccagcacatctgacccctcatcttcaatgtcattcggtatgacaatgattcaagtgtgtgtaggtatttctgtaggattatttgcctcatcgctctttgtttatccctttggtaaaaagaaaactggtcttttcagtttatag

SEQ ID NO: 4440 - DNA, 903 bp, Saccharomyces pastorianus
atgactacgccaaatataactaccaaggataatgacagtgtacggaaaaaatcgaaacctgaaaaggtagtagtaccaggccactttcttaaacctcttctgaatgaaataacctcttccaatgatacagaattcaaacttataacagcatcaaaatataaggacaagtatgtcaaaatgtttatcgatagccactatgatgacgactgggtcgtatgctctaactgggagagctttgaatcggtggacattgatattaaaaaatcttcgaacgggaaagactttggtgtattcatttcaaagtcttgtgttaaaggacagctgattcaagaatacctaggcgaaattgactttcagaaaaattacctgacaaacgcaagtaacgattatcgcttgatgggtacaacacaaccaaaagtactatttcacccacactggcctttatttatagattcaagagaggtgggtggattaacaaggtatgtaagacgaagttgtgaacctaacgtagaattgataactgtaagaccgcttaacgaaaggccaagaggggacagtgactgtagggtcacgtttgtcttaatggctacaagggatattaaaatgggagaagagataagccttaaatggcaatgggatctaaggaatcctatttgcgagttgataaatgcatctaaagacttggataccctaccagatcttgacaagttttggttgatgggttcgataaagactattttaacaaattgtgattgtgtatgtggatataagggccaaaactgccctataactaaaatcaaaaagttttccgaaaaattcacgaaaaatacgaacgaaacactatctagcaaatcttactttaatacgataatggacaattgtaagaaacgtgacgagttttaa

SEQ ID NO: 4441 - DNA, 810 bp, Saccharomyces pastorianus
atgacttctccagaatcgctaccttctcgtcaaacaaggcaagggagagcatattctactaccgataaagttatatcaaggtcgtcttcatattcgtcatccaacagttcgatgtcaaaagactatggcgatcatacacctctgtccataagtagtgcagcttcagaaacactaatatctcctcaatatatgcccgtgagaacattcaacccaatggctacagctggtccaacacctatgcatttgcttcaaaatgaaagaagtgttttcggccatcattcttcatcaaacgcatctaatactatatcatcgaataaaagaggtatagcagcggccgtagctctggcaacagcagctaccatcccattcccactaaagaaacaaaatcaaaaccaaagttctaaggtccaggccactcataaagaaccaacgggaaaaagcaaaacaccactaccattgactgttgaaaataacaaacctgttagtgcgtgtatctgcggctcaagtgaatctaaggatgggttgtttatacaatgtaacaagtgcaaaacatggcagcataagctatgctatgcattcaagaaatcagatccagtgaaaagagactttgtttgcaagagatgtgacacaaagacagcattacagactggacaggcaaaaccaatgatatttcccagaaaaatgggagatcagcgcctgttccagttttcttctatagtaacaacatcgattctacacgcagagcaacaacaacgacagatggtgaatggttcaaaagcacaatccagaaacgtcatcttgaatgtatga

SEQ ID NO: 4442 - DNA, 999 bp, Saccharomyces pastorianus
atggaaaacgctttggacacattaatcactgaggattccagtctgtcgattactaaaaacgaagagactggtcaaactgtcttaaatggtatgggtgagttacatctcgaaattgctaaagatcgtttaattaatgacttgaaagctgacgtggaattcggtcaattgatggtttcttataaagaaactattactctcgaaacaaatctcgaaacatttgaaaacgataacgactataagttctctttatctgtaatgccaaacactgctactaactctgattgtgctacatatccattgggaattaataacaattatctattaatggaaaagaacaccaaatatgatgataatgaatggaaacttcaagtttccctagaatcgattataaattcaattatggcaagttgcattgttgggttacaaagaggggggaagctggccaactttcctttgtacgggtgctcaatcaaaattaaaggcgattggactttaccgttagatattgaaggtccccaagaaatcttaaaaatcaccagaaacctaattctcaaagctcttgacgatttaccaaccaataactatactcttttagaaccggttatggacttgagtcttattattcctcaatctgatgttggtgtagtattacaggatttgacaggcgcgaggaaagctcaaattctttctatcgaagatgaatcttgtccgatatcttcggatccatcccctaatatttctacagataatcataacaggatatatgttcctcctgatatcagttctaccttacacactatcacaggtaaaaagaatgcgcgagacactaatattaatctgaaaaaaatcataaaagcaaaagtgccactgagagaaattatagcctacaccagtaagctaagaagcctgtcacaaggaagaggcgagtttaatgttgaatataatgatatggacaaagtcactaatgatcgcttacagtccattttaaacgacttataa

SEQ ID NO: 4443 - DNA, 2226 bp, Saccharomyces pastorianus
atggacttgttttggcgttctgaaaccaaaaagcagaatgaagcacctggtacggattacacgtccggtagcccactccaagttcaaaacaatggccaatccatcaaccggaacatattccacggttgtccgcgcattttggaaaggaagtttggcgaatgtttgcatcacagaacacacgtaatcagggattttgtttcttctggtaatgctggattaggtcccgttgagatagtccatatgtcctactcgaataaacaggaaaaagaagaattcggtgaatacttctatgttactggaatcgaagtttccagtccttcaataccagtagaatttctcaagctgttgaaatcggatcagcgaatttctaaaaatatctcaagtgacatcatatccacttattgctgtttcaatttcttcagtaatctggacattcgtatcagaaataatgctgatggtactttccaggcaaaagcaattgactgtgatagggaaactaccgacttgacaatgacagaaaaaatgtgggaggaaacattcgttagttccgttatcagaaccattataataaacaccaacccaaagttgaaacctcctggcctgttagaatgcccattttacatcgagaaagatactgtaacctcctgtaaaaagattattgaattattgtgccggttcttgcctcgttcattggagtgtggatgggatagcaccaaaagtacgcaaattaccattgtgaataactatttagtgtatagcttaaaaagttttattaccatcacacctggcttgatagattctaccattgattacttgaaaggacttaccaaggaagatccaattcataacctacactataaggtggcgatgattgtacttttaaatcaagtacaaacaagagagctagaaatggtaaccattctaaatgaaactttggatccacttttattactgcttgatgatttaccacctagtgatgcaaattcagcgcaattaatgaattgcatgagcgacttattaaatattcaagcgaactttctgctaaacagagaagattatgaactagcgttgagtgtttctaatacatcgactgagttagccttagattctttcgagtcttggtacagtttagccaaatgtcacatcaagagggaagagtatgatgaggcgctttttgcaataaattcaatgcctcgtttgcggaaaacagaccaggttacggaagcactttataacaagtctcttgcctccaactattataaaaaaccattaaatggcagtcaggaatacttcggcataacatcaacagagtttaccaatctttacgggacgttgcgaaattggaaagaagatgagttgaaacagcaaatattcggaagaattgcgatgactaatgaaagaaaggttggctataccaaagatatttgggatgacattgccataaagctgggccccatttatggtccgcaatcggccaacttaatcaacttcgtctcacctcaagagatcaagggtataaaaaacatgaacttaatagcaaggaacacgataggcaaacaattgggacagttcaatagtcgaatatatggattattaatgaaaattgtaaacaagattggttggaatggactactaaacatccgaacaaagatctttataatggaaactgaattctaccagacgcctgccaaaataaccgacgaaaatggtaatatacctatggaagctcgaaagaaacggttctgtgagcgttggctagatgatttgtttttggatctgtatcaagacctaaagttgagcaaaatcaacctaaacaataaagacgaaaaacacagcggattagagtgggaaattttgggcctgaccatgcttcgcacttggcattgggaggatgcggtagcctgtctcagaacaagtatagtagctcgattcgaccctgtcagttgtcaagaattgctaagggtatacctgcaccctccagaagacctttggaacgccacactgctagacacagacacagtagtagaccttctggccaagaaaatatcgtacgactgcagatattacaactactgccagattttcaatctgcaagtactacacaaactttgcgaccagctgggaatggatacagtgcgcagcaagattctcattctatccagcgtcggagatgaaatgatggtcatggtcgacaccatgatctcgtgggtaggtgacctacactag

SEQ ID NO: 4444 - DNA, 486 bp, Saccharomyces pastorianus
atgctacaattgaaattcataaggccggtggccaggatgacacctatatttaggccacttacccattattccttcagaactttaactacgacgtcaaaaattgcgaacacagaatctgagagcccccgtccagatacgaccccactaaaactatcaaatgaattgtatgcagtgttcaggattcacaatcgcccatatttagtgacagagggtgaccgggttattcttccattcaaattgaaacaagcagaagtaggtgatgtactaaatatgaccgatgtaacgactataggttcccgcaactacaaactcgttgatcatccgattgatacttcgctgtatactttaaaagcaactgttgtggagaagactaagagagcctttcaaagtagggaggtaacgaagaggagaaataggcgagttcgtcatgccaacagcaaaggtgatctgacaattttgagggtatccgaactgagtataaattga

SEQ ID NO: 4445 - DNA, 864 bp, Saccharomyces pastorianus
atgtgtaacgttactacaggtgaaatgatggctgttaaacaggttgaagttcccaaatatagctctcaaaatgaagctattttaagcactgtggaagcactaagatctgaagtttccactttaaaagatttggaccatttgaatattgttcaatatctaggttttgaaaataaaaatagtatctacagtttatttctagaatatgttgcaggtgggtcagtgggatctttaattagaatgtatggaaggtttgatgaaccgttaatcaaacatttgacaacacaagtgttggaaggtctggcatatttgcactctaaaggtattcttcacagagacatgaaagcggacaatttgcttttggatcaagacggtatctgtaaaatcagcgattttggtatttcaagaaaatctaaggatatatactctaattcagacatgaccatgcgagggaccgtcttctggatggctccagaaatggttgacacaaagcaaggctacagtgcgaaagttgatatatggtctttgggatgcatagttctagaaatgtttgctggtaagcgtccatggtcgaacctagaagttgttgctgcaatgttcaaaattgggaagtccaaatctgctccgccaatccctgaggatactttaccattaataacacatgttggacgaagctttttagacgcttgttttgagattgatccagagaaaaggcccactgcgactaaacttttgtcgcataaattcagtgaagtagatgtaacatttgattttaaatcaaccaggctagcgaagtttataaagtcaaatgataaactaaacttttcaaaattgagaataacctctcaggaaaataaaactgcatag

SEQ ID NO: 4446 - DNA, 3501 bp, Saccharomyces pastorianus
atgccatttctgaggaagatagcaggaactgcacatacgcactctaggtctgattcgagctcatcaatcaaatttggtcatcagccgactaattcgctcggatcaactaaaagtacaagcaaaagtccccgagtaacgtctcgaaaaagcatttatggtgatattaaaaaccaatttccaaatgcagcccccaatagtacttcccagttgtacgaaaccacaccagctactgaaaaatcctttaattggactacggatgaccacatctcagcaacgactgttgaaaccccgacgagtgttacaagcacattttataaaagtgaaaacagaccggggagcttttctgattccaggaagtcttctggtggtaatagtgtaaatagcttatcgtttgataagttaatactatcgtgggatcctacagacccagacgaatggacaatgaaccgcgtcacttcatggtttaaatttcatgatttcccggaatcctggataactttcttcaaaaaacatcaattgtcaggccataggttcattaagctacttgcatatgagaattttgctgtttatgagaagtatttgccacagacgaagaccgcttcatataccaggtttcaacagttattgaaaaagacaatgaccaagaatgtaacaaatagccacattcgtcaaaaaagcgcaagcaaattgaggggttccagatcttctagtgaatcaattaaatcaaaattcaaaagtagtagatcgcaagaagatatttcgaattcaaggtcaacttcagagtcggaattaagcccaacaaaatcaggtccctccaagacagatgaaaagaattttttacattccacgcaaacccatcaaaagactaaaagtgcaagtgctttatacagaagaagctttatatctctaagaggctcatcatcaactaatgactcctcaataaagtcgccttcaaatatcaaattaagtataccggctcggccacattcaatcattgaacctaacaatacgctcaccaagtcagctagcccacctgcgtccccttcataccctagcatttttagaagacaccacaaaagtagttcatcagaatcttcactattaaactctctttttggtaccggaataggcgaggaaccatcaactaggcctaattcacagggccatagcatctctagcgaaaacctggctaaagtgaaaactaaacactatgaaaccaatgtttcctcacctttaaaacaatcttcgttatacacttcagatgataagggaaatttatggaacaaattcaaaagaaaaagtcaaataggagctccaagtttaaacgcagctcctaatatgactcttcaggcgaccccatcattaaaatcaagctcaagtactaccactttaaccacacaaaccacacaaaccacacaaacctcacaaaccacacaaatcaacgaattacctgtacagtcatcatcaccgtcaccgtcgctaatatccaaaaatgtgaatgaaaatttagaggccatgagcacggaaggtgtatatgaacgcccttcaatagcagcaccttctagattaggtcatgattattacaactcagacgaggtaattccacagccagcaaaaagtcatccttatagtgtaaaaaactttttgctagaacaaaaattttatcctatgaagaagaccacatttggtggtagcgataataagtatgtcttggttactaaagataactggcattttgttccagtaaatttacagaatgtgacaagtttatatagttttaaggagtctgccctctcaaaactgggaataagtcataaaaacgtcacgttccatatgacagattttgattgcgaaattggagcagctcttcctgatgatactttagaatttttaaagaaaattctatttctgaacacatctgaaaaaatctatgtcaaggatcaaacaaaacttctgcagaaatcgaagtctattgctcataattcagaaaaccatgctcccttaaaatccgtgaaaagtaaaagctcaatgagatcaggaacaagtagtttgatagcatcaactgatgatgtctccattgtcacatcttcatctgatataacgtcgtttgatgagcacgcctcaggcaccgggcgtagatatccacaaactccaagctactactacgatagagttcccaatacgagcacaaatgaagagttaaattactggaatattaaggaggttctttctcacgaggaaactgcaccaaaaatggtattcaaaacaagtccaaaattggaactcagcctgccagacaaagcaaacaaactgaaaatcccaacgcccatcacagaaaatgaaagtaagagtagcttccaagtactaaggaaagacgaaggggccgaaatcgatttcaaccatcgcagagaatcgccttatacaaaaccggaattagcaccgaaaagagaggctcccaaacctccaacaaatacttctcctcaaaggtcactgcctagttctaaacagaataatacaatgcgcctaatgagggcaagtacaaaaatttcgagaagcaaacgatccaaacccttaccacctcaactactatcatcccctgtagaggctagtagttcgtctcctgattccgtcacttcttcttacacccctgcttcaacacatgttttaattccccaaccatataagggtgcaaacgatgccatgcgcagattaaaaacagagcaagactccacgagcacatccccatccttgaaaatgaaacagaaagtgaatcgatcaaattcaacggtatctacttcaaactcaatcttctattccccctcacctttattaaaaagaggaaattcaaaaagagttgtttcttccacgtctgcagccgacatatttgaagaaaatgatataacatttgcggatgcgccgccgttatctgaggacgatgatgaaagtgataacaacgactctagctcctccgacgatattatatggtccaaaaagaaaaatggcatcgaggataaagaaagcaaaaaggatgaaaaagatgataatgattccacgcattctgatgaaatattttatgattctgaaatgcaagacaccgtagaaagaaaaatgacttttagaccatctccagaagttgtttaccagaatttggaaaaattctttcccagggctaacctcgataagccaataactgaaggaatagcctcccctacgtccccaaagtctttagacagtttactttccacaaagagcgtaacctcacccagaactgatccgagcacgccttctcgtcctatacctccagatatcctcaacaattcgtatgagctaatccaggatagtattagcaatagaaataaatcattgaatcaaactaaagctcctaaaaggacaaaaactataagaacaattgctcatgaagctagcctagcgaggaaaaaatctgttaaactaaaaagacagaatactaaaatgtgggggtacaagaatgggttgaagtga

SEQ ID NO: 4447 - DNA, 2025 bp, Saccharomyces pastorianus
atggagagaccggatcatgggagccagcctcaggttgttgaaccacgtccagatgctacaatgagagaagccgatcgtattggcgcagaggaactaaaggagtcattacgatttcgaaatgaaagggtcagtatcatcaacgcagacccttcgtcgaccttctttgtcttttggtttgtggtttcgtgctattttcccgttattgttgcgtgtctgggcccggtggctaacaccatctcgatagcctgcgtggtggaaaaatggagatccgtgaggagcaactctgtggtgatgaactcacagagtagcgacacggacgctgtaatgaaccaggttaaaacggtttttgacccccctggtatcttcgctgtcaatattttgtccttaatctttggggtcacgtctaatattgttttgatgctgcattttagcaggaaactgacgtatctgaaatcccagatgatcaatatcaccggttggacactagccggtggcatgcttttgatggatgtgattgtatgctcctcacacgaaatgtccagttattacaaaaagactattggattctggtttgcctgttacagttctggtttgtatcttatctgtactatcattttggcggtgcattttattggttacaagttacaaaaataccctccgacatttaatcttttacccaacgaaaggagtattatggcattcaccgtgctcctgtctatatggttaatttggggtggaggtatgtttagcgctctgttacacattacgtatgggaattcgctctatttctgtactgtgtcattattaactgtaggattgggcgacatcttacccaaaacggtggctgccaagatcatggttttaatcttttcgttaaccggggttgttataatggggttaatcgtatttatgacaagatcaattatccaaaaatcgtctggacccattttcttttttcatagggttgaaagcgggaggtccaaagcttggaaaagctatatggacggtaacaaaatatcatctcaaaaggaagcgtttaatttgatgaaatgtatccgcaggacggccacgaggaggcaacattggttttcattgtctgtcacgctagccatcttcatggttttttggttgttgggagctcttgtcttcaaattttcagaggattggtcatattttaattgtatatatttttgcttcttatgcttattaaccatcgggtacggcgactttgctcccaagtctggtgcaggtcgcgcttttttcgttatatgggcattgggtgccgtgccattgatgggtgctatactatctacagtgggtgacttgttgtttgacatttccacgtccctggatatcaagattggtgactcctttaataataaaatcaagtccatcgtttttaatgggcgccaaagagcactctcctttatggtgaacacgggtgaaattttcgaggaatccgatactagtggggataacgtgggagagaccccgacaagctcacaatcctgtgacatttcagaggatggtgacgaaatttcaggtgacagtgatactggggtaacacctcctccggcaactccacaggaatcattatctactttatcaaaagcaactagtccagagggtatatttcctttggagtacgtttcttctgcagaatacgcgctaggcgattctgaagccagcaacctaaagaaattacaaatattacttaaagctgtgaaaaaattacaccggatatgcctattgaataaagattacacgcttaccttttcggattggtcgtacattcgccaactgcatttgagaaacgctccggatgtcgaggggcatacaaggggcccagaattctggatatcgcccgacacacccctcaggtttccattaaatgaacctcactttgcctttatgaccctatttaaaaacatagaagagctggtcggcaacctggttgaagacgaagagctatacaaggtcatcgccaagagaggcaattttggtgatcatagaaagacactttaa

SEQ ID NO: 4448 - DNA, 1473 bp, Saccharomyces pastorianus
atgtcgacgttaaaacaaagaaaagaagatttcgtgacaggcctcaatggtggttccattacagaaattaacgcagtgacatcaattgcgttagtaacttacgtatcatggaatctattgaaaaattccacctttttgcaatcaaagacgcccaacgtacaatatatcattgattttgcattgaattgggttcctttgctgttatcaattactacttatgctagtgatccatatcttttaggcttcttaataatgattccttgtgtgtccacattcatctacggaagatttaccagctcaagcaaatcttccgctaaagtacataaaaggaacaacttaacttcacagcagttccagctggaaaagaagccttatattactgcttaccggggtgggatgcttattctaactgccattgccatcttggcggtagatttccccatttttccaagaagattcgccaaggtcgaaacttggggtacgtccctgatggaccttggtgtgggatcctttgtgtttagtaacggcattgtttcttctagagcactgctaaggaattcaggcttgaaggataaacccagctttgtaagaaatgtattcaatgctctgaaatctggtggagctctattgtttttaggcttaatgaggctatattttgtgaaaaatttggaatatcaagaacacgttacagaatatggggtacactggaatttttttatcactttggctttgttaccacctgttttgactcttattgatccccttacaagaataattccacgttgttttattgcgacattaatctcttgcatctatgaatggctattattgaaagacgatcaaaccttaagcttcttaattctagctgatagaaagggtttcttcaatgctaacagagaaggtatcttatcattcttaggctattgctcgatctttctttggggtcagaacacagggttttacttattaggaaataaaccaactttaaacaatctttacaagccttccacgcaagatgtgactactaaaccgagaaagccttctgcttggaaccgttggacttcagtaactccattaaccggcctttgtatatggagtgcaattttcattctcattagtcagttggtcttccaatatcatccttataacgcatcaagaaggtttgctaatttaccatatactctatgggtcattacgtataatttactgtttttgactggatactgcataactgacaagatttttgataattcatatgaaacttataagattgcagaatcgttggagtcaatcaactccaatgggttgtttctatttcttttagcaaatgtgtctacgggtttggttaacatgtcaatggttacaatagacgcttcacccatggtttcacttttggttttgcttgcatattgtttattcattgctgtcgtttcagttttcttatatagaagaagaatttttattaaaatatag

SEQ ID NO: 4449 - DNA, 468 bp, Saccharomyces pastorianus
atgtgggtttctaacaggtacctgtatctacgcctgctaccttggtggcccactctcactaatgaagacaatgagctcaatctacaaccattgaatctaccgcaagatggactgatgctgaatttagtcgttaaagatatatggaatcgatcaaacttacccacagaccttctcatacaagtatacaacatggtggacacaagaaaagatggcaccttggacagaaaatccttcatcgtgggcatgtggcttgtcgatcaatgcctctatggccggaaattgacgaatgagctggaccagagagtctggagtagcgtggacaatcatatccttggagccattaacccgcaaccaacaaccactgatcaccaccacattgctgataacgtcctggataagccatcgagactcaccgtacgacaggaattgaaaaacattaaacgcgatcttaggaacgttcgaatatga

SEQ ID NO: 4450 - DNA, 1143 bp, Saccharomyces pastorianus
atgttattctccaagaaaaagcactctggaaaccacgccgtggtggaattgccgaaggaagctctgcgagattctttagttgctgcacaaatcaccttcaagcggtacgctaaccccgataccagcggcactgagaggccgggacacttgcaggtggcatctgcacctgttgttaagaccgaggcatctttgccaaggttaaggcatcctgaaccgaggactgtgcgccatcaggacttaagggaagcgcttgccagccgtactgaaattgcctctgtaccgacgacccccctgggagtgggccagcgcgacatccaaagcagagcatcgaatttgccaggaaatcttgccgctgccgaaactgctgcgtatttggcccattcaggctcatttagcaacagaccatctccggtcaacggccgagatctggtcgatgatggggaatctaagccgccgcgtactccttctgcactgagaagtgagttacagttaaacagagctaggatccccccaccatcgcatgatatttccgagcgctcgcgttctatttcaccgcaggtatcttactctacttctctgtcatcgtcgtcttctttcatttccgatgaagaagacacgtcttatagagaacgaagcgttgacgaggtgcttcctccagagctctccgtttcttcctatagtctcgcatccagggtctcggaaaagccctctgaaacctcacagcaaccgcgagaatcggactacactgcaatgaataaactaaatggcggcaacataatctacaagggcactctgcctgatctaataccaagaagccaaagaaaaataggaaagccaaggcttaagaccaggcttttaagatcttcggatagcaacgaatacaacaacaattatcgccaacaagaaagtttatcgcgtatatactcgaaccagcaacagaacggtaaggcgattataaacacccaaaaaaatgtgaagttgaagactaccatgaggcgtgggaaatacgcaattacggaaaatgacgaaactttcccttatgataaaaggccttctgatgtgtcatccgattcagatactgatgacgaatctgattcaatgaagattgaggaaaaaaaaaaaaaaaccgccgttccaaattaa

SEQ ID NO: 4451 - DNA, 1767 bp, Saccharomyces pastorianus
atgttgttcagcgaaagtatgatggaagcggccaaggctttgttgaaattgaggagagcttatacaatgttacaagaaatcatgatcactgtgaagagagctgaacgatcgaagaactcgagctctccctctccaagtgagaatagcgaacagtcatgcggaagtttcgtttcagcagagacaaccttcacgtctgtagacattccgtttaagctatcccccgatgataaatcaaaccctcagcttttagaatttgcagaaaaaatttacaccatgagaatgggaagattatcaggttctcacatcggcaacaccccatctttcaatagattaagagatgatctgggtttacagaccactccattacaagcttccgatcaccaatgtgctccagatgatttcgatttggaacaagccaccattgatgagtttatccattcgggggctaatttatgttacggtatcttacaagtcgtcttatccttactgccaccagcgattggcgctgttttatccattgtcggattcaaggggtcccgtgaggagggtttgaggctagtctggaaagctacaaaagagagaaacgttcacggttgtattggcctattgggactaatgttttattacgatggtcctttccaatttacggacgctgatttcgacattccagcgggcgataatacatcaagaattctaaacaaaagtaagactaatgatagtagtaccttaccagattatatggatagttcaactctattacatccggggaaaattttagaggattctttattaagagcgagggcactgtttcccaatagtgctttatggttgttaaacgaggctaaaatgctttctggtaagggtaggcttcgtgaatctcttgccctaatggactctattgatgtcaatagtatccgtatgagacaagtgaaatcgctaatggtgtttgaacgtgctattcttttggttaacctacacgaatacaatagggccgccgaagatttaataggcctgcttgatattagtgattggtcccatgcgttgtatacttatttcgcaggttgttgttatttggagaattggagaatgacccaattaggattattaaatgatggtaaggaacagttttataaagaaagagccagagaactcatatttgacgcaccatctctgttaggaaagaagaccttcaaatcgaaaaacctaccattggatagattcatgctaagaaaagttcagcaatttaataatatgcaaaagaagctgaacctgaaagaaccactagattcaatagcaacatctcctgtccatgaactatcctatttctacaacggttacaataggatgactgaggatgatttgattttaaccaaaaaaatgttaacggagtatcataatcctgccatcgactccgaagatcctgatcaagaattgatcaggaacctattactatccctgactttgaggaggttgggcgatgccgaaaaaggcctggccttgttagacgaaattgttttgccaaaaatattttacatccaaaacggtaaagtgaaatatttcaaaaaaaatgaagacccatgggcatatccagctgctctttacgaaagagctttattctgctggaaactgggtggtatgggaagtttaaaagaaagcagagaatggttactaagggcccaaaattacgctgctgattatgaattaagtacacgtatcggtatgaagatcaaagctgcccttgatagagttgaaaacgcacttgcttga

SEQ ID NO: 4452 - DNA, 519 bp, Saccharomyces pastorianus
aatacacagactacagaagtaaccacttctcgttccgtggcaagccaaactgcttcatcttgctctactaccaccaccactaagccagaaaacgacgaaactaattcttctaccatctacaccaactctaatgcagcaaccaccatcatccccggaaaaacatctaaagctagcgttgtcaccacatctgaaaagccaaacgaaacaaccaccgccaaatccaattcgtaccacaacggcacctccgccaccgatgccggccaacaaacggtcacatcgtatgccaagacctccaacgccggcacaggaataaccagtggcaacaacattcgttcaaccacaacccaaccaaagaactccgccacgcgccacccaacttcgtcgatctacacccaactaaaagacggcacatccaccaccgcaaaattatcttcatacgaaggtgctgcagcactgggatcaagcaacctgctaggaacgattaccgctttcgtcatagccatcttgttcgccttctag

SEQ ID NO: 4453 - DNA, 849 bp, Saccharomyces pastorianus
atgagtaagcaattgaaagcaaacaaagttgagatccagaatgaggcaaaaaccgcaaataacacaatcaaagacaaaccaaaacttgccaagccaagtgcgaatgacaaattaaaggatttgaaagccaaattcaccaacagtaaatcatttgcgccagcgggtctagtttctaccgaaaaaaaagattcagttttaagtaatgaagactccgattcctcaggttcttcaacagaagacgaatccagctcgtcctcctcatcctcttctgatggggaaacttctacatccaggaagtccagaagagttgttgttaacacaccaagagagccggttaggtcttcgtcttccaaaattgacgcagtaactccatcgttgagtcaaacaaagaatgccactcctaataaagttccagttacgcagttaatggatatgtcctctccaccatcagcaaaatctagaactccttcaaaatcttctagtattcttcacgatcttccaagaaaggtacgtccatccctgagttcgttatctgacctcgtctcaaggggaattccagacgtcaaggaaaaaagctctaaatcgattggtaaaccacagcccaaagttgcctcgagtagtgacgatgaatcgagccctagttcaggttcagactccagctcggattccggctctgagtctggctcggattctaatagtggttctggtctagattctgatgattcaggtgattcttctggagacggaaaaagcttcatcagtgccaaatctgccagtgctgctctaggtaagaaaaagaaaccaagtggtggatttgcatctttaataaaagattttaagaaaaaatga

SEQ ID NO: 4454 - DNA, 2406 bp, Saccharomyces pastorianus
  modified_base (2372)..(2373): a, c, g, t, unknown, or other
  modified_base (2382)..(2383): a, c, g, t, unknown, or other
  modified_base (2399)..(2401): a, c, g, t, unknown, or other
atgtacaaactacaagtggtcttggtgcccccgagcctccaggcgacgacgcccatgcagtttggatacgggcccacggttgccgagtcctctcaattgctgcctaacagaaccagcatcgcgcaaagtgctggcgacgcttctttgcagtatgccaacatgaggtctgctagcgtgagcttctccccatcctacttcaaccaatccaggttcaaaaagtttcttttgtttaccaagcctaccaacaccctgttgaatctgagtgatgaaatcatcgataaatgcgaaaagatgtacccgagcctacaggaggacatcgagattttaagtttgcaggacaacaccggctgcgatttggacccagatttcttgataaaggatgttttcaacatcaataacatcgtgaaggtcattctgagaaacgaaatagacctggacgactccgcaccagtgtcgctttacagatctgtaaaacgctctaaaatgaacaacgggtcgccccgcccggtacagccgcagcagcaaatctcttcctcttccggggtccttaggattgcaaagaaaaggccaccgacatcaacaacagcaacaagcaccattcgcagtggcaccaacggatccatgaggatctccactccactggctagacagatctatcctccgccttcctccaaaatgatgtccaacaactctgacgacgaagaagaagaagatattggcgaaagatccttcttgccgcccccaacccagccgcaatcgcctcccattagaataagttcgggcattgacacgggaaagaagatcagatcaagcgccgtcgaggaagatatcgtatccagatcagaaaccgtggatccagacaaatcaaaacaacaacgcctattgtccggaaccccggtaatgtccaccatgacccccaacagagttactttgaccggccaacgagtggtgtctgagcacgcccaaaagaatgaattggtcttttcagcctccgcttcctcttcctcttccttcgctgccgtcgctctcacagcctacgactcaaacaagaaaccacctgctacctctccaagaataacatcgggcatgttaagaatccctgaaccaagaatctccgagattgaaaaagaactaaaggagggtccttccagtccggcttctatcttgcccgccaagagcgccaagatcccaatgaaaaaaccttacctagaaaacggtgacgattatgaatctgatgaaagctcaagtagtggaacccaggaaactccagagacggagccacattcaaaggcttccttgcaacgcagtcaaagttctatcgcagataacaacggctcccccgtgaaaaacagccccctgggtgatgccatgccacataatgttcatctcgcagaactgcccaaggcaagcagtcccgccaacgtcaaatcttctaatggccaactccccacaaaacaacaacagaggaaaggctcgctggagacaatagtggaaagaaaaatgcgcaaggatcttgctgctacagcggaaccaagaagaatgaacgatttcccagatgacagtcaaggaaaggaagatggagattcaaacgaaaaaattttgcaaaaggaaaatttgccaacagtccctcataacaagcaacctatacttgcatcatccaagaagcccaatggcaaagtgattccaacgcatagccctctggtcagcaaatttactgcaaatggtggcgctaccatcgacgatgcccttgcggacgatgacgatgaagaggcagataccaccgttcgtatagtacatcaggattccgactcctcctctttccaaaaatcagaactgttcaagatgattgaaggcaacggtgaagatcttccgcaatggtttaaaggtaaaaattcgagaaaaaattctgcctccagtaataacaagaatgcaaagccatacactactgtcttgaacaaagacatagacaattctaaaccagatccaagaaatatcctacctcaacgaaccccaaggagcgcggctaaaagggctgcccaattattagcgggcgccaagaaaaacgaggttcctgaaaaagccacacaagattcaagttcagcaggatctacggacgatgaatcggaaagcggaatcgaaacagacgtgtcatcagacgatttaactaaaaggcaatctgcacccttagctaacggcgggcccaagggggacatctctttgtactcattgaaaggtagtgtcgttccgctgacggatgcaaaggtgaatagcaaacaagacgatgggcaaattgaaaacaaaaaatcgcctcaaaaaattcccgagaagaaaattgaacccgttttaaaagcgactgaaacttctaaaactcnnccacagtcnnttccgatatccagatnnnattaa

SEQ ID NO: 4455 - DNA, 270 bp, Saccharomyces pastorianus
atgaagctttttccgtctccagaagaatcacctgaatcatcagaatctagaccagaaccactattagaatccgagccagactcagagccggaatccgagctggagtctgaacctgaactagggctcgattcatcgtcactactcgaggcaactttgggctgtggtttaccaatcgatttagagcttttttccttgacgtctggaattccccttgagacgaggtcagataacgaactcagggatggacgtacctttcttggaagatcgtga

SEQ ID NO: 4456 - DNA, 1710 bp, Saccharomyces pastorianus
atgtggaagcatatcttttcgcatgggctcaagtataatcaaccaaatgcatcttcaaaaaacctgatcctgtctgttctcaattcgacagctacaaaacgagaggccaaggactacctctccaaacatacaaatagagatggccaacgcaaccactgcttatttttcatcagggacctgcatgaaatcgcgcctgcgattttatcacagctctcaagtgtcataaagagactggggatgctaggtttacgtcccatgtttgtgatcccaccttcgccatcgcacgtgaacaaacaagcagagttacttgaccggattgttacaggtgccgatctaaggccccttcacctcaaagaggggttaaccaaatctttcactgggttatatcattctgtcttctcacaacagggtcagttccctgatatcgcaaattcgaatgttataccaattgttaagccttttgtgtataatgaagagacagcatctgaatttatgactaaagatgtcgtgaaatttatgaattgcctgtgccagggagatatcccacatattgacaaattcttcattctgaatagcactggtggcataccatcgggcgaaagaaatgataacgctcacgtattcattaatctttcacaagaattcaagcatttatcttcattattgtctcgtgatattagcactttggaaaagcgagaaccacgctcacaaaatttactacacagaatggagctacatgttaaaaaggacgaaatatcctccttagaatccgaatgccatgatcatttagaagacctgttactgatgaacaccgttttatcaaatctagcgcctacagcaaccggactgatcactactaccaaaaatgctgcattgtcctcggacaggaaaaatccattagtgtacaatctacttacagaccgatcattgatatcttcatctttaccaagattcaaaaaaaacagcaatgaaacgagctcatcaactaatctgtcggatgaacatgaatggtatgaattaccatctgagccggtgaacgcaactcctcccaatgcagatgccgtcttggtgacgactgtttttaaaaaaggtgtccatataaagacttatgattatgagacgctaactcagtttaactctatcggcctccctgaggaattttatatacccgagacaggaggcgagcctacaaccaacatccctaagttggatatcaataaattcaaaacaatcatcgatcagagctttgctaggtctctggatgtccgcgactacttgaatagaatcaatggacgaatagctacggtcattgttatcggcgactacgaaggtattgccattctaacgtacgaaggctccgaagagaacagatttgtttatttagataagtttgctgttctaccgcatcttaagggctcattgggtatatctgatataatctttaatttgatgtttaaaaaatttcccaatgaagtactatggagaagcaggaaagacaatgtggtgaacaagtggtacttccaacgtagcgttgctgtgctagatttgtcggtggatttagatcccgaacataatgacaaacaacaaagtcagtttaagttattttactacggtaacccccaatacgctgataaagctttacacgataaagctcgtttaagagaattcatgaaatctgttagagacattaaaccaagctggcataagtaa

SEQ ID NO: 4457 - DNA, 1884 bp, Saccharomyces pastorianus
atgaaaaaatgtaacataaaaaaatttcatctcatctcatcgaaggacttctggcacttttatgtggtgttgtcttattgtatctctatattatttagtacgacagcaacgatggcaaccaccgcaatgaacgttagcgttcccccaccagatgaagaagaacaaatcctggccaagtttgtgtttggcgatactacggatttacaagagaatctagctaagttcaatgccgatttcattttcaacgaacaagaaatggatattgaagaccagggagatgaaggtgccgactcggacgatggtagcgatgatggggcgcagaacggtaacttgggccaagttaatgacgatcagctgttttttgtagatgacggcaaagacgctcaaagtaaggataaagacgccatggatatcgacgacgaggacgactcttcaagcgatggctactccaacgacgatgacgaagccgcctgggtagactcagatgatgaaagaattaaagtacccatcctcaccactaataagacgaagaaattaagaacttcttacaatgaatctataattaatggtgttcactatatcaacaggttgagatcccaatttgagaaaatgtatccaaggcccaaatgggtggatgacgaatctgattcggagctagacgaagaagaagaggacgatgaagaaggttctaataacgtcattaacggagatatcaatgcactaacaaagatcctatccaccacttatcattataaagatacattgtcaaattctaaattattgccttccaagaagctagatattttacgtctgaaagatgcaaatgcttcacacccatcccactctgctatacagtctctttcattccatccttccaagcctttgctgttgactggtgggtatgacaagactttaaggatttatcacattgacggaaagacaaaccatctagtgacaagtttacatctcgttggctccccaatacaaacatgtactttctataccactttttcaaatcaaaatgaacaaaaaatatttactgctggtagaagaaggtatatgcattcctgggatttatccctagaaaatttaactcattcacaaaccgctaaaattgagaaattttctagactatatgggcatgaatccactcaaaaatcttttgaaaacttcaagatggcgcatttgcaaaacgcacagactaaatctacccacggcatcatcctcttacaaggtaacaacggttgggtgaatattttgcatgctacctcagggttatggttaatgggctgtaagatagaaggtgtaataaccgacttttgtattgattatcagccgatttcacataataaatttacgaccgttttaatcgcagtaaatacctatggtgaagtgtgggaatttgacctgaataataatggccatgtcataacaagatggaaggaccaaggcggtatgggaataacgaagattcaagtaggtggtggtaccactgctatttctccagctcatcaaataagtaagataaaaccaaacagatggcttgctgtgggtagtgagagtgggttcgtcaacctgtacgacagaaacaacactttgagctcctccacgcccacacccattgctgcgttagaccaactaacgactaccatttcgagtttacaattctcccccgacggtcaaatactatgcatggcatctcgcgcagtcaaggatgcattgagattggtccacttgccctcgtgtactgtgttcagtaactggcccaccagtggtacccccttgggtaaagtcactagcgtcacattctcaccaactggtgaactgctggccgtcggtaatgaacaaggtaaagtaaggctttggaaattgaaccactactga

SEQ ID NO: 4458 - DNA, 1887 bp, Saccharomyces pastorianus
atgtcgaataataacctccatgaccagtaccacaatactagcggccacgaagctcacgaccataacaatagcatgcctgatagcttatctcagcttatgtctcatttatcagaaatagattgcaatttgacttgtgatactccatgcgccacgaccaccgacctcaatcatactcaagatagccaaccattaaacaacgatgaagttttccaaaagtactgcaaattttgtgatgaaaagaccgacaatcaaccttgttccagacatatgcatctcggctccaagcaacctcagctgacgccgaaactttcgtctttgacacctcccgccaaaactgtacaggcgtcaaaccattcttatcatgaacatatcttaaattcagatatggatctaaaaatcttggaggatttgtgcaacatctcgtccttgtatgaagtaccgtttgggaaacacatgagtcaccacaaccacattcacactggtgaggttgatcctggtatggtgaatcaaagtaacggtaatcaaaccatgaatctattactatcaagcatcaacaggtgcgatcccaagaataacattaacagcaacattaacgacaaccctctaactgaaatggctgcaactgatcatcaacaccatcatcacaggatacagctgcactctcacaaaccaaacaaaattggtaacactagcaaccccccagcagtgcccaccacgaatacaccagctgacctaactaacagtgatttgaatgagttaatttccagagaatatggttacgagaggtttaaaaatcaaagcgagctgcctttgccacccaagcttattcatcagactcaaacaaatcttagatcttggctcacaaaggaccatgagtctaatgatttcagctccctgcataatacattatcttccagcgtttcgcccccagttgaaacaacaagtacgataaatttcaactggtgctttaaagaagaaaacaataatgacttaaaatgtaaatggaaagaatgtccggaatcctgtacctctctgtttgatttacaaagacacctgttaaaggaccatgtttcacaagacttcaaagactccttagaaccactaacgtgcaattgggaggattgcgattttctgggggatgatacatgttccattgtcaaccatattaattcccagcacggcatcaacttcgacatccaattcgccagcccagactcatttttacagggtggtttgtcaaaggaaaaacaccatctcttacattgcccgaatcctcaaacacatgaacattcatctggtttggcactatcaggaaatgacacaaccaacacatcaccgtccgaacaactcgaacaagtcctttgtcaatgggatggttgtaataagcaattttccaatgctcaagagttaaatgaccatttggaatcagcgcatttaacacgaggaaaatctaaatatcaatgtttatggcatgactgtcaccgtactttcccccaaagacaaaaactaatacgccacttgaaagtgcattcaaaatataaaccttacaaatgtaagacttgcaaaagatgcttttctagcgaagaaactttggttcagcataccagaacgcattctggtgagaaaccttacaagtgtcacatatgtgataaaaaatttgcgatttcaagttctctaaagattcatataagaattcataccggcgaaaagcctctacaatgtaagatatgtggtaagagattcaacgaatcatcgaatttgagcaagcatatcaagacccataagaaaaagtacaagtgtgctgaatgttctaaaagttttgatgatttagtgaaaatgaattcacataaagtgaaatgcttattggaaagggaaacatatctatga

SEQ ID NO: 4459 - DNA, 420 bp, Saccharomyces pastorianus
atggatgcgttgacccccagagagtcccccaagcgcgacggttcgatggtaacgactacggccactgctgcctctgccaaaccagaagccctgggcataagcacggaaggaatagtccacggccacatccataactacaacaacatgacctatatccatggccaccttcaccacagtgtggctgcggatgacggcggggccgctgctgccaccaccaatactgcatttgcatccgatgctagccatgcagcggatagcggtggccatgccaatgagaagtgtaaagagtacattgattgccagcattttgagtttttgaactaccataacaattcctctctggcgaaatataatgacactgagacatataaagctggtctgaagaatggtgtgcccttcgcaaaaagttcaatccggtag

SEQ ID NO: 4460 - DNA, 2457 bp, Saccharomyces pastorianus
atgtgccaagattctgttaggagtggcggcagggctggttttttgggaatcaaattcggaagtgctcttctatcaattaccacaggtgccattgctattgcactgctctgtaagtttcatcacaccgaagctgtcctagtggttatcgtgtgctcgacgttattgtatggtataccctctttaatatcattcatcacagaaactgtatttgcgcccagcagattccgtattgggtacttttacaacattcttaattttgcattaccactgatcactttgggttgtacagtgggctatttccatgacactttgagagatcaaacatccattcaaaacgagtctcacaaggtctatatcacgacgttagactctttactaattttcactcttttcatcaacggtatacagttaggctccttcttaaaagatcttaacgtggatcacttcggcaacactggttataccagcaacaatacaaatgctaatcagtatgacaaggaggaaaatatggtcgatattggcaggtttgtgccacttaaaaattcttcacagacactaacaccagatttggagttattacatggtggtcccaataatatggacaatgtagcatgggtgattaatgaactctctatgaatacacatgcaaacaaaaccacagcgtcggatgaaaactcgaattcttcagttattcggcataatttaggtccaatgccttccaaaacaaactttacctccaaacagtatcctaaaaaaccatcccattcacatttttctaagctgaaaaaatacaatactttctttttaggtcctatagaaaatagatacaaaaaaaacgcccaaccaagtgtcaaggtcccaaaagagaacaatggaagccatagaaatgaggccagatcatcaaccatctctgatatctctaaaagctttttgaattttctagcattaaatgaaaaaaacggaaactcatcttccgcagcaaagacgccaagtgaaggaagagtttccatgattattaccgaagaaaacaacactccaaagcacaagatatctcacgattcgcattctattgaatctccgaatttgaaactagagagagaggccattgaaagaattaatagtgctttgctccctgcgtgtttgagagttacagatagaatcatttccacacaacaaagcattcaaaatgaacaatcataccagacaacacccttaataccgcaaatggaaaacgaaggtgattgctgtatccaagatatcttgatgactaatgaattacaagacattccacaaatcccaaggatagtctcagatagcgtatacaatatcggccaagaatacactaaccatgtggaactgcctgctcatgtcaccttggaaatgtgggaaaaggaccaggagaatatacttcgaaaagtaacgacaaacctggctggtaataaattactacctcctttccgatttacctctaagagtgatatagatccaaattctttacccactgaattggaagtagaattgcatacacaaaataactttagcttcccctttaagaaagaaggatctcacattgctgcatcaaatgaactcgatcaaaaagactttaaaaattcagacactattagcgaactagatgaatatttgcacgatgcaagtattcaagaagaggatgcaggtcacttaatcgaagacagtttaaaccagaacaatatatcctccactactatcgacaatatcccaaaggacacagctagagttgataccaggcattctccaactaaatctataatttccatgatcagcggatccggaagtgtcaagcatcagcgttcacatagcaccctaaacaacttccttactggtcattcaagaaacaattctcaaataaatcaacttctacagggctcctcttctaacatgatgtccaatacctcaccgcatgcttctccgaccaaatcattaagaatgagattcggaaagaaactctcattatcaaacatctctgatacaatgtcgccgtatgagagtagcctaacagattcaatgaactattctttcggccatgatcgcaagaaaaaccagagtatcgactttagctacgtgcgtactttacaaagtagtcattcgcctacaaaatcaacctcaggaaattcgcgtcgtgactctataaacaatggtagacctcatagtgttgctaatgaaagagcactcagaacagcaagcacattattctacctccaacagaacaacgccacgtgtacgctgaatgcgaaagagccagttttggaaccgccacaatctatacgctcattatcaagtggctctgggcaagaatcgacaggatctggagctggttatccagaagtggtattcagcgaatacgacagagaaaaatggaacgttctaagaaccttacgtcaaatagcacccgaaacaactttagagcaggccagttga

SEQ ID NO: 4461 - DNA, 327 bp, Saccharomyces pastorianus
atgagagaaattgcagcaaagatcgctaagataatgaaggattctaaaattgaagttgtagaaaaggactacgttgaaagcttcagacatgaactaatggaagttgtttacgaatggtgtagaggagctacttttacgcaaatctgtaaaatgaccgacgtttacgaaggttcgttgatcagaatgttcaagagattagaggaattggtgaaggagctggtagacgtcgccaataccattggtaactcttcacttaaggagaagatggaagctgtcttgaaattaattcatagagatatcgtatctgctggttctttgtatttatag

SEQ ID NO: 4462 - DNA, 147 bp, Saccharomyces pastorianus
gagggactcagctacgaccgtctattcgagacggtcaagcaacaaataaaaggcttcagcgttggcgagttcagggacgccctggccaaactcctgcgagacaagttcataaccaaggacgagtctacagagacctacaagtactaa

SEQ ID NO: 4463 - DNA, 2421 bp, Saccharomyces pastorianus
atggaatttgttggtacaatgacggataatggccctttcaaaaatgaggaatatcatggatctctaagtggagaagcaaattcaagtgacaatttagagctgtatcatcgatttaacgatgagagaaaccccaagtaccaagcgatgatcgctgaattgcatgacttctttcgccttactttggcggaaactataaacgtaactgatattgacgggttaaaatatgataatattaaggttactaaatttagagagctaatgcccagaatgctgaataactgtcgcgaattaacacaaaggaagtcttatatccccttagatttagaaattagcgagaatgaagaaaagcaaaagagattccagctactgcaccgacatcaaatcgtgttgagttttcaagaattttgtgatgaaatggccaagtcaataattgaagcacacgttcttagctttttgtccaaatgtgaatattcatatgacatcgtatccaaacattgggcctccttttataaattatttgaatatgtgataggcgcgcttggacctatcatatcatatgttcctgtgaactaccctatgatcaaaaaagaactgggatttgagcttctgacgttatttcaatattacgacttcaaactttttgaatgtataaaagctaattttggagaagagttcccaattcttgtgactgcttctattcatcactatatccatatgtttccaataacgaacattatgttagagaatgaaactcctatgctccgtataatgtctaattgtaacttcaatgtagagggtctgagtcccaaaagttattatttgaaaacactaaaggcttattttgaagaggaaccaaatttaggtccaaagctggaaacttttagaaattttaaagtactactaacaagaaatgcactgttagcgtcgctgttttttcccgaatgggtgagtgacgcaaatgatttatttatagggcacctactgctgaataaatactccatcagtcagtacattgaaattggaaaaaacacatacgatgaacaaaaagagcgatacttcaagactgagacaagttttagtctattgatgtttagaaatgcgtttgaggcaagaaatatgctgaaagagtttagggaattttgtgatgatgtaatttcagaaaagttgggagctgcatatggagccaatcacgacactgaaaagctcttcgatgaagtggttcaactggctaacgtagactacttgaaaatttattccgataccttagaacatcatttatgcgaattgctagggagcactagtaaagccattgaacactatgtcaagtattttgaatctcacctattcaggcttgtgaggaagataaaagcaaaaagaactgagttatccagggacgcgaaaaagaagtacctctacgaaaatatccccatattgagactaaagtttgtcaacctccccacgtttcctagtttttttgaaagatcaatcttcagaaagacaattctacaaagtgaccaagattctgtatttgttaaggatatattaccagtttataaagactgcttgatggaacttttcaagcagagaatcataacgaacgtttcacaagaggacgagatgctctaccgcgatcagtatcaaccgtatctgtcacagttcttccaaccagtggaggttatggcagatttaaaaattaagtacgcgtcgttcttgaccttttacgagaacatcgaagttgcggtcaagtttggcaagaagtacaatgaagacaattatagttcgttcttcccacttatttttgacagagaaagaattcccaaaattttccagcaatctaatgacgagcttggaaaaaatttcattttacctcaagagatggacagtacatggaacgaatttttatccagttttcaccaggataacaagctaaaagattctgatacgtccaagaaggaactatacccgatgtggaatttgcatcattgtgatgtggaatccccctacacaataccccaggggggctatctgacattcgaattgacccttttccaaacctgcgtattgactttattcaatgatagcaatcgcctgacatttcagagcatctcagagcaaacaaagctagggcataaggacttgatgttgattttgaagtcgtttttaaactacaaaatcgtgacgagagacaatgaaaatacctacaagataaatgagaacttccaacctgatttgaggaaagtaaagaatggtaaactacgtgtagtgctaccgagaaacacctccatgcaaatcagcagtaactcgaccaatgggagaagtagttctttgcaccacgagggaagtaattcacagtggacttcagaactactgaagactggattaccggtctgtcagggcgagaagagggatcagctacgaccg

SEQ ID NO: 4464 - DNA, 1224 bp, Saccharomyces pastorianus
atgtctataatactcaggaatttggggttatctcctcactacatgggacagcgtagtcttgtgtgctgcactactctattccacacacttacgaaattggagaaagatacagatgataaatatcatgatataaattcaatgtaccaaaatatgtttacaccaatgtacaaccatagtccaatgacccaaagagaatcagaaggtgcaataaaggctaatacctctttagaagacgacatcaatgattttaataaggatatgcatgatctttacaacataggcttcagcaaagagactctatctgcttcgcaattgaaggacattgttaaagcaaaaggaagatttgttttacaaagtttatccactaacccttattacaatttggcgttggaaaattatatgtttacaaatacaccaaagaccaaaaaaggttttgatagctgcaggctgttattttatatcaataacaaatgcgcagtcatcggtaaaaaccaaaatctttggcaagaagtcgaccttgctcaattaaagagcaaaaactttgaacttctgaggagattttctggaggtggcacggtactccatgatttgggtaatgttaattattcatttttgacatcaagagataaatttgatacaaagtttttcaacaagaaagtaattgggtggttgaattcatccgatcccgaactgaaattagagctaaacgatagaggagacattgttcagaacgggtttaaagttagtggcagcgcgtataaaattgctgggggtaaagcatatcaccatgcaacaatgttgttaaacgctaatttagagcagttcagtggtttgttagaaccctcatttcccagtaatatggaatgggaatcaagtggcgtccaaagtgtcaagtccaaaataaaaaacgtcggtacaatcagtcctggccaatttattggactagtgtctgaacgctttcaaaaaagcttcaaagttgacaaaaatatacccatttacgcctgtgacgaatctacaactataaatgatgaaataaaagatgcaatgaaaagtttacaaagcgataattggaaatacttttcgggacccaaattttcaataaagttgaaagataaaaatttgaaaatacaagtcgttaaaggtatggtttatgaatgtaacaggaaaaaattaatcggcttggagtttaacgacttcttggaaaatattgatagctatacatag

SEQ ID NO: 4465 - DNA, 858 bp, Saccharomyces pastorianus
atggcaccaataagaaatacagaagaaaaagaatgcaatacagagagaagggcaatgtttgttgattgttccggcctggagagctacacggacataaacacgtccttcggaaagttggtaaacacctactactgtttcgccgcatgcgattgcgtggacgaacaactgggcattttgaagagcctggtgccggcatactacgaggtcgcggcgctcacaaacacagactttgtcagcgggcgcgcgggcgggataacgcagaaactgcttgccatggccatgactctgcgtcaaatcgcagactgtctggcgctcatcgaaaggtgcgacagcatggtacccgtcgaggttgcgaacccgaccagtttcaagggcagcgtcatgacgctgcccttgagccgggcttacgcccggctgctggacgattggagctactacatgcggcggcagcagcagcagcagcggcagccgatggcagggcgcacagggtgggtcgaccgtctgcagcaccggctcccctggcagaggtcacggacggtcgttatccccatgctgtatatcggcgggaccgcagagagcgcaagggacctgggcagcgtgctgcgggactgcgaggtcaggcacacgggtgagacgccgctgcagctgctatggacgtcgtcgcccgaattggcgtatgccacaccgcaggcgtacgtcggcaatagtagcatgcacgactggtcgcgctacgagttcgacttcagcaacgcaaccgaggacgacagcttgcctggagggcgcgagcgtaagtgcgtggtgcaactggaggcgctactgggcgcgctggccaccacggacccgctgttccagtggtaa

SEQ ID NO: 4466 - DNA, 360 bp, Saccharomyces pastorianus
atgacgtttctactatcttgggtgttattgacgaattgcatagccagggatatcatttgcatcatattttcaaaaagcagggaaaccaatctgataaacaagaagacgctacccttcaagcgaaggatgcgccagaccagtcccaagcagacaattcaagtgataacatatctcttacgaccgaccaaacatcgacagggttctgccagtgccaagacgaacaatgatgcccatgttcctcccactgatgcatctggatttaacaaatttatggactatgcagaggagaatgccatcgatgctgcttatgatgatgtgctagataaaatccagaatgcgcggaacagtaatactaaataa

SEQ ID NO: 4467 - DNA, 4074 bp, Saccharomyces pastorianus
atggattccaaggacacgcaaaagttgcttaaggagcaccgaattccctccatcgatgtcggctggctggtcaggcccaacgcctccgccctcaggcacgagaggtccaagtcgacggctgagagcgtggcccccgacgtccagatggacactgctcactcgtccgtcttcgacaagtctgtagacacgtcttgcggcattctctccccaaatgatagggtgcgccgccactccgtggcggcggccgctctgatgaataaccagcacatcactgttgcccctaccgcgccctccacgaacttcccctccggtagaggacggtccaaatccgtggtagagatcacgatgccaggctccggcgttgacgccgatgctgacgctggacttcgccatcaccatcaccatcatcaccatcatgcggaagacgcagcttcgtcacctgcccccaagaagatcggtttcttcaagagtttatttggcaaaaggaagggagaacaagagcagcagaagcgcgaaaaagacaaggaggaacaagaacaaaaccgctcgccctccccgggccacgtgaaccgcaactccataagaagagaacgaaccgcgaccatttctgctgagtcacctccgcccttgcagtacgtggccccgccgtcgtacaacgacaccgtggtgccgctgacgaggtccaagactgaatccgaggtgtactacgagaaccatccgcagaacaacactcacggtcacatccacacgcaacacactttcgatgaaggtcaaactgattgcagctcccccatagatggcgccgcctgcagcggcactcgtcctgacccgagattgatggatttcttgcggtactacaaatctaaggactacaaattagccgcctttaaagaggggaacttcctgcaatccacgccctcgtcgccgatcaagagaaacacacgggcctcgttttcccttcagaatgacagacaattgccccccaagttagccgcccgccagaaattcgacgttaagggcagacctatcccgccgcatccggacaaaccgaggttggcgcccgccttcaagaagaagaagcaaccagtcgctatggcatcgttggaggccgtggactctaactcagacgtctcgtcctccgcgcagaacaacaacgcggcgccgtcttctcacaagttcggcgcatttctcagaaaggttacctcttacgggaacaacgcctcatcctcctccgccaataccaacaacctgctcaatgcctcgtccacgtccgtatggtctgccaactcgctcgagttcgatcctgcaaagataaccgtcgtgcccgggcttgagtacgtcaagcccttgaaacacgtctcctttgctacgaacacctacttcaacgaccctccacagcagatctgtagtaaaaaccccagaagaggcgaagtggaggtggagcccaacgggtccgtcgttatacacagactgacaccgcaagagaggaagaaaattatggagtcgacaagcctgggcgtcgtcgttgggggcactggccaattgaaactgctaaatccagaagaggacgacatcaacgccaagagcaaagaggagatggctccgcaaaggcaaaacgcagccgaagcgcccgatgaggaagatggcaacccgcagagaagaaacatcgttatggctgccgcagaagccgccgcagaagccagagccaaagaggcccccaacgagttgaagcgtattgtcacgaacaatgaggaggaagtcatcgttagtaagaccgcgtgtcatttaaccattgataagccgatgatctcaagaaggggtgcttccacaacctctctggcctccatggtgtcgagtgatactaatggtacgaacgcagatgacgagaaggagaccatgcccccacccaaccaaaagatcccccacgatatcgtgtatacccgctgctgtcatttaagagaaattttgccaataccggccactttgaaacagttgaaaaagggatccaccgaccccatccccatcttacaattgcgtaacccaagaccctccatggtggaaatttggtcatttagcgacttcttgagtgtggcccccgttttgtgtctttcgttggacggtgtgcaattaacggtgcaaatgctcagaagcattttgagttctttgatttacaacccacatttccaaaaactgtccttgagaaacactttcctggatgaagaaggctggaaaatgttatgctattttgtctccaaggccaggtctttgcattccatcgatttgaccatggtcccctccatcaagacaaatgtacagaagccctccaaatcctctttgaagtcaaccatcctcagaatgcagtgcaatacagacgacaggtccgacatgaattgggatctcttgactgcttccatcgcccttagaggcggtttggacgaaattgtcatttcgggggcaaaaatgaatggagcacaattcaaaaattttatccttgtcgcttgtatcgctaccgaaagactgggcctggcttataatggcttgtccaagagtcaatgtgacgatctggccagttgggtggtgcaatccgaagtgacaggtttggatatcggattcaatgatctgaatgggaaactatcgtccttcactaatgctgtcctgggcaaaattcaaaaggtcaacgagaaaaacgtcttcaagtttctatctttaaatggaacaaatttagaagtaaaggaacacgatacttatgaaaacaacgaggttttgaaattgatcagtgtcctgtgctattcagaaaacctgaagttcttagatatctcgaacaaccctgcaatctttccgtattgtgtcccgacactaattgattttctgcccgttttcgtcaacttggtccgtttacaaatcgactacaataatttaagctccaccagtgtggttatgttggctgaagtattgcccatgtgttcgagactgagttacttctccatgttggggacagaattggatctggcatcctctaaagccctagcggaagccgtgagaaagagctcatcgttgatgaccttggacgtggattacgcttacatgccagagaatatcaaggaaaaaatttcactatatgccatgagaaacattcaaggtgaattgaaaagagttcaaaacgacgacaaagatatcaaagacactcaattttcaagtttacaagaccaactatcgcttttattaactgaaaaggcagacgattccgaacactataaaaaaatggtcgaaaacttcatggccaaaatcgcattggcccgtatcaagatcagtaaagtggttcacgaccttttcggtttaaaacttaatggtcaattaaatttggaaggcaaagaagctttgattagattgtgtttcatcgaggcaagtttggaaagaggttccgacttattaagacaaagacatcataatgctttgaaaccacgaagctcattctcggcaaaccaaacagacgcaaattcagaaagttgtcaaagaatgttattgagttcatctatcctacaaaattcagaccacattgccctgatgccatttggcagtgcactagtcgaaaaatctagcgcggacgcagaagacgctgtagagtttagagaaggcgatgattcaaataccaaccatgaagagggcccagctaatgatctacaagcccaagatcaagtcgatattaagaataaatactctatcatcaaaaaagaactagaacacgaaaagcttgttggcggtggggatttaccagtggacaaagacattctaaatcgcgccgctcaatcccttgatagtgatcaaatcaaagagtttttgttgaaaaatgacgtttctactatcttgggtgttattgacgaattgcatagccagggatatcatttgcatcatattttcaaaaagcagggaaaccaatctgataaacaagaagacgctacccttcaagcgaaggatgcgccagaccagtcccaagcagacaattcaagtgataacatatctcttacgaccgaccaaacatcgacagggttctgccagtgccaagacgaacaatga

SEQ ID NO: 4468 - DNA, 702 bp, Saccharomyces pastorianus
atgtttgaacgtaaaaatcaaaccattctaagtgaacattatctaaatataacgaaggcccaagcacaagaggatgaggacgatgattttatctccgtcaagcgtactaatcatgaaataaatgaagctgaactgccagcccttactcttccctcttcaaggagagcccaaaagaaagcgctttctaaaaaggcatccatatcttccaaaggtaacgctagtaaagtggtatttgatgatgacggtgaagctcatccagtttacgaactagaaggcgaagaggaatttcacaagaagggtgatgcagaaatccaaaagacagaatacttgagtaaagaatctgcagtaatggctgatatcgatggtatcgataaacaagtggctaaggaaaagaaacaagaaaagaaaagaaagaggttggaagctataagaagagagatggaggccacaaaggaagaggaacattctggagatgaaggcgaaggggcatcagtagcatacttaggaacaggtaacttaagtgatgacatgcacgatgatgatatgtctgaatcagaaggccatttgaagaagaaagctagaactgttgattactcacacggtaagaaacaatctaattcggccgatgatattactgaagtggaagaaccacaaactttggaagatttagaatctttgacagctaagttgattcaaggttaa

SEQ ID NO: 4469 - DNA, 1500 bp, Saccharomyces pastorianus
atggccaaaaaaaatagactaaacacttctcaaagaaagtctctacgtcaaaaggaagacgaatacatcgaaaatttgaagactaaaatcgatgaatatgaccctaagataactaccgccaaattttttaaagacctacctattagtgagcccactttaaaaggtttgagagaatcatcctttatgaaacttaccgaaatccaagcagattccattccagtatctttacaaggtcacgatatactagcagccgcaaagacaggttctggtaagacgctagctttcttaattccagtcatcgaaagactatatcgcgagaaatggactgaattcgacggtttgggtgcactcattatctctcctaccagagagttagctatgcaaatatacgaagttttgaccaaaattggtagtcatacttcattttcagctggtttagttattggtggtaaagacgtcaaatttgaactagaaagaatatccagaatcaacattcttattggtacacccggtcgtatcttacaacatttggatcaagccgtaggtttaaacacctccaatttacaaatgcttgtccttgacgaggctgatagatgtttggatatgggattcaaaaaaaccctagatgctatcgtaagcaatttgtccccatctaggcaaactcttttattttctgcaactcagtctcagtccgttgcagatttggctaggctatccttgacggactataaaactgttgggacaagtgacgttatggacggatcagataacgcaggaccatccactccagaaactttacagcagtcctacatcgaggtgcccttggcagataaactggatactcttttcagtttcatcaaatcgcatctgaaaagcaaaatgattgttttcttatcaagttccaaacaagtgcattttgtttatgaaacatttagaaaaatgcagccaggtatctctttgatgcatttacacggtagacaaaaacaacgtgcgagaacagaaactttagataaatttaaccgtgctcaacaggtctgtctttttgctacagatgtcgtcgccagaggtatcgattttcctgcggttgaatgggttgtccaaaatgattgcccagaagatgtagacacatacatccatagagttggtagatgtgctcgttatggcaaaaagggtaaatcgttaattatgttgactccacaagaacaagaagcgttcctaaaaagattacaagccaggaagattgagcccagtagactaaacataaaacaatcgaagaagaaatctatcaagccgcaattacaatcattgttatttaaggacccagaactgaaatatctgggacaaaaggcatttatttcatacgtgagatccatctatgtacaaaaagataaagaagttttcaaattcgatgacttgccaacagaggagtttgcctattcgcttggtttaccgggtgctccaaagatcaaaatgaagggtatgaagaccaatggactgtag

SEQ ID NO: 4470 - DNA, 177 bp, Saccharomyces pastorianus
atgtcttctaggactaacaacatctttagacaccatatattttgctttccagagaattcgatttcgtcattattgattaacaagatgttttctcttagttcctttagcattttgacatactcctgtttgtccaaagttttacaaacgatgtcatttttaatgaaccatttaatgtaa

SEQ ID NO: 4471 - DNA, 708 bp, Saccharomyces pastorianus
atgatgcaattaaagcactaccccaaagtttactggatatggaatcacagactttgggttttgaagcactatcctacaaattcgtccatgatctggcagactgagctcgcagtcgtaaataagctacttgaactggatgcaaggaactaccatggctggcactatcgtagaatagttgttggtaatattgaagagattactaatagcagtcttgataaggaagagtttgaatacacgactacaaagattaacagtaatatctcgaattattccgcatggcaccaaagagtgcaaataattagcaggatgtttcaaaagggcgagattgacaaccaaaaggagtacatccagacagaagtctcttatatcatcaacgccatgtttacagacgctgaagaccaatccgtgtggttttacattaaatggttcattaaaaatgacatcgtttgtaaaactttggacaaacaggagtatgtcaaaatgctaaaggaactaagagaaaacatcttgttaatcaataatgacgaaatcgaattctctggaaagcaaaatatatggtgtctaaagatgttgttagtcctagaagacatattggaagagaatggagctttcacggaaaaaaactcagaagcatacttggttcaattgatggatgcggacccgttaagaaaaaatagataccaaagtcttttgaagaaccacagatga

SEQ ID NO: 4472 - DNA, 2541 bp, Saccharomyces pastorianus
atggttttgggacaaaggtggccccgtatttttgaacacgcatcgttttactcggaaagaagctgccgtgaagcgacaatgctggcgagtaccatagattacgaccccttggaagatatcactagtatacttttttcgaaggaatccctaaacaacatagacgaattgataaatgtcaccagaaactacaagcagcagctgcaggaagacattcttaaggaggaaaacagcataagcactggtcttggcgactcctcggaaacgcaggctgctttgcgaaaggtctttcgagacttcaaggaaactcaagatgtctcctcttccactgaattgacaatctcaaacttgacggaaggcatctcgtacctggacatcgctaagaaaaacctcacccactccatgacgcttttccagaacctgaaaatactcacggacagctacattcaatccaacgagttgctctcgcaaggctcgttcaagaagatggcttcgccgtacaagataatgtgttcgctagcggaaaacacgttcgtctcttacaagtccctggacgagataaactttctgctcagctccatatcaagactgaaggctgacaccttgtccaggatcaaacagaactacaacgcgctgttttcgagtagcggcctccccgagcaggacacggccctcagcactgagttgcgcgagggcgcttgcgagttgctcgactgcgactcaagcacaaagacccagatgatagactggtgtttgaccaagctgttgttcgagatgaacgagatcttcaggctggacgacgagtccggttccttggaaaacttgtctaggcggtacatctatttcaaaaaaatcctgaacaactttaatgcgaagttcgcagactacttcccgaaggactgggagatgcccgtcagattgacgacctccttctacctcaccacgcatagggaccttcaaatactgttgaagcgggaattcaaagacaaaaacccctcgatagacttgttcatggccgcgttgcaatcgaccctggacttcgagaagtacgtcgacgtgcggttctccaaaaaaataaaagagcccaagctgagttcctgttttgaaccctatttgaccctgtgggtgtcccaccaaaaccaaatgatggacaaaaaattcctctcttacttgagcgaaccgaaattcccctccagcgacgcggaatctctcgtgttaccgtccagtgcagatctcttccgaacctaccgttctgtactgacccagaccttggaactaatcgacaacaacgccaacgatgggatactgacctcactggcaaattttttcagcaagtggctgcaaacgtactcgcagaagatccttcttcccctgcttctgcccgaaaccatcgaagtgcaggacaagcaagaggctgccagatacaccgtcttgttgatcaacacggcggactattgcgccactacaatagaccagctggaggagaagctgtctgagttcagcagtgatcctgaaaagcttgcaagcacttttgcgagaaccaagaacatatacgatgacctactagccaagggaacctcctttctactgaaccgtgtcataccattggacctgaatttcgtatggagggagttcaacaacaacgactggtctaacgctatgatagaagactatagcagatacatggtgactctcaaatccgtattgaaagtatcgccctcaatggcaactgacgcatccaataaacaaccatccattttggcgttcatcttatcacaattcaacagagacgtctacaagtggaacttcctggacaacgtggttgatattgtcaccaataacttctcaagttgcatcatccgcctttttcaaccgatcccgcccttttctttggcaagtagcaagaggaaattcgagaccaagaccgtcatcaatatcggagagcaactgcttcttgatctagagctactaaaggaaattttccataccctgccagaaaatgtcaataatgattctgatttgcgagagaatacctcttacaagagagttaaaagacacgtggatagcaacatagaccaactactaaagttcatcaagctactggtggcacctctggactctgctgacgactattacgagacatactctcaattaacaaacaacaacgctgatccagcagtatggtcttttattcttgccttgaagggtattccatgggacctggcattgtggagaaaactgtggagtgcattcaacctggaaactgataataccgaagaaggcagtaagccggagggaacccgtgatcttttcgtttttaaatgggataaggcacttctgggtcaattcgagaataacctgtcaaggattcaagatccggcttggtctaaatttgtgagacaagatttaaaaatatcacctcctgtgatgaaaagaatagtgtccactccgcaagtacaacaacctaaagaggagcaaaaaaagcagagtttgagcgttaaggactttgtttccaattccaggtttttcaacagaggagcttga

SEQ ID NO: 4473 - DNA, 987 bp, Saccharomyces pastorianus
atggaaaaggatgagccattgttgaacgaagacaaggaaagaaccgtcttgttccccatccagtaccacgagatctggcaatcgtacaagcgtgccgaggcctctttctggactgccgaggaaatcgatttgtccaaggatatccatgactggaacaacagaatgaacgaaaacgaaaggttcttcatctcaagagtccttgccttcttcgccgcctccgacggtattgtcaacgaaaacttggtcgagaatttctccaccgaggtccagatcccggaagccaagagtttctacggtttccaaatcgctatcgaaaacattcattccgaaacctactccttgttgatcgatacctacatcaaggatccaaaggaaagtgaattcttgttcaacgccatcgacaccatcccagaaatttgcgagaaggccgaatgggcccttagatggatccaagacgcagacgcgctgttcggtgaaagactagtcgccttcgcgtccatcgaaggtgttttcttctccgggtccttcgcctccatcttctggttgaagaagagaggtatgatgcccgggttgaccttctccaacgagttgatctgcagagacgaaggtttgcacaccgactttgcctgtttgttgttcgcccatttgaagaacaagccggacccagccatcgtcgagaaaatcgtcaccgaggccgtcgagatcgaacaaagatacttcctagacgccttgccagtcgccttgctaggtatgaatgccgacttgatgaaccagtacgtcgagttcgtcgcagacagactgttggtcgccttcggtaacaagaagtactacaaggtcgacaaccccttcgatttcatggaaaacatttccttggccggtaagaccaacttcttcgaaaagagagtctccgactaccaaaaggccggtgtcatgtccaagtccaccaaccaagaagccggtgcgttcaccttcaacgaagacttttaa

SEQ ID NO: 4474 - DNA, 318 bp, Saccharomyces pastorianus
atggctgggtccggcttgttcttcaaatgggcgaacaacaaacaggcaaagtcggtgtgcaaaccttcgtctctgcagatcaactcgttggagaaggtcaacccgggcatcatacctctcttcttcaaccagaagatggaggcgaaggacccggagaagaaaacaccttcgatggacgcgaaggcgactagtctttcaccgaacagcgcgtctgcgtcttggatccatctaagggcccattcggccttctcgcaaatttctgggatggtgtcgatggcgttgaacaagaattcactttcctttggatccttgatgtag

SEQ ID NO: 4475 - DNA, 1443 bp, Saccharomyces pastorianus
atggacggtgatgtggagttcaacgacgatgaagacgaccttaacggccttgccgccggtattatcacaagacggctgaacctcaccaccaacgcgacgggcagtttccagtccagtcagctctcgaactcgcagctcttactgcaacagcagagacggtcccacaagaaattcaaaaaactgatcggccacgaggccaaactattatttctcaagtccttccagttcatcctgaaaaggcagacccggtggctgatcgatgaaatgcacttccccgcggaattcgaccacgttgtcaaaataatatggctgaaactcctgaaaacaatcaacgaccaaccccaagaagagctgaggctccggctgcacatggcgtccacagtttccatcctgtatctcgcatctacccacctgtccttgcccgtttacacttgtgactacatcaaatggatatgcactacaaagatgccgtatttccaagcaagtgaactactgcccaaatcgtggagaacccggctgccgaattactacatttccatattggagggctccatttcgcccttcaacggccagttgtgcaacaaaatcgctttaacttgcggcacgattcaattcaacaaatctttcaactcccaagtttcatgccagggtttgttattgaaactggtgatgcaatacgcgctgcccccagagttctacttttatacaaagcaaatcatcgaatttcaagaaaccgacatcaagaacctagcgctttgggaaagaatagacgaacgtcacacaggaccgataagcaaccacgctgaattgagaatcatctcttatttcatgcttacgatacactggattatttcttttgatcaagaccaccggtacccgttgaaatggatcctcgaactctcgagttcattaacccgccattcgacaacaagggagtctattgacagaaacatcgttaacgtggtttacccagataagtcgacttctaacgactacttccaatggtccgacgaagaaactctgcagttcttgaattggatggaaaagcagttcttgcccacacaaacaaggtctttggatgatgaaagcggctcaaatgatatgaccattgatcaaaaaatcgccagaaggaaactctacaagattttccccttggaccccgacactaatcgtgatcatgaggccatcgactcgaagcatcaattgacatttattgaagacttacaagaaagatacgccaaacaacagtcttttcttaacaacaataaaacagttcactttactactcgtcaagatatccatctgccgactagaaaggaggctgtcaatagtctcatgactcaaatagcatcgcaactttcagctgacttcgccatttctgaacagcaactaaaagattgtatttatagacttaaaaaagcttgcatccacaaaatgaactga

SEQ ID NO: 4476 - DNA, 411 bp, Saccharomyces pastorianus
atgagtaatgggagtaatagtgatgatgtaaacaacgaggatattcagatcatcttcaaaaactacgctacattgtatttcacttttattgtggacgaccaagaatcagagttagccatattagacttgattcaaactttcgttgaatcattggaccgttgttttactgaagtcaacgaactcgatttgattttcaattggcaaactttaaagagtatattggaagagatcgtacagggaggaatggtgattgaaaccaacgtaaacaagatcgtcgcttccgttgatgaattgaacaaagcttctgagtccacagatagtaaaataggaagactatcatcgactggattcgggagcgcactgcaagcgtttgctcaaggtggatttgctcaatgggccactggacagtaa

SEQ ID NO: 4477 - DNA, 1677 bp, Saccharomyces pastorianus
atgggcttcttaaactccttaaagaaaccggttaacattaagacctcactccctaggttctccggcagtgccacgggttcatcgttcacttcgagtagtcacccaataaagacacgttccttccaagaattacccccggagctattcgctattgccaaacctatattcaggttgctgcaggcacaagtaaacaaggtctactttcaatcttcaggcgctgaagcagcatggaatattaaggattcgtctggtcacatttttgaagcggaatcgatctccttgatcggttctcatatagtcattacaggctcgtcttttgggaccatgaacgtttccatcatagattccccatctaatataaatcaatgctctatttcaaacgttggcgaattcctgcagttcaattacggccagttgtctgttacatgtaacgactttgccctactagaagagttcaaaaggttgtgcatgatctccattttcgagtctgtgtccatatataaggccttgaccggtacagtaatttcatcctacgggttaagaatgtctgatatgcatgtcattttgaactcggcatttaatttcaaagattggtgcgagatttatctcgatgatcaaggctgggtcaaagtgtggtgccatattgacaaggtggctaaaagtaatagtgatcatgatgccaaaggtaaataccaaatcagattttatagagatgacaagtccacatctagaaaaaattgcgttcttttcattcctgacaatgaatacgtacaagattcgtttttttataacgccaactcaagtaaaccctctaaaaatatgaacgaatttttccaaggattgcagatgataaagctcgttggtaatgtgcgtttctgcggtgatacgtatttaaacgacataatggatagtgggtcaatttatagtaatgcgaacaatgggagtggtgacagcagctcgaccgcattgaacaatgaaagtcccaacactacaccgaagagtagaacttttttctcaccgaaaggtcacaaaagaaacggttctcatgtaagttcgctaacttcaagatcaacaaagaagcccatcaccaacttcaccataagttcaaaaggtctcttgatcaggccattgccgcatcacggtgtgcaccacttggaagcaatgattaggtttattgttcccttgatggactgtgcaaggctttacgggcgtccagttcaattcaagacagacaggacagacataaactcattaatgtttgggttacccaaattgccctcagtcgattattttgctcaggaagagattgcccatttaatgacccaggattttaatcccttaaaagaaaaagacaccgacgatacaatggcattgaccatgtcgaggttttctagctatttacaagaaagaatgaccaaagtctctaaaagaaacaccgacttaagtttcaggactatcggtgatgtaatgggcatgtacaaccctacaagggacgacgctaaagtgagccctattggcaatgaaaataacttagtgaagcaactttcgttgagcgaaaagagtaacactagctcagatacagcagatgtgatgaaccaattccaggtgaacgctcgtgaatatcaaaatactatgcgcgaatgtccgcttgttacaactacatcacccttggcctag

SEQ ID NO: 4478 - DNA, 1512 bp, Saccharomyces pastorianus
atggcatcatcaccatcacaaaatgttgtcaactttgaacatattgaagtgcaaaaggaaaacattttacctttaaagcacggaagatcagcatcagcacttctgaaagcaatacaccaaccgttgacagagatgagtcatatcaaatcaagctttgagcaaagactgatagatgagctcccgacattggatgacccaattactttatacctcgaatacataaactggcttaacaatgcctatccccaaggcggcaattccaaacaaagcggaatgctcactcttatggaaaagtgtttatcccacttgaaggacttcaaaagataccagaatgatttaagatttttaaaaatatggttttggtatatggaaatctttacggtaaattcttttatggaaagtagagatatcttcatgtatatgttaagaaatggcattggttctaagctgtcattattttacgaggaatttgcaagccttctgattcaaaaacaaaagtttcaacatgcagtaaacattttacagcttggaataaagaacaatgctgagcctggtctgattttagagaatcagttgtctcatcttcagaaacagctggacgagcaaaatattcaagaggacggggttatagtggatttgttggaaactacggtgcttgggaaaactagatctggatttgtcaacagactcgaacttgcaaatccgaatgatccattaactaacgaaaacatattgaaaaatactatatttgtggatgatgaggacttgaacacagaaccatctgaagaattcaagagtaatgtttatagggacggatgggaaaactttggctctaaagcagaaagaagtaaagaaaataggtccattatatcagtactcgaagcaaacacaaatttaggtgagctgaaacaacaccaaataccctcccaaaaaagtaggcaacgtgatgaaaaattacctatcttcagagattctatgggtagaagcgaccctgtttatcatataataagcgtgagagaccaaaaacctgaaaagatcgattgtaactttaaactgatttattgtcaggatgagaaagctaaaagcgagagattggaattctctttagatgagatcttagctatttcaagaaatatttataaaaaaaaaagcttgaacaagaagcacccaagggaaatagaggagggcggtgaagaaaacgaagagcatgaagaaactgagatacgttcaaaaaagcctaaaacatctagaaaagccttggtttctaagacactgatcccctcataccaagaaaaaatatctgccggtgagggatacattaacagtcccatgacacctaagaaccaagatattagattattagacgattcccctgttactgggccacgccggctaacaccaattttggaaatgagagaatcatattccgtttcacaaagcagaaattccgagattatttcagatgatgacaaatcaagttcatcctttgtctcgtacccattgccacgctga

SEQ ID NO: 4479 - DNA, 2163 bp, Saccharomyces pastorianus
atgaaatttggtgagcacctgagcaagtctcttatcaggcagtatagctattactacattagttacgatgatttgaaaacagagttagaagataacttatctaagaataacggtcaatggtcgcaagaactagaaacatattttttagaatctttggagatcgagctggacaaagtttacacattttgtaaagtcaaacacagtgaagtctttagacgtgtgaaagaagttcaagaacaagtgcaacatactgttcgtttattggactcaaataaccctcccacgcaattagattttgaaatcctagaagaagagctaagtgatatcattgctgatgttcatgatctagccaaattttcaaggttaaattacactggttttcaaaaaatcataaaaaagcacgataagaagacaggatttattttgaaaccagttttccaagttcggttggactccaaaccattcttcaaagaaaactacgatgaattagtcatcaagatctctcaattgtatgatatcgctagaacctcaggacgcccaataaagggtgattcatcagcaggtggaaaacaacaaaattttgttagacagacgacaaagtactgggttcaccctgataacatcacggaattgaaattaattattttgaaacatttgcccgtcttggttttcaacacaaacaaggaatttgaaagggaagattccgcaatcacttctatttatttcgataatgaaaatatggatctttattatggtagattaagaaaagacgaaggtgcggaggctcatagattaagatggtacgggggtatgtctactgacactatatttgtagaaagaaaaacccatagggaagattggactggtgaaaagtccgtcaaggcaagatttgcgctaagggaacgtcatgttaacgatttcttgcagggcaaatatactgtagaacaagcttttgctaaaatgcgtaaagagggtaaaaaaccaatgaacgaaattgaaaacctggaagctttggcatctgaaattcaatacgtcatgttaaagaaaaaattaagacctgtagtgagatcattttacaacagaactgcttttcaattacctggtgacgcaagagttcgtatttctcttgataccgagttaactatggtaagagaagataatttcgatggtgttgatagaacccataagaattggagaagaaccgatattggtgttgactggccatttaagcaactagatgataaggatgtttgtcgtttcccatatgcagtcttggaagttaagttgcaaactcaactaggccaagaacctccagagtgggtgcgtgaattggttggatcccacttggtcgaacccgttccaaagttctccaaatttattcatggtgtagctactttattgaatgaaaaagtagattcaattccattttggttgccacaaatggatgtggatatcaggaaacccccattaccttcaaacattgaaataacaagaccaggcaggtccgataacgaagataacgacttcgatgaagatgatgaagatgatgctgctttggttgctgccatgacaaatgctcctggtaattcccttgatatggaagaatccgttggatacggggctactgcggctcctacttccaacgttaatcacattgtagatagcgttaattctgcttattatcaaagaaaaattagacatgcagaaaaccctgttaccaaaaaatactatgaagttgtggcattttttgaccactatttcaatggtgaccaaatatccaaaatcccaaaaggtaccacgtttgatactcaaatttgtgcccccccaggaaagacaatatgtgtcccagttcgtgtggaaccaaaagtttactttgccactgaaagaacatatctgtcttggttatccatctcgattttactgggtggtgtttcgactaccctattaacctatggttcaccaacagccatgatcggctcaattgggttctttatgacatctttggctgtgttgatacgtactgttatggtttatgctacgagagtggtgaatattagactaaagagagcagttgattatgaggataaggttggacctggcatggtttctgtgctcctaatcatatctattttgttctcttttttctgcaacatagttgcttaa

SEQ ID NO: 4480 - DNA, 249 bp, Saccharomyces pastorianus
atgcagaaaaccctgttaccaaaaaatactatgaagttgtggcattttttgaccactatttcaatggtgaccaaatatccaaaatcccaaaaggtaccacgtttgatactcaaatttgtgcccccccaggaaagacaatatgtgtcccagttcgtgtggaaccaaaagtttactttgccactgaaagaacatatctgtcttggttatccatctcgattttactgggtggtgtttcgactaccctattaa

SEQ ID NO: 4481 - DNA, 288 bp, Saccharomyces pastorianus
atgacgttatattttgctggcttgcaggtatatctattttatgaatttggaggcgcgaccttattaatcatcttgatcccagtttcctggttttggaccttgaggcgctcttggaccaccagctttcttggccataataatttgatcaatagaaagcacagtagttgcagcctctgtggcgacgttgatagcaaatttcttggtggcaagcatgtcgtaaataccatcttctctaatatcctttacaccttcaccagtttcaccatcgatatccacacctttatataa

SEQ ID NO: 4482 - DNA, 582 bp, Saccharomyces pastorianus
atggccgtgacatttaaggatggtgtgatactaggtgctgattcacgtaccaccactggtgcgtacatagctaaccgtgtgacagataaattaacgagagtacatgacaaaatttggtgttgtaggtccggttctgcagcagacacgcaggcgattgccgacattgttcagtaccatttggaattatatacttctcaatatggtaccccctccacagagactgctgcctcggtgttcaaagaattatgttacgaaaataaagataaccttactgctggtataattgtggctggatatgatgacaaaaacaaaggggaagtatatactattccattgggtggctccgtccataagctgccttatgcgatagcaggatctggctctactttcatatatgggtattgtgataaaaactttagagaaaatatgtcaaaggaagaaaccgtagatttcataaagcattcgctatcgcaagccattaaatgggacggatcttccggtggtgttataagaatggttgttttgacagctgctggtgtggaacgtttgatattctaccctgatgaatatgaacaactataa

SEQ ID NO: 4483 - DNA, 582 bp, Saccharomyces pastorianus
atggccgtaacattcaaggacggtgtaatattaggtgccgattcacgtaccactactggggcctatattgctaaccgtgtaacagataaattgacgagagtccacgacaaaatttggtgctgtagatctggttctgcagcagatacgcaagcagttgctgacattgttcaatatcatttagaattgtatacctctcaatatgggaccccttccacagagactgcagccgctatatttaaagaactatgctatgagaataaagataacctaacagccggtataattgttgctgggtatgatgacaagaataaaggagaagtatacaccatcccgttgggtggttctgtccataaactaccatacgccatcgcaggttctgggtctaccttcatatatgggtattgtgataagaactttaaagaaaacatgacaaaggaagaaacggtagatttcataaagcattcgctatcgcaagctattaaatgggacggctcttctggcggtgtcatcagaatggttgttttgacagaagctggtgtggaacgtttgatattctacccagacgagtacgaaagactataa

SEQ ID NO: 4484 - DNA, 1800 bp, Saccharomyces pastorianus
atgaaaagccctaagcatagcgatataatgtcaggacttgttgaagcattgcgatccgatgcaggtagcatcattttgaaggattcttctgcaatctctaaagatgtcaaaggatatatagattctgttatcagtatttgcaaaaatgaaaatactatgaagaaaacagatttagacgaaatcaccgtcgatggtttagatgcgaatcaaatttggtggcaagtcaaactagttcttgatagtattgacggtgatttgattgagagaattcaagagcttaaaaatgttgctgtgccttctaacgatctttctgatgatgacgatgcaaactcggcagcagaaggagaacctgagagcgattctgaggaagaaccgatattgtccggtgatgcttttgaggctgatcaggacaacagcgacagcttttctgaaaaagatgaggaacctatatcgcatgtcaaagaatctactatagaagaaaacaaagaaagatatgtggaaaaagataaaaagccttctgaaaaagaccaaaaaaaaattcctgctgatccttatggtgttaatgataagtttttcgatcttgaaaagttcaatagagatacgttagctgctgagaattatgatgctgccgatgctgctacggagaatgaaggtgaccagatagattactttcaagatataccttcagatgaggaggaggaggaggcggtctattatgaagatttttttgacaaacctgcagagatgtctccaactgaaagcgtcgatgtaaacgatttagaagatgatgaagagttgaatgaaaaggagcatgattccgtaatggacaaagtcaaactggatttatttgctgatgaagaggaagattcgaacgctgtagcagtgggtgtttcaaacgacaaaaatttatctacttttcaaaagcaacaattagaaattagcaaacagatagagcaattggaaaaggaagcagttgcggagaagaagtggtccttaaaaggtgaagtaaaggccaaggaccgtcccgatgatgcgttacttacagaggaccttgaatttgatagaacggcaaagcctgtgcctgtaataacaagtgaggtgacagaatcattagaagacatgatcagacggaggatacaagatagtaattttgacgaccttcaaagaagaaccctattagatgtctcacgccaatctcaaaggccgcaatttgagttaagtgatgtcaaatccgcaaagtctttaacagaaatatatgagaacgattacgcgcatgttgaggatgaatctgctataagtgaagagcttaaaaaggcacactctgaaatatcagagctttacagcggcttggtatataaattggacgtgctctcatcagtacactttattcctaagccagcaagttcttccttggaaatcagagtcgaaacacccgctatatcgatggaggatgctcaaccacttcatatgtcgaatgcgtctactttggctccccaagaaatatacaatgtcggtaaggcagaaaaggagggagaaatccgcttgaagaacggtgttgcgatgtctaaggatgagttgactagagaagataaaaatagattacgcagggctttgaaaagaaaaagatcaaaaggtatttcatcaaatctgaacaaaaaatctaaaaagaatgaggtagttgacactctgtcaagggcgaagaacatcactatcattaatcaaaagggtgaaaagaaagacgttgccggtaagaccaaaagaaacacatcggggccagatagcactaacataaaactttga

SEQ ID NO: 4485 - DNA, 1560 bp, Saccharomyces pastorianus
atgttacgttcactacaaacagttgctgctttagctaacagaagattatattctgtcaaatcgcactcgaaccgaaacaaaatcatcaaaactcttttgactcatcgttcattcgacccaattcgccgtcacttacctacggatatagcgagtgctgatccgtattctctctcacagaatgttatcaaaagcctaaacacactaggccttcccaaagaagatgcagcgataatacacaatatgatgatagaaaacctaagtaacctggactacagcattgcaacaattcactccaagaatttgcatgaacttgatttgaagccatcaatttctgcaataaaacaaatcgtcaaaaacaatccgggaagagtagagagttcatgggagctttttacaaaatataaagcttcagtagaaatcattcctgatgagttaattgaggtggttctagaaaaaattattaatttcgacaatgctgaaaaggtcgatgggaaaaaacaattaacttttcaagacctggtaagatgtctctatttaatagatcacctctctcccaaccacgttatatcttcaaagctcgttgaatcgattcttacatacacaatagataatggaatacctaatgtttttgctttcttgctcaaacacaaaataccgttgaacttctttgataagtatattgatgaaatgacaccctgccagatttttgaactctataggtttttcccaattgatgtagtaataaccaacataccgatactacataaatgtgtagcagttctaggtaagaacgaaacgatcccactaactgaagaagaaaaagaaacgacgacaaagttagaagaagaggcagaaattgttaaattacaatgtcatgataattggaatcttgatattccaaaagaggatgcgtacaaaacagaggatgcattcaaaaacttatttgtagaaattcaaaaaagagaactagatagaaaagatttcggattagctcttactttactgagagtaaccggagtttttaaaggtaacatatccttgttctttgagttatatcacgaataccttttgagattcgaacgcaacgaggacagcttaatgtttgaagcctttttaacgctttgctaccagggctataagagagataacagcaaaatgttgcaatatgccgaagctttcgttaaagagggtactagtgccaaacttcaaagccaaatttttagtgtactaattgtcgccaatgcaaaaacaaacatcgacttatcgcttgagatttacaactcaaacatagccaaggctcacagagagaaagacgaatccacggatctttctgagagtgacatactgactgagtcgctaattttagctttcttatccaaagatgatgccgattttgccagagtcgtctttgatggtgcattgggagagaaagttctttcaggacctactgctgctaaaaagataaagaagctttttgcacagtacggagaagcagtagaggccaaagaaagtataaaagtcatgcaatctaggatagaacattatatggaaaatatttaa

SEQ ID NO: 4486 - DNA, 198 bp, Saccharomyces pastorianus
atgaagggtgttttgggttacactgaagacgctgttgtctcctctgacttcttgggtgacgctaactcttccatcttcgatgctgccgctggtatccaattgtctccaaagttcgtcaagttggtctcctggtacgataacgaatacggttactctaccagagttgtcgacttggttgaacacgttgccagagcttaa

SEQ ID NO: 4487 - DNA, 1212 bp, Saccharomyces pastorianus
atggttggcgaagattggggcttgattgtactatcatttcttgtaagagttggatttttccttttcggtatttaccaagacgccaattttaaagtgaggtataccgatattgattattttgtgtttcatgatgccgccaaatatgtatatgagggcaaatcaccttatgcgagagatacgtaccgttatacgcctctattaagttggttgctggtgcccaatcattattttggatggttccatttggggaagatcatattcgttattctcgatttgattactgggttcttaattatgaagcttttgaaccaagccatctccaagaagagagctctgatgctagagagcatttggctattgaatccaatggttattacgatcagtacaagaggaaacgcggaaagcgtattgtgctgcttgattatgcttgcactttattatttgcaaaagggcaaatataccatggcaggtctcttatatggcctttccattcatttcaagatatacccgataatatactgtatcccgatggcgatctttatataccatagaatgcgtaaggaaggtccacgagcacaattgacggctttacttaatattggtgtaagcacgctagtgcctttgttgggatgcggatgggcaatgtacaagatgtatgggtacgaattcttggaccagtcatacttgtatcatttgtacaggacagaccatagacataatttctcaatatggaacatgctattatatttggattctgcgaacaaggggaatggcgggtccaatttatcgaagtatgcattcgtacctcaattgctgctcgtattggtaaccgggtgttttgagtggtggaatcccacattcgataatctactgagtgttctatttgtgcagacgtttgcctttgtggcgtacaataaggtttgtacatcacagtattttgtatggtacttgatatttttaccattttacctgtcaagatcacatatcagctggagaaggggcattctgatggtcacgctctgggcagtgacacagggcatttggctaagtcaagggtactatttagaatttgaaggcaagaacgtattttatcctggagtcttcgtagcgagcgctctgtttttcctgaccaacgtgtggctgttaggcgggtttatcactgacctcaagacaccggtgccactcgcaatggccggtaagaagaacaattga

SEQ ID NO: 4488 - DNA, 528 bp, Saccharomyces pastorianus
  modified_base (12)..(12): a, c, g, t, unknown, or other
atgaacgtgtanaagttggttatccgaaaacatcctgacctttacgcacaactatacgggaccgaagagaatgcacaagaggaagtagaagccgtgaccaccaaactggctgaatccagtatcggtgaagccagagaggaaaagctggaaaaggacttattgagaatccaaaagaagcaggaaaacaaagaacaaagagagctagccaagaaactgtcatccaaagtgatcatcaagagagaggccagaaccaagaagaagttcatcgtggccatttctgggctggaggtctttgacatcgacatgaagaaactggccaagacatttgcgtccaggttcgccactggctgttccgtgtccaagaacgtggaaaagaaggaagaggtcgtcattcaaggtgacgtgatggatgaggtggaaacttatatacactcgctactggaagagaagggaatgaaagacgtcaaagtggagaccatcgacgcgaagaaaaagaagaaacccgcagcagaaggcgtcgccaagtaa

SEQ ID NO: 4489 - DNA, 195 bp, Saccharomyces pastorianus
atgatgcctgtccataatatcattgatatctatagagtgatttttttggacttgtcaagaggcaagatggggaggaattatggtattttagttgccctcattgcattaaataccgcattgttaccatttgtcagtaaatacgcgggcagaaaattgagacaaaaggccttagctgcatcacaacagggccagtaa

SEQ ID NO: 4490 - DNA, 1350 bp, Saccharomyces pastorianus
atggaaacagatgccgaatattgtagacgcaaagatatacacgacctttccagtgtggtcggtgttgcctgtaatcaaggtgttccaggtgctgactcagacctagttgacagtgagaaggaacaagtggccgattccgaggaagactttcagccgggttccatacatgccaatggggcctcatcaacaacagctcaggcagcagcgctggccccatcttctcccggcgctggttatgaaggtggggggcccgtgcagaagactcccaccaggtttttctcacccagtttgcaaggccaaagaaagaaagtccttttaaagttcgtttttgccaattgcctgctagctattttttgctttacaatttttgttttgttttggggggctctctacaatacagaaaaatatgtgcataaggtcaggctgctggccgtcatccaggagcctcctgtcgtggccctggacagcaacagctcgatggccgtgccatccatctcatccgcactacccaccttcattggcaaggtgccttgccattgggacctttacaacgcttccacgtttcagactaaattccatgtgaactcctccgagcagatcaatgacaaggtcatcgatttgatttacgacgaaaaatactggttcgccatcaatattaaacccaatgccacagagactctctttgagtcgctggtcaacgacaccgccccctattttaattccaccctgtttaaccaggtcgtttatgaaagtggtagagacccaacgaatctaaaatccacgatattgccgcttgcccaagaaattgaagagtactacggagccttctatacgttcaactacttaccgaaattcctgactaatataacactgatggataactacaacttgactagcaacctcacacatatcaccgcggcggggaaatacaactacgaatactatgaccacaggccgttcaccgaccgtattgtgctggcgcccacccagatcggtgttgtttattgtctgctattaacctttttccagttcctgttatatggcccattgcacgcagaaatggcaaaagtgctaaggcctgccaacggtataatttaccgtatcgccatgtcatggtctacctttttccttgcatccttattcttctgcacaatttccgccatcttccaggtcgacttcaccaagtctttcggcagaggtggcttcatggtgtattggatgtccacgtggctgttcatgcttgccgctggtggagctaacgaaaacgcggtgatgcttgtcatcaccttgggtccacaattccttggattttggatcctatcggtcgtcatcttaaacatcgttccatcc

SEQ ID NO: 4491 - DNA, 513 bp, Saccharomyces pastorianus
atgccatccgacgcagcagccagcaccggcctgcccacgccgtggactgtcaggtacagcaagtccaagaaaagagagtacttcttcaacccggacacgaagcactcgcagtgggaggagcccgagggtacggataaggaacagctgcacgagtatctgaaagaccacccaatgcgtgtaaggtgtctgcacatcctcatcaagcaccaggactcgagaagacctgcttcgcaccggtccgagaacatcaccatatccaagcaagaggccacggacgagctaaagaccctggtcacgaggctggacgacgcttccaagaccaactccttcgaggcgctggctaaggagaggtccgactgctcttcgtacaagaggggcggcgacctgggctggttcggcaggggcgagatgcagcccagtttcgaggacgccgccttcaagctcaaggtcggagaagtgagcgacattgtcgagtcgggcagcggtgtccatttaatcaagcgtgtgggttag

SEQ ID NO: 4492 - DNA, 513 bp, Saccharomyces pastorianus
atgacagcgctggtcgatgagctgggcaggtataactccaagatcacgcgacacgtcaccaacaagcagcatgagactgagaagtcgatgaggtgcacccaggagatgctgttcaacgtcggcagccagatggaagacgtgcagaaggtgctgctctcgctgtccaaggacatgcatgctttgcaggcccgccagacctctctggagacggcgttccgagagcgggcaggccaccacacctgcgacccacaagacgtcacatccttgaacggcaccactctcttgcacgactctgacgaccaccacaagaggtccacgcctccgccaagaacgatggtcacaaggtccatgaaacgcgacaggtccacttcccccgccgtgtcaaccagccaaggccatgccagcgaagacgaccacgactacgactacgacggccgccagctgaagcgtgcggccaggaccatcattccctgggaggaaataaggcccgacacgctggagtccgaactgtga

SEQ ID NO: 4493 - DNA, 348 bp, Saccharomyces pastorianus
atggacactcgaaccaggacagacgaggcatccacggacatctcggagaccaattctgagaggtcgttgatgatcacggagacatcatcaccgttcagatctatattctcccacagtgggaaaataacgactaccgctggcttggaagagtccgacaagcagatattggaatgggcaggtaagctggaactggagagcatggatttaagggaaaactcggggaaactgatcaaggttctgaacgacaactccaagacgctgtgtaaatcgctaggcaagttcaaccagctactagaacaagacaccgctacgaacggtttgtatcggacagaatgtgcacacctttaa

SEQ ID NO: 4494 - DNA, 414 bp, Saccharomyces pastorianus
atgagcctatacgcaggctgcagggaaaagacaagacaagacaagaccagacaagacaaggggacaaggcagataccaagctcaatgtcaccaatactcaaggaatacctgaataaaagggtcgttataatcaagactgacggccagtgtctcatagcaagcttggacggcttcgacaagaacactaacctattcatatcgaacgttttcaaccgtataaataaagagtttgtctgcaaagctcagatacttcgaggcagcgaaatcgcgctcattggcctcttggacatcgaggacgatgatagcctggctcctatcgatgaagcgaagataccgatgataaaagacaccaagaatataattgaaaatgagcatatagtatgggagaaagtctacgaatcaaaaacaaaatga

SEQ ID NO: 4495 - DNA, 2520 bp, Saccharomyces pastorianus
atggatttatttataaggacagaagctagcttctatgacgtgctgaaaaaattgctcgctgtctgtgagtctcacagcaggtactctggttcaagtttagacccaatggttaaagtcggttgcgaaatgagggaaatcagcagttgcttgaggcgaattttaagaaaacatgctgcagtttatcacaatctatctctaactgaaaataccatgaatttttatagtgatttttttgaagacgtaagagtactagatatgtaccacagtcttctatttgggtgtatgcgtttgcttctggatgcagatatatcattttttagaatgaattcccaaaaatcctttaccatattactattcaaggtatattacaaactaagggatgtttactacgctacaaatgagacgcgactggattccctactcaatgcatttatataccaattcaaaaactgctataattctgtcagttgcaacacgttgaaatatggcagtgttcgtgacattatgtctcagaacttttccttgataaatcctccttttatcggcctgaaggaagtgaccaaaagaacctatttcagattagatattgagaagctgaagatcaataataaacttattgagattctggaattgaataacggaggaatcgctctctttgaggttcttggtagcgaaatgccatatacttcacaaaacgtcgaaaccctgttccaatcccttgcgtcaggtaaccatgatttgatgaatgtcggtaggtcgttgctgtttcaaacactaagagctggggatctagaaataattaaacttgatgacaacggggctaagctgaaaacgctgacaggtaatggcgtagtgctaaaaataacgtgtaaagaccctagtcagtggcaagcgcattggaaagatatcatcagaaatttatccgatcgattatcaatgaataagtacaatggatgcaagagcgatttttcacagaactttcatgcaggacacaacaaagtgggatataatcaacccgaacaaaatgccggcatggcaactggctctactgaaccatcagtcagctcttcaaatacagtacggagtagtggtactttgcatagatccacccacttaccggggggtttgtcttccttggtggaagcctctcaagaattttctgcaggagaatcgaactcaattttgaatggaaaggtaatatccgataatgattcagacctagaaacctcattaaaagatattgaatccttaagctgtgaaaagctaattgaattagatagaagcatacaaattcctctgtcaccgaaaattttggatacccctactttaaaaaacgttagaacagcttctcaaatattcagtttggagaacgtttcgcctgaattgctagagagtgcttcgtctgaaatctgtgatgatgaaagtataatttctgaagatgaaaaggacaacggtgaggaaactgtattcgatccaaacgtcgattactataagccggtactttatcgacgtaaatcctcatctttattgagtgtctttacttcgaaaaacaaaaaggacttaactattgacatccccaagaatcgttccggatcgttgtttagtatagctggagatcaacaattgcttacgcctatatcagcaggctctcataacagtgatgttggtgaagcgtacgtgtcagttccatcggatgtggacgcctccagcagtgcagtattctttgaaaactattcagtcaaggtttctctatggaatggtaagtcatgggtgcagttgagtaaagaagcaatgtgcctctctttgattctctctggtggtaatgagacccttttaatcataagcaaaaatttcaaaagggagaaatgtaagtttgttgtcaaattagaatctagctggaagtgcaacaggtcaacagcccaagatgttcagcttcgaatctattcttcagattttaaagctagtgtattcgaaatgaggcatgacgttacactgtctatacgctgttcgcaagccgaccaattaatgagcgtattacagtatcagctacaaaggattcaagcgccatcccttccagcctctgctaccgcaaggactttatcgaccatatcttcatcttcatgtttcagtcgaaatgtaacacggtcatctacggaaaattcagaattggccaatatgaaaaatggatccgggggtgtaaattcgtcacttctgctatcttcaataaaagtaaggcaacacgttaaaaccaagcccgatatttggaaaccatctcgggttggctttgctgatatattttctcaggaatataaaggaattgtggtagcgataaaatttgtgatttgctctgatgccgagggaaccttgaaccctagagagtacaattctcgtctccacgatatcaaaaggctaggaagaacaggcttgtcgcttgcggatcgaacaggagcatatttgctggaattcaaagatcgaaacgctgcagaccaagtttataaactggctatgccaccaagctag

SEQ ID NO: 4496 - DNA, 3345 bp, Saccharomyces pastorianus
atggctggtgacattatagttagtgaggtggacggtccgctggacgtggtcggatgctttgttaggaaagaagatgggctccaagagcagaaacgacaattggtggttgttgggctggaacgtgtcgatgtatatgcaggcgtggaacaagatgagccccgtaaagtcttaagtttcaggactgacgggtgtacggtggctgctttttactacagagatcactccgtagcagaccagcggttttttattttgttgaaggccacaggacgacttgatttcattgacctggagtacaaactggtgaagtccctggaaacggagatcgaccaggtgagatccgagccaaagtttctgtttcaagacccgctgcggccagctttggttttcaacttatcttgtactgaaatttatgagattcccacagacgatattcttggtgtagtacaagctgacattaagttaagctatatcacctcttcgccaatagtgtccatagatgcatgcataaatttcaatgatatcttggataaggatgcttttacgttgtccattctcacacatgcatatggtgccaacgagtacaatttagaggcctgtgtatgcgtattcgagcctaagccagctaaaactgtcaagtggaaaagaacaaccaatgtgtcctttatggatgaagccgtggtttcacaagtacttttaaagtcggtagctaacattggccatttcgtcttttcgcccttgaaaacttatcttattaagcatgcaccgtcctcgaaacaaacgattaacggtgaagagataggtacgatgtatttagggtctggggcctttgaatctggacatgaagaggcaatacactttttgcgacccattttttcagaggttacattaaaatatttagcgtttatgttcatgactgatacgggtactttgatcacatgtaaactgaatgcgattttaagcagttttgaagacgatacgtatatgtgggatagtttcgtctttgagaggtctaataccgataacaatataccattagaacattatttttcagcatttttcgatgagaagcgttggatgcttgtatgcccgaagggctacatcacaatgaattcattcgaaaatcacaaccatagtgttttcatcacgtttggttctttgcttcgtaaatcaacgctatatgcagatttcacaggaaactacatccgatctcatatatcatgtggctcgttgcatagtggacagggatttttgagcctgaaatcacgattatttatgaacatatttgctgtcacttcaaaggagccatttttccagacaagaaacggtgcccctcttcaagtctacgctacaaagaaaggtatttattgggcagatacggataattttatttataaggacaatgatcgaataagcacagagacaaacgttgatctaattgttactggaaagggaactttactgaaggacaaatctatcgttactttagcttctattgggaaggatgaagagtgcaattatgtatatgtcacgaaacaaggccacctgaaatggagtcatctggaaaggttttatcagattcaaaatttgcaaagagctttgaccactgaaaattgttgtttatctgccatctctagaaattgttctattttgacagtacttgtattaaatgatgaaattatggtatttgattcctgcaacaaattgaaaaatcaaaacaaaaccttcaatatgctttctaatatatcatccctctttctatacgagtccgcacatatagtttatattctcatatccgacattgaaggaaatctttgtgttatagacgcatcgacattggaagttttagaagaagtgaaaatttgtaagaagaggctacaattctgtggagtacccaactcggattacgttctcatatttacgccagatactatagttcttttcaagccaagtgctttaaagggggaatttgatatacaagaagtatacactccatatcacataagccatttggtgccaggaaaaaatgacagctcagttattatggttactcgtcaaggccaattttatgacgtgactgtccctggcgatgttggtgaggccatttttagttctaaacttgaacaagttccaaaaccttgcctcaaattcataactttggaatcttcatcgaggtacatttttgtcgcagctctgccgatagcacaacaaaggcacgataattattctgaaatttatgtttatgacattaaggagatcaaacgcatccgtacttttaatttttgtagtgttgataatggcaccaagagcataaaatatgaaaacgttttgataacagatatgattggtgtacctatcctcaaaagaaaggaaacattagccaaaaagaaagcttccgagttgtataaggaagtgattttcaattcatgcgttttggtgtctttgaatttaaacccggttgatgacattgatagcaatgaaatgaacaacttgatgttgttttcttttgatgagaaatcagggaccatagaatatctttttgggattaacactggattctcggttaccgggctgtacaactactataatggttgtattttggcccatggggagtcgatacaggcataccaactaaattattcagtccatggaaataagtttagcatagaacatgtatcaaacagactaaacatctctggtgttgcaataacatcatctatattttttgaagaagagaaggctaaaatggctagaaaacaacaaaacataaacacttgggtgtatttggaaaaaatgatcctacttgatgtacgtaaaggtatgaccagatttaacattacccacacaacagatggtaacattgaaaagatacaattgcaagtgcagcctcttagtccacttggaagagagctcatcaatagcactaccgatcgtgggataatgtttactggtgtggcaacggtaaccttcaagggaagtaggtacctgttgacttcgtacggcagccaacgtctcaccttgtttagttttgcatttggtgatgatgatgatgatgaaatagatcaaaatgagttcgatatcgccgcacaagtgacaaccattaagtctgtggaaatcgctcatttcagtggaggcgtatttttaaacagagcaacatttacaccttttttcttagttactaccttaggcaacggttgctatgtaatcggttttctacacgaagaatcggttatttcatcgtttaaactatcagaagtggaagcagggtttacaagcgtggaaaacccaaaatacttgggacttcttgaccctcacagggatgatcacgatatgatatctgagcgttaa

SEQ ID NO: 4497 - DNA, 2307 bp, Saccharomyces pastorianus
atgcggagacattcaacatatatgctcaaactgaggcaaaaaagaacgatcggagtgcaattagggaatatgacggtggaggactcggatcacttgcttatggatgtcaatcaaatagattttttagatgacgcgacggcgcaaacaggcgattgtatggctgatgattatgacgaacaattttatgaaagggatctagccagcggagctatagtggttccaatgactttgaatgagcagcctattgaaaaacatggagaaaaattgcccttaaagttcagattggggccagtttcctctcaaaatatgggatttataactgcagaaggtaaatataagctttaccctgtgaaaatacctagagtagatacaacaaaagagttcaccacgtatgtgtcaagcttatttgaaatctatcgtgatttgggtgatgatagagtatttaatgtaccaactatcggggttgttaattctaatttcgcaaaggaacacaatgcaacagtcaacctggccatggaggctatattgaatgaattggaagtgtttatcaatagcactaaagatttgaacggaagattgaacagattctatgagttagaagaatcattaaccatattaaactgcttaagaacaatatacttcacattagacggtcaggatgtagaagaaaacaggcctaaattcattgagtcgttgttgaattggattaacagatcagatggtgaacctgatgaagaatacatcgagcaagtgttttcatttaatggctcaacacctggtaaaaaagtttttgaaatacaatatttctggaaacttataaaccaattagtgctaaggggtctgctccctcaagctataggttgcattgaaagatcagatcttttgtcatatttagaaggcacgtgtgctgtttcattcgatgcaataggcgattccattgaactcctgaaacaatatccaagggattcatctagtgcatttagagaatggaaaaatttggtgctaaaactgggtcaagcttttggcagttcagccaccaatatttctggtgagctgcgcgattatattgaggacttcttattagtaattggaggtaatcaacggaaaattctgcaatattcaaggacgtggtatgaatccttttgtgggtttctattatattatatcccttcattagaattatccacagaatatttagaaatctcattggagtccaaccccgttgatgtaacaaataattgggagcaatcgtgtgtcgacatcattagtggtaaaatacactctattctgccagtgatggaatccttggatagttgtacggctgcattcactgctatgatttgtgaagccaaagggttgatagagaatgtgtttgaaaatgatgaaagtatgggtgaatataactatgaagataatgaaatgctagaggatctattttcctataagaacggtatggcatcgtacatgctaaacagcttcgcttttgagttgtgttcactaggtgataaggaactgtggcctatagccattggtttgatagctttatctctcacagggactagaagtgcgaagaaaatggtgattgcggagttattacctcattacccttttgttacaaatgacgacattgagtggatgctaagtatatgtgttgaatggagactgccagaaatagcaaaggaaatatacaccacgttgggtaatcaaatgctatcggcacataatatcgttgaaagtattgcaaatttcagcaaagccggtaaatttgaactagtaaaatcttattcatggctattgtttgaagcatcatgcatggaaggccgaaagttagacgatcctgtattaaacgccattgtgagtaataatgctactgcaggagaagatttcctaataccggaagatattttgaactgtgtagtgactagcgccatgcgccaaactttagcaccatatgccattttatcacagttctacgaagagagcgacagtggacgttgggaccaagcactatatctattgcttttattgattgaattcccatttttaccaaaacactatttgattttacttgtggcgaagtttctgtatccaatctttctcttagatgataaaaggccaatagatgaagagtcagcggcgaaaataattgaagtcatagaagccaaatgggacgaaactgatgagaggactttgaacttgtatgaaactattattgaaacagaaaagagtctacccaatagtaccttggagcttttgaagagtgtaagaaaaaaactgaattttaagttatgtcaaacgttcatgtaa

SEQ ID NO: 4498 - DNA, 1389 bp, Saccharomyces pastorianus
atgatcatcgttgaaatcctggcgggcggaactcgtattattgaaatgacaaacaagcttctcgtttcgttgaaagtacttattattcaattgaatccccagatcgggcagacggaccagactatcaagagaacatggagtattctggataaagtggcgagaagttccacatatgtgaagcctgatataatattatttcctgagtttgccttaacggggtacaattttcactctaagaacgacattctaccctatgtgtctgggcaaggtgaagggccatctttccaattggctaaatcagtatctgagaagtttcgctgttatactataatggggtatcctgagcaagctggtgagcagaagctgtataattctgcgctagtgattgaccccgagggaaagcaggtattcaactatagaaaaacttttctctatgatactgaagagaactgggactgtggggagaatccagagggatttcagactttccccatgcattttccaaaatgtgccaaacttcctcacgagaaaagctttactagaaatgtgaccctgaagtcttcaataggtatctgtatggatctaagcccctataaattcaaagctccctttaatcacttcgaattttcctcgttctgtgtggataataacgtcgagttgattttatgctctatggcatggctaaactccacttcgatcactgataagcaggttttacaaaatgattcgctattaaatgccgccaaggacaaaatagcttttggtttaaaggagcaaggattgcccctaagtggatctcacggtgtttaccagcttaaaattggtgattcgcaacatacttctagagtgccctctgaaaactgcacgagtgactacaaaaatatggatgaaccagatatgacaaatgtgaactactggatgctgcgctttttccctcttttatattacaaagcaagaactaagtggtttagagattcatccctcctggaaagtatcttggccaagagtaaaatgcctctagaccatcaatattataaggatgaaagacataaagaagacactacggaccttgtggattccgaaggaacgataaaggacgctctactagaaaaaacatttttgggagcatccctaagacaaccctggaagtttaaaggtaaaaacgcagtcttagcagtggctaatagatgcggtattgaagatggaactacaattttcgcaggaagttctggtgtttataaatttaatggtaaggaaacggactatctagaaaatagtgaggacactacacttgactctcggaatgaaagcgtagaactactgggcaacttaggcaaaggcttggaaggcgctattttgcgtgaagtacagtttgaagtgtcaaggtaa

SEQ ID NO: 4499 - DNA, 168 bp, Saccharomyces pastorianus
atgtactcaatggccttcttggcttcttccggcttggtagcgaattcctcagcaacggtcttcaagttgaatagagctctgaatctgttggccaagacggtcttgccggatttgttaaccaagatgtctcttagctgttctaaagtacattcatcgacgttttcttga

SEQ ID NO: 4500 - DNA, 567 bp, Saccharomyces pastorianus
atgagcaacaaggtagtcgagttatacgggggcgccatcaccacggtcgtcccagctgggtttctggatgcctcttccttgagagaggtccctgatacgcaagaggtgtacgtcaattcccgccgtgatgcagacaagtttaaagacgggttggccaccaacgagagcatcatcgtggacctcttggagaccgtcgacaaggcggacgtgagggaagcttggaagtttcacgtggatgacctgaccgagttgaacgggacgtcccagtgggagactttgcaagaagacaccgtccagcaggggaccaagcttacagggctcgtcatggaagtggcgaataagtgggggaagcaagacctggcacagactgttgtcattggcgttgcattgatcagactgccccagtttgacacggatgcggtcatctccatcaacgtacctttgaccgaagaggaggcctcgcaagcaagaaacaacgaggttcctccaagatgtcgtgccgtctacaagtttttgcaagaaatggtggacaagttcgtcgtcgtggacgcttcgctgtttgcgtga

SEQ ID NO: 4501 - DNA, 1332 bp, Saccharomyces pastorianus
atgtcgctatcgcacagaacaaagatgataccgctgccagtactagaagaatattgtatttcgccagaccatgggtttttggacggccggttgcccttgactaggctgaccagcaagaaatacacgaggtgggaggatatcgtggcacagctgccttctcttttgcaggatggcagccaggtgcggagtgctatcgacgagctggaggtgttggcgctggacgagagcatattgggcgatgtcagggagctcagaagggcctattctgtgctcgggttcatggcacacgcatacgtttgggcgacggagaggcctcgggacgtgctgcccgagtgtgttgcaggaccgttgttgcatgcagcagatatcttgggggtgcctccgctcgccacgtattcttcgttggtgttgtggaacttcaaggtcgcagacgtgtgcgagcagccggaatccgggtgtttggacttggagaacatcaccaccataaacaccttcacggggaccgtggacgagagctggttttatctggtgagcgtgcggtttgaaaaaatcggtagttcttgtttgaaccacggtttgcagatattaagagccataagagacggtgatgacaaggccgtgacagacgggctgaataagttggctgcagccattgagaggttatcgcgggcgctgatggaaatggagaccaagtgtgagcccagcgtgttttatttcaagataaggccttttttggccggatggactaacatgtcgcatctggggctgccacaaggcgtcaagtatggggcggaaggccagtaccagatcttttctggagggtccaacgcccagagctcgttgatccagacgctggacatcttgctgggtgtgaagcattctgccaacgctgcgcattcctccaaggccaaccagaaggttaattatttggatgaaatgaaaaaatacatgccaagacagcatcgtgagtttctttaccacctagcgtccgtgtgcaacatcagcgagtacgtctccgctaacgcttccaacgagccattgcaaaaggcgtacggccattgcattgcgatgctgcaaagattcagagacaaccatatccaaatagtcaccaagtacatcatcttgccctccaattcgaagcaagagaattccaacaaaaagggggtgttgagtccaatcgagcccaacaccaaggcagcggactcctcgggacccaaaaccgcctcatgcaagactatcggaactggtggtacgaaactaatgccctttttgaagcagtgcagagacgaaactatcgccactggtgaagctaaaaaagagaacaaaaattga

SEQ ID NO: 4502 - DNA, 303 bp, Saccharomyces pastorianus
atgcctttttgcgaccactaccaccctctattcttttttttttcctttattcatactttatttaaaatcaattcagccgtaattttgtccttactgttggacttagtagagatctcctttaatttagattcagacaacttgatcagtttattcttactctcccctatttcccgagaaatcacattaaccaatgcccatcccttcaggtacagttcgctcaattccacgcttcttagagcgttcttcaacgccttgtctaagagctcagatttggcttgttttttgttacgaagggcttcataa

SEQ ID NO: 4503 - DNA, 1035 bp, Saccharomyces pastorianus
atgttgatattcgtctcgcgtgacgttttaatagcgttggttgataaattcatagaagaagtgagtatctttgactatttgagtaactatagaggggtcaatgacattgacgaatgtgctggaaacacaacaagtcgagccgaggataaatcgaaaacgatgatgaaagatttggttagagaaaaactcttgactattatgaataccaaggcatatactcgatttaatccggaacagttactgaaactggaaaatgaggtaaaactctacatgaaatgtggagattccgcactaacagagggcaactacttcttcttgatggaaatgcttttctatgttctggtttacttaaaccaagacgtggacgcgcaagttatttataatacactgagagatcgtcttggtgagagttcgtataagatggtcattatgaaagccaccctattgcaaataaatggtgatgataagggtgctattgagtatttagaaaaattattgaaggacgatctagaatacgaaacagacttcgttacctatgtctccattgctaagaaattgatagcgatcaagacgaatgccaaggatttaaaccaggaagccgttctgcaagaattggtgaagttgatggataagttccctctagatgctgaattgtggtggtatgccaatgagatttatttcgaaatgggccaatttgaaagggcccgctattgcttggaacaggtcctgtgcatcaccccattcaattatgtttgttttggtaagctaagtgaaactctatattatgaagcccttcgtaacaaaaaacaagccaaatctgagctcttagacaaggcgttgaagaacgctctaagaagcgtggaattgagcgaactgtacctgaagggatgggcattggttaatgtgatttctcgggaaataggggagagtaagaataaactgatcaagttgtctgaatctaaattaaaggagatctctactaagtccaacagtaaggacaaaattacggctgaattgattttaaataaagtatga

SEQ ID NO: 4504 - DNA, 507 bp, Saccharomyces pastorianus
atgtcattagcgaattcactaacgcactacgaaatcttaagaatcccatcagatgcttcacaagaagaaattaaaaaagcatatagggaccgtcttctgaatacgcatcctgacaagcttactaagagtgaaaataacagagtaaataccgttacgataaataaaatacaagacgcttatagaatattatcaaataatcaaacacgtgttgaatatgacaagatgatccttgagaactataaaaagcaaggatttcataattgtggtgacgggctagacgagttttcactggacgatttctcatttgatgacgaaaagctcgagtttatgatgaattgtcctcgttgccaatttgccaacgggttccacttcaacgaaaatctcctagacgaatgcattgataacgtaaacatcattgaacagagccatgatggatatcaattgttaacccaatgtagtgcgtgcagtttatggctaaaagttaattttgatgtcgaggaagagtga

SEQ ID NO: 4505 - DNA, 1965 bp, Saccharomyces pastorianus
atgagaaatccaactgttgatgcttcaggtcaagacgataaatgcagtgaagaatcactcgctaactcaataaatagtaatagtaatttcagctcttcttcggaaggcggaaatgaatgtgaatttggtagagtagaaaaggtggacacattgattggtggtagaagagttataaacagtaatgtggaaagcgccaacaataatgatcaggagacaaggactgcggaaccacttcagtcttcgattaacagtcgccaaaattcagaaaaggagcgcgtgaactttattcctctcgacaacgatgacgaagaactcgataaaattatttcgtacacccctgatggcggttttgacagctctcataaaactttttcgttttccttgccatttggtaatacgaattttaaatcaaactcgccgttggctatatttaaaacagtcctacccaagacccctgatgagatcatcaaggatatttcgaggaagaatgcaatcagactaaagctgaagaaatcaaactctatttcttcgttggaagaaatggagttatttaaagatgaaaaaggtatcgataattccagattaagggctgttaaaaaatcattagaaatggatgcgttgaagaactccttgaagcaaataactgcagacccgttcgacaaaacacatgacggatactaccgctcaagattagagtccatatggaatgaattagaaggtgatattgtcataatgggcggttaccgaggtagtatattaagagatgcaactacacataagcgaatttggatcccgttaagggcaggtcttaatatgacgaaagtagatttattgattgggcctaatgatgaagatgaattggcaactcaaaaaaaaatcatccccgatgggatgttgacgcacataggtcctgtcgatgtctctagaagattgattaagaaattagaagcgaacccaaatgtaaacattcagcagtttggttatgactggagattatcattagacatttctgctgagcatttgaagagtaaattacaagaactgtatgataagcagattgataaaaagggagtatatattatctctcattcgatgggcggtttagtggcgcataaagttttacaagactgtacgcatttgataagaggcattatttacgtgggttctcctaatcaatgtccaaatattttgggtcctatcaggttcggagatgatgtgatgtggaacaaaaccattttcagcaaagaaacaaacttttttatgagaagcagcttctattttctaccggtggatgggaggtgttttgttgacaaaactaccttaaaaaggtatgattttgactattttgatacagaagtttggaagtatcttggcctatcacctctggttaatgaaaagagaggtaaattagccgacgaaaaagaaaagttactgcccaaaaaatccaagtcatcactttcacttaaagctacattcaacgccactactaagttcgtcttaagtacacctgtagttcgagctgttacaggtaataacaacaagcagtcagtaaaagaaataccctctgatgaggtcttccacacgtcttatgaagatagctgtgaatatttaatgaaagctttgaaacgtaccaaggattacttggatagtctggattatgattcgagtaaagaatatcctccattagccatggtttacggtaacaaggttcccactgtcagaggcgccaaggttaatggcatacaagatattagagacggaaattacgaagatctttactatggccctggtgacggtgttgtgcatcacaaatggttattgcctgaacaaagaggttttccggtcgtttgtaaaatagctagttccgcaggtcatgtcagtttaatgacagatttgaaatcaatggcgaaggcatttatttctattgtcgatagtgagagggaaagggcaaacccaccttcatga

SEQ ID NO: 4506 - DNA, 969 bp, Saccharomyces pastorianus
atgctccccatcacacggtcatgcgtgaggcatttcactacgctaagcaaaacgcttacaaattcccccggtagaattgtaagaaatggttcatttagaaggataaatcgtgaaacgaatttaaggataaatacgccacctctatatacatttagtggtagtagtaataacgatacgataaaggtacatgaccccatagctaccacgattttaaatgagcccactgtcatcattgaaagacagattgaatttatgaatgtcttcttaggattcgagcaagccaataaatatgccattttggatgtaaatgggaacaaaattgcttcaatgatggagagagatttctcaataacgaaggctataatgaggcagttctatcgtctacatagaccgttcttagtggacgtcttcgataattgggggaacgtcataatgacaatcaaaaggcccttttcatttatcaactctcatatcaaaactatcgtcccaccatctgcgtatgttgataatggtagtggcaccacacagtatcacgatggcaaagatggaacagtagtgggggagaccatccagaattggcatctttggaggcgccgttatgaattattccagaaagacggggcagagggttcttcgtttgaccagtttggtaagatagatgcgccatttttatcattcgatttccctgtgttagatgccaatggtaagataatggccagtgtagatagaaattgggttgggctaggtagagaaatgttcacggatacaggtgtgtacgttgttagatttgactcgcaaagatgtttcaaggacatctatcacgatgaaatgttaagtgatcaagtgctgagtttggatcaaagagcagttttattagcaaacgccgtctccattgatttcgattatttttcaagacattccaggcagtcaggaggatttcttccatttggtggcggttacgacgagtag

SEQ ID NO: 4507 - DNA, 783 bp, Saccharomyces pastorianus
atgattgaattggttctaagtgccgagaagggggaactgggctcgggttatgtggctgttgatcatggaaagaatgttgttatattagcctttcgaggatctacaactaaacaagattggtttagtgattttgaaatatacccagttgagtatactccgctttgcgtgaatgaatatcgcaagcttatagaggaaggaaagctaagagaatgtaaaggctgtaaaatgcacagaggctttctcagattcactgaaacccttgggatggacgttttcagaaaaatggagagtattttggaaagctatccagattaccgaattgttgtgacaggtcattcattaggggcagcattagcaagtttggctgggattgaattgaggctaaggggctttgatcctttggtcttgacatatgcaacaccaaagatatttaatagtgaaatgagacaatgggtggacgaattgtttgagacagaggctatagaaaaggactcaatatcaaaaaaagaaatccagttccgtaaggggtattttcgagtggtccataatggagattatattcccatggtcccaccattttatcatccggccggtttggagatttatattaacaagatcggaatacctcaaaatgcagaagatgttgagtatcgtggtagaaacaacaagatggctctaaacgatggattccgggatggcatgagcggtttagttgaagactggttacatgtttatgaacatcgagcctattttatcgacgtatttgggtgctctggactttaa

SEQ ID NO: 4508 - DNA, 264 bp, Saccharomyces pastorianus
atgtccccgtacatcaccattccacagcaatacttatacatcagcaagatacgctctaagctgtctcagtgcgctctggctaaacgtcaccacagagacctcgacctgcggaaaatggtcggtcacgccaacctgctggacagggtccttgacgagatcgacgccttagatggtgactttgtcctcttcgacggcgctgcagcttccacttccagcgacgcctcttctctcggtaatagtattcggcccatcagtataatgtga

SEQ ID NO: 4509 - DNA, 870 bp, Saccharomyces pastorianus
atgctgtttctgggactagctgtccattgtaaagccaacccgcttttacaagacgtcatttacgaagccgctaagcttactgagtttaatggtcacgaggatcggacattgtacgaccattggaaacatgattctaatgctactatttcattacttgacggtttgtcgagctacaactcgttccaataccatctcggagtgcctgcagcgaacttccagtttagtgctaatgacacctcgggcgcagtttatcacggcaactccatcctcgatagtccggcttggttagaaaagttcaccagctccgactataagttgcacaacaccatggccatgtttgttggtttaacaacgctgatgctcagtgaaaatgagctcgcaagatttaacactcacgtttacctaaaaaagacgtacaattggtacattgagtggtactccaaactatcatcggcattccctaacgaccaagaattggcccatctagcgaaaagggtcctagaccttttgaaagtcgccacttgggaagatagtgttcgatttgataagcaaaatgaacttctatataaagaatgtagagaagctctccccgtttggacgttttacaagaaaattaagagctatattaagttgcaaagatcgaacagcaaatcgaaacaaattgatcaactatttatcacacacagagggctgaaagatagggaatggatgaaatattccctcttggagcctgataaattccaagggtccgtgggggatgttttgcctggccttcatgaagcgttggatgatatggatagagaagaggtagctcagtggctaaccattctgttaagccaattcagcaacgttcgttacttactccagtaa

SEQ ID NO: 4510 - DNA, 1527 bp, Saccharomyces pastorianus
atggtagagccagaagataatgaaatagaggccactggattgcaacagtatagcggtgatagcacacgcgatgacgatgaggaaaacacgaacgattctttcacactaacatctagacataggggccggagtaataccatatctagtatcgtcagcggatacgagatagtgaaggaacacatggacaaggaacggtttatatacttgattctggctagtctacttctatacttgagctttgtggcagcgtttgctcctaggacgtcattgtcaagagacttccgacggttccactcttccaagttgactaatgctgaagtatacagaatatacttgaattcgttacaacaggagaataaagcaaaagaacatgtgtacaagtatgccggccacatggatagtgaactgggtgcctcgtcggcgcttaagtatactttggacgagtttctggatatggaatataaacccaaaatcgaaaagtactatccttgggttggtgagttggtagacactaacgtagctcttttggaagatgacagagtgatttaccaagccagtatggtcgaagacagaatcagagacgatcccgctacacacatgaaaagaagacaaaaaggttttcatcaatactcaaaaaatgggaacgtgactgctcagtacgtgttctgtaattatggcagcatagaagactataaacgacttttgaacaagaacattgatattgaggacaagattcacattgtacgatcgggtaaattagtatctgggctaaaggtcaagaatgccgaactttatggtgcttctagtgttatcatctatacagacccctttgatgatggtaaagttaccgaaaaagatggctatttacattatccttatggcccagcaagaaacccaagttatattgagagagatgcagttaattattttagcgataccccaggggatccaacgaccccaggctacccttccaaggattatgacactgaacatatgtcacctgtaggaagagtaccgaggataccatctgtaccgatgagtgccaaggatattcaaccaatcttagaaaaattgaacggtaaagggttccaaatcggtcctggtagtaatatcaaaaaatttagatcattcacgggaccttctagtttcaaagataaggttcatctgcacaacgaattaaactacaccattaaagaaattgctagtgtagaagttagcatccctggtatatttactgagggagagattataattggagctcatagagattcattggctttaagcagtgctggcgatgctagtagcggcagcgctattcttttggaaattgcacgaggcatgagccgattattaaaacatggttggaaaccattacgtcccatcaaactaattagttgggatggtgaaagatcaggtttactcggttccacagattatgcagaagctcattccgccatactcagaagaagagcattggtgtatctcaatctagataatgctgtttctgggactagctgtccattgtaa

SEQ ID NO: 4511 - DNA, 3801 bp, Saccharomyces pastorianus
atgtttgctaacggtaatcagtctaatttcgccaagcctgctggccacggcatactccccatcccgaagaagtctcggattatcaagactgacaagccgagaccgttcttgtgtcccacgtgcacaaggggatttgtcagacaggagcatttgaagagacaccagcattcgcacacccgtgaaaaaccgtatctttgtatcttttgcggtaggtgttttgctcgtagagatctagtgcttagacaccagcagaaactacacgccgctcttgtagggacgggtcatctgcagcacatggccccgtcaccgagccccagtgcttcgttcgcccccaagcgccgccattcagtgactgcagacgacccgtctgaccttcacatcattaaaatagccgggaacaaggaaacaattctgcccaccccgaagaaccttaccggcaagacccctgaagagctgaaggaggccgtggtggctctggccaagtcaagtaacctggacttccccaccccgaccccttcgacgagcagcgaacaagcagaaatggctcccaggaagacaaattctctagcgttgcaccacgctaaagaagctggggtgaaagacgtaccgatccattctgcatccagtggtgacattatcgagaaagtacgcaccccttccaccccatcctccatgcacaagacgaaaagacacgcgtccttttctgcgtctagtgcgatgacttacatgtctaacgacaacagtcctcgccatactatcaccaacttcgaactcatcgaagaagctccgcatcaggtcggattctccactcctcaaatgactgccaagcaactcatggaaaccgtttccgaactggatatgcccccactgactctagacgattcgtcgcaggccatcaagtttaatttgaacttgtttaacaatgatgcttctgagcagcaacagcaacagcagctgcgctccacctccgctactatcgtaaacagcaacaatggcagcaccattgctacgcccggtgtttaccttttgagcagcggtccctctttgtcagatctcctaacgatgcactccacgcatgcgggtgcaggcggatacacagcaagccaccattcgccattagattttggttgtttcaaccataataaacggacgtcttcagaatttatcctgccttcgagtttctcgcatagtatagcatcgaactccattactgcttctaacagtttcagcaatttggcgaaccaatcctatagggaaatgagcaatgagaaaccactcgcgtcactatctccaagacatccgccaacaagcgtgtcagattcgtcctccacggtgcatttcaacgctagcaccaataattcattggaaccgatgatgggatttaacgacaatgatagtaatgtcgatccggctaccataaacgatcaatggttgtctgatttcatcaacaacgccgatcaaaaatccggcttcaaaattaattttaaccatttcaatgatatcggctttacttattctccgccttcttcaaggtcatcaataccaagtaaatcgcacccaaaccagtctgcctcctcagttgggtcatctaactcagaaaagaacacattatcacctcatttgaacttgacctcaaacgggaacacggatttaccagttacaccacaaaaccaattaaaggagccttcccaatcagattcaatatccctgagctcccataagagacgtcgggatagcattatgatggactataacatatccaatcttttcagctcgagacaattggatatgtcaaaagctttatttgatacaggactaaacaacgctaacgccgacgacgataatctcactttatcatatactaataacgctaattccactacgacgtacaaacaattgccagcggtaacaccttcagacttgttgtccccattttctgttcctccaacctcacaagcagtttttactagcgaactaagaagtatggtgttaacagataacaacatcgaatcgaaagctttccccacaatcggtgaattaaatgattacgttgcttactataaagaggaattccatcccttcttctcctttattcatcttccttctgtcgcacccgacatggacatttatcccttgttactatctatctctatgatcggtgcattatatgggctccattcaacgcatgccaaagtattggccaatgttgcaaacacccaaataaaaaagagtttaaaagcaagtgaagcagccccagaaacgacaccgttatgggttattcaaacatttgtactattgacgttttatggtatttttaacaagaacgcatctgtgataaaagggatgagttgtcagctgatgacaattattcgtcttttgaaatccacgcggttgaatttaccgttagagtcaatttgccaaccccccatcgagagcgatcacgtcatggaatatgaaaacagccctcttatgttttcgaaaattaaagcgcaatatacttcgccggaccaaatgaacaaaaactatcagtattttattttggcacagtcaagaatcagaacgtgccacgcagtgttgttgttgtccaatttgttttcttctttggttggtattaactgttgtttccattcaattgacttgaaatgtggtgttccgtgctacaaggaggaactgtatcggtgccaagactccgatgaatggacaaaattattatcccaatacaagatcacattggattcaaaattctcattgattgagttatctaacggtaatgaagcatacgaaaattgtttaaggttcctgtccagtggcgacggtttcttttataaacatgccaggatctcattgagtacatgtctttccttactgatatctattcatgagaaaatcctaatcgaaagaaataatgccagaattggtgataacgatgataacatcgagctagatgatattgaatggaagatcgcttcaagacaacggatagatacaatgttaaattattgggaaaatctgtatttgaaaaatggcggtatcttaacacccaccgaaaatagtattccaacgataaatgctaatccagcaatgaggctaatcattccgctatatctatttgccaaaatgagaagatgcttggatttggcgcatgttataaaaaagatttggctaaaggattggtccaatatgaacaaagctctggaggaggtttgttatgacatggattcgctgagagaagctacagaatatgccttaaatttagtagatacatggacttttttcctctcgtaccttaaacgggataattgcttggtctttaagactgcagttttcactaccacatgcatgttcactgctgtgctagtcatttcagagtatatgaaatgcatcgaggactgggcacgcgaatacaacgctagtaaccctaattcaacaacattgagtttcgcagacaggatcttatggttgggggcagagaaagtcttgaaaagattacaaatgaacctgctaccgaaagagtatgacattttaaagtcgtataccgattttctaagatggcaagataaggatgcgttagatttatcagcattggatgaagcgcaagcagagagagccatggatcctagtaccgatataaatgagacgattcaaatgattatcgcaacaagcctatcctccaagtgtctgtatttgggtgttagaatactgggtgacgcaccaatctggcccattactctatcgttcgctcatgcattgcaatctagagccatatatagcgttacaaaaaaaaaaaacattagaatttag

SEQ ID NO: 4512 - DNA, 744 bp, Saccharomyces pastorianus
atggatggtatgaaaaaacatttgctagcacgttccaaaccttctttcctatcttacattggcgaaagagagcgaggtcttaacggtgtgttttcttcaaagatggaccacctcgtttgtttcatgggtggtttattggcatctggtgccactgaaggccttcctgttcatgaggcccgcagaaggccattctgggatactgacagggaaaatgactgggatttggctaaagagttaacgaatacatgttaccaaatgtacaatcaaactccttcagggctagctcctgaaattgttgttttcaatcagggaaaagcagcaccaagaaattggtggcagtcgtcactgggtgatttctttgtaaagcccttcgataaacataatatgcaaagaccggaaacggtggaatcgatcatgtttatgtaccaattatcccatgataaaaaataccgtcaatggggtgctgaaattacatccagcttctacgataatacttgtgtcagttgtaacgatgcgaaattgagacgcttcgcaagtttaagtgattgcatcacattgcctacaaaaaaaactaacaacatggagagtttttggttggcggagactttaaagtacttatatatattgtttttggatgactttgatttgactaaagttgtattcaacacagaagctcatcccttcccagtgctggataaggaggtattaaagtctcaacatttgaccacagggtggtcattatag

SEQ ID NO: 4513 - DNA, 741 bp, Saccharomyces pastorianus
atgcggggtctcgttgctaccattattgttatcgtagcaaccgtctattacgtgccatggaaagcttattttaaacagaagccagaggcctccagagagatgagagatcgaatcgaaaccatgttcttggcgtcgtggatggactattccaagtatggctggggttatgacatttacggcccgatttaccactcttttcgcaatatgccccgtggcggtcagccgctgggttggattattgtggattcattggacacgttgatgctaatgtataattcttccgcactacacaaaagtgaattcgaggctgaaatcctgaaatcagaacactggatagatactgtcttggattttgatatcgatgcggaggttaatgttttcgagaccaccattagaatgcttggcgggttattatctgcctaccactactctgaacagtttgaagtgggtaacaaaactgtttacttgaacaaggccattgatttgggggataggcttgctttagcgtttatatccacccaaaagggaattccatactccagcgtaaaccttcacagcggccaggctattaagaatcatgttaatggtggggcgtcatccacggcagagtttacaacattacaaatggaatttaaatatttggcatacttgacagagaatagcacttattggaagatggtggagcgtgtttatgaaccattatacaaaaccaatgatcttttaatgtctacgatggattag

SEQ ID NO: 4514 - DNA, 1356 bp, Saccharomyces pastorianus
atggttttttttttaagtagagctaaaaacaaaaatcaattattttgtggaaatgtggctaaaaacaaaatcttgaaagaaggcatcggaaagcgaatgactataataagtaacatcactgatgaattgaataacccagggctttcttccacaaggctatcagaactgtgcactcaattacaagatagtgttgatagtagatatgcagtgaaagatgaagtcgagcttatcgagtctctatcataccactccatatacaaaggagtagacctgcggattaataacgacgttttaaaaactatagactgttactttcggcggaatgtgcatgactatgatggtataatccaagcccttatttcctcgctacagccgttacttttaaaaggtaaaagtaactcagagctccaagagcagcaaaatctcggcctcaaaccagtacttggaatgtcattgaaggaagaccagctcaaggaagcgtggatacgtcaagacggcttgaagagcattccattattttacgtaatcctactacatataaaaagaaaagacgtatcgacaaatctatcttggatcattccaggaattctaaacatactagatgataccactgatttaaggaaaattaaacttcgcggtgtttttttgcttcagacagctttagaccatacatttatgcacgaaatcaatgactccgaatggatacagttctcaagtactggtttattcccactgttcgaaaagaccttgattaatatgtgctattttctaccgccttcatacgatgctaatgagacattagcgatatggcaactggttttcccaacgatcaattccttatataaggtggaatttttcaacgagaaaaataattaccagtatcacctagaaaaattcatgtctgagattcttctacagaatattattcctagggcaagtctgaactacgagaatttgacgttatatgcattagaaacaacagcaaccgtactcaaaatgcaaaaagaagagtctgtcgtacatctccaaaggctcatttatgtcctaggtgaatatatagtcagaaatcccttttacactactttcccaaagctagtttcgaaggctctttcagtggtagacatccttttaacggtctgcccacatgaaagaatagaggctcacaagttcgacattttgtctttgatcctgattacatatgacaagtgttcacaagagaatgcattaaacgagtcgattgagttgcagtgcaaggggacgatgaggggtttattgcattataactacggtatggaagacgagttgtccactttgtctaatcaaccacgttttcggttactatttgagtcattgtag

SEQ ID NO: 4515 - DNA, 1098 bp, Saccharomyces pastorianus
atgaaaaaaaagacaagaagaagaaaaaaagaaacagatgcacgaacgatggttcagtatgtggtagagtggttaccaaggattaacagaattgctatagtagtagagggctgggaacgggttcaaatagagagtgttgaaggaacatttctcagcatacttggagatgatgggcaaagagaagatatctcactcccggtggaagttgaagaaaacgttaatttaccgtatgaatttgagaagggacgtaatgatttagagtacatcgtgaaaataaggagcaagtcctcagaaaagtatgataatttaatcatgtcgctcccagatggtaaatggacgaaagaagatctctgtctagatcctgaattctcaatagaatgccttcaatgtaagcaaaaaattatcaataaagacaactgtcgcgttcttaataacatgccttccgagttttggatggagcttatggattattggcattgccataagccagatgtgggggaaaccaaatttggttcttattcgcagtatgaaacgctgaaaccatcagaaaatgagattctaatcggaaattctttcttccaaggtactccagcgacactcaagaatgctgtgcttgaaaaagacagtaatatgcttctatgcaaaaattgctcagtagttctgggccagacaacggctggcccactttataagctgtacaaatggaaattgcgtttgcgacgtaatggaatgacttatcacttccctccagaacttgacgttatgctgtctttaataagtgttgtcaaggccaattcctgccggtacgctctcctaaagagtggaggaaaacgactgctggtttggatattctccttcgaccttggtgtcacattaacggggaacaagcaactcaagagatcaatgaagttgctttacacagacaacgacgctactacaaaccactgtatcgagcgacaaaacgctgaggaactagatatccaagaaactacatttcacgcattctatgacggtctccagagagttaatgcacttctaccctcaaatatgaaagtagtgggggaatggtccatcagctatgtctcactagttgaataa

SEQ ID NO: 4516 - DNA, 591 bp, Saccharomyces pastorianus; identical to SEQ ID NO: 4336

SEQ ID NO: 4517 - DNA, 1083 bp, Saccharomyces pastorianus
atgtgtctgtctgtcgcgcgtagccccacgcaatatagagccatgatggacgcaatctcgacgatggagctgtctgatgtgttcgtgagcgagctgttccggctgctgcagagcaacgcttactcggatataatccagtggtcgcccgacggtagcaggtttatcatctggaacacagaccagttcaccaaggtcattctccagaggtttttttccacgttgccgagtttcgcatcgttcgtgcggcagttgggcaggtataagttccagaaggccgaaaggttgcattgtaaagagtttttcaacgcccatttccaaagagacaacctggctggcctgcgttttgtaaagaccacacgcaggtcgccgccggcaaagaaactgtccaaggcctgtgcttaccgctgggacccttttaaagtgaattccattctcagcaaggctgtcggtaagccgtcgttcgaaaaactggagaaaaacgtcgatactctgcagggcaacctcgatgaggtcacctcgaacaacgcagagagcctgcggattataaaagagatcaacgcgggcttgcagacgctctcctaccaccagttccatgcctaccagatggccaattttctgcaagcgaacttcgaagccatcaggaaagccgcctgccagcagcagcagcagcgacaagacccaaggcgccgccgcctgctgctcctgatggcaggcacgtgcgacgcatcgaaaacgcccctggtgcgcttgctcaagtccatgaacttctccatcgacacagctacccagtggcattcgctgctgaatcttgacacgtacgacctgcttttcgtcgccgtgtccccctacatgcccgaagacgagattgtctacttcaagaaactccggaacctgctgcccagcttccccatagtcggcgtcatgaacaacctcacctctgccctcgacacgaacacttccccctccaactactcccgctactactgcaaccatttcctgcgattgggcttcaacgacattctggtgagccccttcaccccaacccagcttacaaccctcctctcgaaacattttccgacgtga

SEQ ID NO: 4518 - DNA, 1143 bp, Saccharomyces pastorianus
atgagcaaagcttttcaaaaatgcttaaatttgaaatatcctattattcaagcccctatggcaggggtgacaactattgacatggccgccaaggcttgccgtgcaggtgcaatggcttctctacctttatcacatttggactttagaatcgcaaaggatttcgaacaattcaagtcgatgatctcacaatacagagaccatgtggcaaacgaatccctggagaagaatattaacttgaatttcttttgtcatgacatccttaataagccatccaaacttcaaatagataactgggtcaagttatacgagagatccttgaacatacctattgatgtagacaaaatcaattttaagaacggcaatatttctttcaaggcttttgaaagggacgatgcgctgcaagattttttccaatatataacagatgaatttaaacctaaagtcattagcttccattttggctacccatcgaaagctacaatcaaatatttgcaaaggcagggaattttggtttttgtaactgcgacatcaacaaaagaagttcatctcctagcaaagctagatatcaacggaatagtgtgtcaaggttatgaagccggaggacatagaggcaattttttggcaaatgattctaaaaacgacgaaaacctgtccacggcccagttggtgaaaagagctgttaatgagcttgctgtaatgagggataagggtttcgtatacgatatccctctcgttattgcgacgggcggaataatggattctaaggacatatcatatatgctatccctacaagctgacggagttcagctgggaactgcatttctcggctgcaatgaatccaatgcatcggaaaattttacaaaaccatttacgccacactcagaaactaggatggtcaacattgtttccggaaagcctgcgagaacaattttgactccatttatcgagcatcttttggctaatttccaaggcgaagagcttcctccgtatggatatatgtataatgcttttaagcaggtaaaaagaacatatcctgaattggctaatttttttctggctggagaaggatttcaaagtgttcagtcaggcattgcaaccaaccaaaaaatcacagaattaggcgaaaacatagcaaaaaattga

SEQ ID NO: 4519 - DNA, 2454 bp, Saccharomyces pastorianus
atggcaagacctgtaagagccatcacagaggcaaagggacacttagtatctcagcatcgcttagtttcattcgttggtgctggcggccagcacgctatagctgtcgcgaattcattggacattaagaacgttttaattcatagatactcttccatcttgtctgcttacggtatctttttagcagatgttattgaggaaaatcaagagccttgctcttttatcataagtgggccagagaccatctcgaaagtcaaagaaaggtttttagaactttctgaaaagtcgatagataaccttttatctcagtcgttttctcgagaacatataacagtggaaaaatatttgaatctgagatatgaaggcactgaaactagtttaatgattttgcaaaaagacgaagatgattggaattttgcaaaatggttttctgaagatcacaaaagagagtttggattttcgtttgatgataaacaaataataatcgatgatataagaataagggcaattgggaagtcggacgttagaaacgagaagacaatcgaggaccaaatgaaggaagttcctcgctttaaaaaggctgacgtgtcgaaggattcgagtttttcccaaaaagcgttttttgaccacaaatgggtcgacactgcagtatataagattgacgatatctctattggaacagttatagaaggtccggctatactagctgatggtacccaaactaatgttattttaccaaactctcaagcgttcatattaaattctcatatatatatcgaaaccgttaataagcccaccgaaacgctttcagagaatgaagctgacgcccaaatcgatccaatcttattatccatttttagccacaggtttatggacattgcccttcaaatgggaactcagttaaggaagacttctgtttccaccaacgtcaaagagagattagatttttcatgtgctttatttgaccctaaagggaacttagtggctaatgcacctcatgtccctgttcacttgggttcaatgtcaacctgcatttccgctcaggcaaagttatggaaagacaaattgaagtcaggagatgtactaataacaaaccatccagacattggtggcacacatttaccagacataacggttataacgccctcattttctttaacaggcgaattaatattctacgttgcttcaagagcccatcatgcagatattggaggtgttcttcccggctcagtccccccaaattcaaaggaactgtatgaggaaggcactgcaatatattctgaatttgtggttaaagagggagttttccaagaagaattgatgcacaaattattcgtagaagacccaagcaaatatccaggttgctcaggctccagaagattcagtgataacgtaagcgatctgaaggctcaagtggccgcaaacactaaaggaatacaactgattgaatctttgactaaggaatacgatctccctacaattttgaaatacatgacggccattcaagaaaatgcttctgaatctattaagaaaatgcttgcaaaaatggtagagcattttggcaccactaaattttcaggcgaagatcgcatggatgatggcagcctaataaaacttcaagttgacatagatcctggaaacgaaaaatacgtgtttaattttgacggaacttcaccacaagtttatggcaacctgaatgcaccagaagccatcactaattctgcggtcctctattgtttgaggtgcttggtaggggaagacatccctttgaaccaaggttgcttaaaaccattaacaataataattcctgctggatctatactaagccctcgatccggtgctgcagtcgttgggggcaacgtgttaacttcacaaagagttacagatgttattttaaagacatttaaagtcatggctgattcccaaggcgactgtaacaatttcacttttggaactggaggtggatctgacagtaagacaggtgaattaattaagggctttggatactatgagaccatatgtggtggttcaggggctggtgccgattcgtggcgaggttctggttggaatggttcagatgccgtacatacgaacatgactaatacgagaatgacagacagtgaagtgtttgaacggagatatcctgttttattacgagaattctcaatcagaagggattcaggaggtaagggcaagtatacaggtggaaatggtgttgtaagagatgttcaatttcgaaacgctgtaacggcatctatactgtcagaacgtcgtgttattgctcctcatggtatacatggagggaaagacggtagccggggtgaaaatttatgggtacgtaatagcacaggcgctttgattaatataggcggtaaaaatacaatttacgctcaacctggcgatcgccttatcatcaaaacccctggtgggggaggatttgaggaatataggaattag

SEQ ID NO: 4520 - DNA, 852 bp, Saccharomyces pastorianus
atgctgttaagaaagattggcataccaacaatagcatctcctactactctaaactgtgtaacaaacaacacaatactctgcactttcgcacgcttacagatgttattggacgaccagctgaagtactgggtcttgttgcccatctcgattgtgatggtgttgactggtgtgctcaaacagtacatcatgacgcttataacggggaacagtgctaacgaaacgcagccaagagtgaagttgacagagtggcaatacctgcaatgggcacaattgctgatcggtaacggtgggaacctctctgcggaggcattttctgccaagaaagagtttctcatcaaggacctcaccgacgaaagacatttggcccaagccaagcaacaggacggatcgtctgccggagagatggtaaaccccttcaatgacccgaacatgtctaatgctatgatgaacatggccaagggcaatatggccagtttcgtcccacagaccattatcatgtggtgggtcaaccacttctttgcgggattcattcttatgcagttgcccttccccttgaccgccaagttcaaggagatgttgcaaaccggtatcatctgtcaagacctggatgtgagatgggtcagttccatttcgtggtatttcatctctgtgctcgggttgaacccagtctacaacttaattgggttgaatgaccaggacatgggcgtacaaactggaacggcaggaccacaggggcctccacaatcgcaggtggacaaagctatgcaagctatggccaacgatctgaccatcatccagcatgcgacgtgtcttgatagcgtcgagcagagggttttggaacattatatgtaa

SEQ ID NO: 4521 - DNA, 624 bp, Saccharomyces pastorianus
atggcatttccacagcatcctcctaataatagtgcattcttcaacgggctattgaacaaagggaaaagcgaaactaacactccacctccacctccaggtttagtctctcatcaaggtccacagtttcctatgatgggagtaccaccaaacttttcacaacaaatgatgccaccccctccaggtcttgttcagttccaaaaggattctaaagatgtaaataaaaagcataacaacaagcaaccaaggcaaaataaaaatgcaaacggcaatagaaataacaaaggaaagcaagcagcgacagtagcaacagatatgccccaacagcaattcatgccgccacccccacccccaggttttttccccatgcatcctaatttccccaatggcccactaccaccattaccgcagggatttcctatgccaccaaatggtatgttaccagcgggtcaacaaccacaaccaccttatccaaatatgatgcttcagggtaatttcccaccaaatttccaacagggctttagaaataatccccctatgccaatgccacctatggttaatgctaatagcgaaaatgtttcaaatcaattgccaccgggattgaactctaaaaagaacatgaaatga

SEQ ID NO: 4522 - DNA, 1335 bp, Saccharomyces pastorianus
atggaactaaacgacccttcaattatatcagccactcagttttccggtgaatcgccggacggagaagctgctgtcgccactcacaaatcgcaacaagccatctcgaatctatttcagaaattggacaaaaaggacaaacaggagagaccaatgggtagcatagaatcttcgaatgatagctctaccgcttctgtggccacgagcactaacggcaaagagagcaatagtaaaaaaaataaaaaaacggccatgctaaactttagtagtttgacggatcctataacgaactataaaccaatggagctgaaatacaagacatatgcatattccatgaatgagctctatcatttgaagccgtctttaacaagtgcctcttatgaagaagacccgctcactgcggagcttgtgaagagtctacctaagaggaagttttggcgattgcgcatggggcctccagatcaaaagcatgctaataaccatcacttcagcggaagcaatggtgcaagtaactggaaggccggttacaaaaacggcaagagcgaagagaggagaatgagtagaaccaagaacatgcaggggggcaaaagaagatctcagcatgatgatgaagacaaaaagatcgagcaagaaatgctggaaatggaaaagaatttgcaattaggtggtgatgtaggtcattcaatggcagattttgaagattggaaggcaaagatgaaggaactcgaattgagaaaaatttccaaaactaacggaaccaacaactccacagccattgctccaagggaaagtactacacaagacacttcagaggacttgagacctgcaatgccaaccggttccagctcgataacggatttcttgaacctgaaaagacaagaaaagaaggaacaacctccacaacagactcctgccaaacccactaggcaacctattatggccaaagccaacgtagaacaggccaatgatttagagacaaattcggatttgggtaaaagttcatcgtctcgcttttcgtcattcttcaataagtccgccacttcattgccttcattagacaacaataatcaagcgccatcaccaggtgcacctgtagtaaacaatgatgacaacagcacaccacgtcaaagtggttcaagattgatgtcttttttcaaggaatctagatcaagtactccaaattcagagccacaaccactatcgacctccgataaagatactagaaagatacagactccctcccaatttcaacagcaacctcaacccccacaacaaatgcaccaatggcatttccacagcatcctcctaataatagtgcattcttcaacgggctattga

SEQ ID NO: 4523 - DNA, 2562 bp, Saccharomyces pastorianus
atgaagaacgagtaccgccccagtatcgataaaaagtcgaatagtgatgttttcctaccttcaaaaagaaaaatcctgagaagcactatttgcaagaatggccttactgaaaaggaactgtttgttgtttacgtcgatgacgaggtagaactggcttcgacaagaggttatgtttctatagtacagtgcaattcaagacaatccaagaaaaatgagccggaaaataaagtaataggtgttcctccaaagaaaattggtgttcgcattaagcatgacaatcaagtacctaaaaatcacattgcactaagcttgtacacttgggaagcactctttacacgtccagttaacgggactaaaatcaaactggaatttttgaaaacgagtgaaatgaatatgaaacctgtaggaaatataacagttaacattaaatactatggagaaaactcatctcttaaggatgaagatgaatttattaaactgctgggaaaaagcaccctaactagtaacataatacttcctgaagagcaaattttgattgagttaaagaaagctaattccttacaaccatttcttgatttgaacgatctccccaaagattctattcaatgggaaatagcgcaaatgggaaaggaagaagtcaaaaaagttgtcgaagaattcttacctaaatttcagcacatcgaaggaacagatgaatttatgcatacaagtaaaaatgaagaccatttcgttaatgttaatagcactacgcaagaaatgatagattacatgacatcacccattgtctcctcaccggctattatattggacgggaagcaaggaatggggaaaaccagattgttgaaggaattcatgagcagaatcacaaatgaacaccacatcttcgtcaaatatgcggattgtgacacattgcgcgaaacttctaatctagataaaatgcaaaaattaattaccgagtggtgctctttatgttactggtgcggtccttcgttaatagtgttggataacgtagaaagtttatttggcaaaccccaatctaatgaaggcgatccgtctaacagtaacaaatgggacaatccaagcaaactcctaaatttttttatgaaccaggtgaccaaaatgtacagtaaaaacaacatatgcatcagggttttattttcaggcaaagagaagactcagataaattcattattgttcgataaacattttgtttcagaaagctggtctttgaaagcgccagataaacaagcacgaactaaattactggagtatttcttttcgaaaaacgcgatgataaaactacaccacgaagtgcaatttagtgacctgtcattagaaacagaagggttttcaccactggatttgaaaatatttacggaaaagctattttacgatttgcaactacaaaaaaagtgtgataatacagtaacaagagaaaccttctcaagatcactgaatgggttcacaccttctgcactgcgcggagtcaagttaaccaaagaaaccaacatcaaatggacggacattggtgcattaacgggtgcaaagaaaattctcctcgaaacattggaatggcccactaaatatgagccaatatttgccaattgtcccttaagactaagatcgggtatcttgctctacgggtaccctggttgtggtaagacgctattggcgagtgccgtagcacagcagtgtgggctcaacttcatctctgtcaagggacctgagattctaaacaagttcattggtgcgagtgaacaaaacgtcagagagttgtttgaaagagcacagtctgtcaaaccgtgtattcttttctttgatgaattcgactcgatcgcgcccaagagggggcatgactccactggtgtcacagaccgtgttgtcaatcagctcttgacacaaatggacggtgctgaaggtcttggtggcgtatacattttagcagccacgagtagacccgacttaatcgatagtgcattgttgagaccgggccggttggacaagagcgtgatctgtaatatacccagtgaacctgaaagattggacattttagaaacggttgtcaactccaaggacaaggatacgggtctgaagaaatttgaactagaggaaggaactgacctcgccatgatcgcccagaaaacagcagggttttcaggtgcggatttgcagggcctctgttacaacgcgtatttgaaatcggtacatcggtacctgtctgccagtagagaacctgaacaggcgtccggagataatgatatcgagtacttcactatcaacgggaagtgccagaaagaggaaaataaactacgtttgcggactctgctggagcaagaccaggtccacgaaccgaagacaaaagtatcggacggggtgaagccaacagctgtggtcacgatagatgatttgatggaggcctgtcaagagacgaaacccagtatttcgacgagtgaactggctaagttaaggagaatttacagcaagttccagacggatagaaatggcgagatgcccaacggcgagaattccgttgacattggcagccggctttccctgatgtaa

SEQ ID NO: 4524 - DNA, 438 bp, Saccharomyces pastorianus
atgaaattagacagagacagctctgggtccattgataaaaacgagttcatgagtattccaggtgtttcttcgaaccccttggcaggtcgtataatggaagttttcgatgctgataatagcggtgacgtggacttccaggagttcattaccgggctatccatctttagtgggcgtgggtccaaggacgagaaactaaagttcgctttcaaaatctacgatatcgataaggacggatttatatcgaatggtgagttgttcattgttttgaagattatggtgggttctaatctggacgatgaacagttacaacagattgtagacagaaccataatggagaatgacggcgatggtgacggccgtttaaattttgaagagttcaaaaatgccatcgaaaccacggaagtggccaagagtctgacattacagtacgaagtttga

SEQ ID NO: 4525 - DNA, 1845 bp, Saccharomyces pastorianus
atgaattcatcgttactactaaaccaattgctgaagccaatgctggacctgatcctttgctcattcaaactattaacatcgaatactagtgtcatgggtgaaggtacgctggcactaggcctgatcgtgtacgcttccaattccttactaaagctaattcaaccaaattttacaaggcttacaatggtaagctcgtctttggaaagttggttccgttctttacactcaaatctgcattctagcaatgaagaaatcgcactgctgagaggacagaagagagaattagccaacgttgattattcattttaccgtttggtgctatttttaaatagagaaataaaggcaagagccatttacgatattgctactgcttttgtcattaaatatacttggggtgcagctggtttggtgttatgttcgattccaatattcttcaaagacccaccaagtgaagacgccttggaacttaaggagcccaagactgatatgacagctgacttcattacaaataggaggctgttagttactgcgtctagttccatcggaaggtttgtcgaattgaaaaggaatattcagcaattacgtggtatcagattacgtctaaataaattcaatgacctattggatgcaaataaaggtgatgctaatgagtctaataaggaaggctacatagtggaatatgatgactcaaaaataaaatttgaaaacattccgttgataactcctacgaatcaggttttagttcctgaactaagttttgatttggagcatgggaaccatctgttgattattgggcctaatggttgcggtaagtcatcgttattccgtatacttggtggattatggcctgtgagggcaagtgccaataaaaatcatcaatccaaattaataatgccccgtagaactgtgggtaaagattgtgcaatcttttatttgcctcaaaggccatatatggggaataggtcaactttcagagaacagattatttacccagatacgattgaacagtttgaagaaaagtatcacaaagattacagcttaggtgatgcagacttgataaaaattttgcagttattggatttggaagatttggttacagagaacatgtcacttgtgctagcccagagaacttctaaaaatggtattcagcaaccgccatcagaggggaatcaatcgccatgtagtatcgagatacgtgatgcatttagtataataagaaactggtccgaggaattaacagtcggcgttcaacaaagactagccatggcaaggatgtattatcataagcctaaatttgctgtccttgatgaatgtacatcagcagtggctccagaaatggagcaacaaatgtacgaaaatgcccaaaagtttggtatttcattaatatccgtttgtcatagaactagtttatggcattttcacaactatcttttgaagtttgacggtaaaggcggatatcaatttggtcccttcaacccacaagaaaggttaggaaatgaggaaaaattgcttgaattaaatgccatactagaccaacaagtaccgctctgggagaggaaattgaaagatttgacaattgccaaagaatcaaacattattcgtaagtcagagaccaacttgaaccttttcggaaaaatcgaagatccaaaatcatccaaagccaacgcattattggactcaaacaaagacaaatcttttatcacaccatccatagggaaagagaccagtaaaaggctaccgctgttttcgaaaccatcatcaacagcatcgtcaaatttattaagaaacaacaaaagcaagacgaagaatggaaaatccaaaacggaaccatcaaatgaaaaatag

SEQ ID NO: 4526 - DNA, 528 bp, Saccharomyces pastorianus
atgaagaatataaaaatgtcttcaacggcatctggtttataccagaaacatagagtgaatctactacgttcctcatacatcatattgctgctagcaacgctttacaactcaaattcaagctctagcaataataaaaacggtaaaaaggatacacagtcgacggattcagagagtgaaaagattggggaagaaaaaggagcagaactagatgaagaagaagaggatgataacaatgaagagttgacgatggtttccaaacacagtaccgattcagtcaatggaacaatagcggtagacaaagaaagtataaataagtataaagaaagacggcagccgggaaaggtagattttctgttcaaacttttgctacatgacaggaaatgtcttgttttatttatcacgcaggctatccttttgaatatcaggacgttattgtctcttcgtgtggctactttggatggtcagctagtttccactttagtgagagcccaatacgcaaattcgcaaagattgtactggggaaatgac

SEQ ID NO: 4527 - DNA, 885 bp, Saccharomyces pastorianus
atgagtccaccaactaatagaactatggaacgaacatcttctaaagatacaaatatttcgttttttgaagatcaacctaacaacaatgatcccatattcaatccaataattagtgaaaagttggttcaagaagttaaacaacaaagacagttgaaaaggaactcatttcctacgccaactcccagtcataaaaagaccaacagttttaaagccctacaaatgaaaaaattgcttgccaatagagacattctttcgaataattccaaatccagtataaggaaacctgcaaagaacaaaatcactaaacaagcatcaaatgttttcggtaacactgcaagacaattggtcatgaaactagataatccaagctacagctccgtgacatcatctccatccccttccacaccgacgaaaagtggcaaagcgagatcgagatcatcttcacctgtacgccccaaagcactcactcaatccccaatatcacccaattatcacagatttgccctagattcccccccacaaagccctcgaagatcatccaactcgagcattacgaaaaagggaagtagaaggtctagtggctcatcacccactcgccatcataccagagtgtgcgtgtcatgccattctagtgattcgccttgttggagaccgtcatggtcgccaagaaagcaagaccaactatgtaactcctgtggcttgcgctataagaaaacacatacgagatgtttgaacgatatatgtcgcaagatccccacaaagggtgaaataaacatcatgaaatctaatggcatagacagagaattcgtccctgaacgcaactgtgaaattgaaggataccgctgcttattctgtaattacataactgagactgtggagaactaa

SEQ ID NO: 4528 - DNA, 834 bp, Saccharomyces pastorianus
  modified_base (126)..(186): a, c, g, t, unknown, or other
atgtcaagtttatacctcaagtcaccgttacatgcattttctgctggtccagactcacatgcaaacggatcgtattttgataacttattacttccttcgttctccaaattatcgagtaacaacagnnnnnnnnnnnnnnnnnnnnnnnnnnnnnnnnnnnnnnnnnnnnnnnnnnnnnnnnnnnnncattctgcatgtcctaggaaatattcattccactccctcaatgtgtcaccaattttacctccattgtcattagctaatgaaatactcgggaagaagtcaaatactgcaccagcatctccgcatcacatggcttacaacccaatttcatcattgacgcccaacagctcgcctgaattcaataaggccagcttatctcatataagttttacgaatccattgaattatgggtctcatttaggaatttcaacccattcacaagctcaactaccattattggacaggatatcgaccgtctctttctctaaaagaccggagcactgccagcaatccttaccatcgttaaggcatctacaattactacctagtccacttcaacaagaaaatgcagctcgtttccctgatacatcaaaacgtacgccttattggaaaactaatctcactcattggtgtaaggatacaaactatcaagactatgtcaaaatacgcgaagaagtggcccactttaagccactgagtataccaaacttggcacacgaaataatgatgattcaattagggaaggaagttttcacagcaaagaatcagagtcaaatagatcatccaagcgtcactcatcatctgattatactttcgctcgtactaaactga

SEQ ID NO: 4529 - DNA, 4365 bp, Saccharomyces pastorianus
atgactccatgtaccgtttccccagatttcgtcgctgctactactaatgctggttacaccatcgaattagcaggtggtggttacttctcggcaactggtatgactgctgctatcgactctgtggtttcacaaattgaaaagggttcaactttcggtataaacttaatctacgtcaatccattcatgttacaatggggtgttccattaatcaaagaattaagagccaaaggctatccaattcaatttttgaccattggtgccggtgttccatctttggaagttgccagtgaatatatagaaacactaggtttgaagtacttgggtttgaaaccaggctccatcgatgccatttctcaagtcatcaacattgctaaaactcatccaaatttcccaattgccttgcaatggactggtggtagaggtggtggtcaccattctttcgaagacgctcatactccaatgttacaaatgtactccaagattagaagacatccaaacattatgttgattttcggttccggtttcggttctgctgatgacacctacccatacttgactggtgaatggtctacaaaattcgactatccaccaatgccatttgatggtttcctatttggttccagagttatgatcgcaaaggaagttaagacttcccctgatgccaagaagtgtattgctgcttgtaccggtgttaccgatgacaaatgggaacaaacttacaagaagccaactggtggtattgtcactgttcgttctgaaatgggtgaaccaattcacaaaattgctacccgtggtgttatgctatggaaagaatttgacgaaacaatttttaacttgccaaaaaccaaattagtaccaacattggaagctaagagagactatatcatttcaagattgaacgctgatttccaaaagccatggtttgccaccgttgatggtgaagctcgcgatctagctaccatgacttacgaagaagtctccaagagattagtggaactgatgttcatcagatccaccaactcttggtttgatgccacttggagaaccttcactggtgatttcctacgtcgtgttgaagaacgtttcaccaagagtaagacattgtctttgattcaatcctactccttattggacaagcctgatgaagctcttgaaaaagttttcaatgcttatcccgctgccaaggaacaattcttgaacgcacaagatattgatcactttttgagtatgtgtcaaaacccaatgcaaaagcctgtcccatttgttccaatcttggatcgtagatttgaaatcttcttcaagaaggattcattgtggcaatccgagcacttggaagctgttgtcgaccaggatgttcaaagaacatgtattttgcatggtcctgttgctgcgcaattcacgaagatcattgatgaacctattaagagcattatggatggtattcatgacggccacatcaaaaagttgttgcatcaatactacagcgacgatgaatccaagatcccagctgttgaatacttcggcggtgacagtccagttgacgtacatgctcaagttaagtcttctgcatctgaagactccgctgttttcaaggcaacttcttctaccgatgaagatagttggttcaaaactttagctggatctaaaattaactggagacgcgcaagtttcttgtgctcctttatcactcaagataaaatgtttgtttctaatcctattagagaagttttcaagccaagccaaggtatggttgttgagatttctaacggaaagactccatcgaaaactgttatcactctttcagagcctgtacaaggccaattgaaaccaactgttatattaaaattgttaaaagacaacttggtccaaatggaaatgattgagaacagaaccatggatggcaagcccgtcagtttaccattgctatacaactacaacccagacaatggtttcgctccaatttctgaagttatggaagacagaaaccaaagaattaaggaaatgtactggaagttgtggattgatgaacctttcaatttggactttgatccaagagacgtcatcaagggtagcgacttcgaggttactgccaaggaagtctatgactttacccacgccgtcggaaacaactgtgaagatttcgtttccagaccaggtagaacaatgttggctccaatggatttcgctattgttgttgggtggagagctattatcaaggctatcttccctaacacagttgatggtgacttattgaagttggtgcacttgtctaacggttataagatgattcctggtgctaagccattgccagttggtgacgttgtttcaactgctgccgtgattgagtccgttgtcaaccaaccaaacggtaaaattgtcgatgttgtaggtactttatcaagagacggtaaaccagtaatggaagtctcttcttctttcttctatagaggtaactacaccgactttgaaaacaccttccaaaagactgtggagcctgtctaccaaatgcatatcaaaacatcaaaggatattgctgttttgcgttccaaagaatggttccaattagatgatgaagattgcgatttactgaacaagactttgaccttcgaaaccgaaactgaagtcactttcaagaacgctaacatttttgcctcagtgaaatgtttcggtccaattaaagtggaattgccaactaaggaaacagtcgaaattggtattgtcgattacgaagctggtgcctcccacggtaacccagttgttgacttcttgaagagaaacggttctactttggaacaaaaggtcaacctagaaaactccattccaattgctgttcttaattcatacactccaagtactaatgagccatatgctagggtttctggtgatttgaacccaattcacgtttcccgtcattttgcttcctacgctaacttgccaggtaccatcacacatggtatgttttcctccgcatctgttcgtgctttgatcgaaaactgggccgctgacggtgtttcatccagagttcgtggtttcacttgtcaattcattgacatggtcttgcctaacactgctttgaaaacatccattcaacatgttggtatgatcaacgggagaaaattgattaagtttgaaactagaaatgaagaagatgttgttgttttgactggtgaagctgaaattgaacaacctgtttctacttttgtctttactggtcaaggttcacaagaacaaggtatgggtatggaattatacaagacatctaaagctgcccaagacgtttgggatagagctgacaaccatttcaagaatacttatggtttctccattctggatatagttattaacaacccaattaatttgacaattcatttcggtggtgaaacgggtaaaaagatcagacaaaattacgctgccatgatttttgaaactatcgttgatggtaaattgaagactgaaaagattttcaaggacattgatgaacacagtacctcttttacattcaaatctgcaactggtttgttgtctgctactcaattcacacaaccagctttaactttaatggaaaaggctgcgtttgaggatttgaagtctaagggtttgattcccgcagacgctacatttgctggtcactctttaggtgaatacgctgccttggcctctttagcagatgttatgtccattgaatctttggttgaagttgtgttctacagaggtatgactatgcaagttgctgttgcaagagatgaattgggtagatccaactacggtatgattgctattaacccaggaagggttgctacatcattttctcaagaagctttgcaatatgtcgttgaaagagttggtaagagaaccggatggttaattgaaattgtcaactacaatgttgaaaaccaacagtacgttgccgccggtgatctaagagccttggacgccactaccaatgttttgaacttcatcaagttacaaaagattgatctaattgagttgcaaaagtctttgtctttggaagaagtcgaaggtcacttgttcgaaatcattgacgaagccgccaagaaatctgcagttaaacctcgcccacttgttttggaaagaggttttgcttgtattccattgcctggtatctctgttcctttccattcgacttacttgagaaatggtgtcaaaccattcaaaagtttcttgaagaagaacattatcaaggaaaatgttaaggttgacagattagccggaaagtatattccaaacttgactgccaagccattccaagttactaaggaatacttccaggacgtttacgatttgactggctctgaacctatcaaggagattattgacaattgggaaaagtatgaacaatcctag

SEQ ID NO: 4530 - DNA, 1755 bp, Saccharomyces pastorianus
atggatgcttattcaaccagaccattaactctctctcacggttctttggaacacgtgctactggttccgaccgcttcatttttcattgcttcgcaactacaagaacaattcgtcaagattttgcccgccccaaccgaagggtttgccgcagacgaggagccaaccacacctgctgaactagtgggaaaattccttggctacgtatcttctctggtcgacccttccaaagtcggtcaattcgatcaagtcttgaacctttgtttgacagaattcgaaaactgttatttggagggtaacgacattcatgccttggccgctaaattattaaaggaaaacgacacaactttggtaaagactaaagaactaattaaaaactacatcaccgctagaatagtggccaagagaccattcgacaaaaaatcgaattctgctctatttaaggccgttagcgagggaaacgcacaattagtcgccatctttggtggtcaaggtaacaccgacgactacttcgaagaactacgtgatctatatcaaacttaccatgccttggtgggagatctaattaaattctccgctgatactttaagcgaactgattagaactactttagatgctgaaaaagttttcactcaaggtttaaacatattagaatggttagaaaccccttcaaataccccagacaaggactacttactatctattccaatctcgtgccccttaattggtgtcattcaattggctcattacgttgtcactgccaagctattgggtttcactccaggtgagttaagatcttatttgaagggtgctacaggtcattctcaaggtttggttactgctgtcgctatagctgaaacagattcttgggactctttctttgcctccgtaagaaaggcaattactgtactattcttcatcggtgtccgttgttacgaagcatatccaaacacttccttgccaccatctatcttggaggactctttggaaaacaatgaaggtgttccatctccaatgttatccatttccaacctaactcaagaacaagttcaagactacgtaaataagaccaactctcatttaccagcaggaaagcaggttgacatttctttagtcaatggtgccaagaacttggtcgtatcaggcccaccacaatcactatatggtttgaacttaaccctaagaaaggccaaggccccatctggattagatcaatcaagaattccatttagtgaaagaaaattgaagttttccaatagattcttacctgttgcatcaccttttcattctcatttattggttccagcttccgatttgattaacaaagacttaattaaaaacaatgtcagtttcgaagctaaggatatccaaatcccagtttacgacacttttgatggttcagatctaagagaactctcgggctccatctcagaaagaatcgtcgactgcattattaggttacctgtcaaatgggaaactaccacacaattcaaaaccactcatatactagatttcggtccaggtggtgcttctggtctaggtgtcttgactcatcgtaataaggatggtaccggtgttcgtattatcgttgctggtactctagacatcaacccagacggtgactacggattcaagcaagaaatcttcgacgttaccagcaatgggttgaagaaaaatccaaactggttggaagaatatcatccaagagtgaatcaagaacaaatccggcgaaagtctgtgtcgaaactaaatctctaa

SEQ ID NO: 4531 - DNA, 318 bp, Saccharomyces pastorianus
atggctagatacggtgctacctccactaaccctgctaaatccgcttctgctcgtggttcctacttgcgtgtttctttcaagaacaccagagaaactgctcaagctatcaacggttgggaattgaccaaggctcaaaaatacttggaccaagttttggaccaccaaagagccattcctttcagaagatttaactcttccatcggtagaaccgctcaaggtaaggaatttggtgtcaccaaggctagatggccagctaagtctgttaagttcgttcaaggtttgttgcaaaatgctgctgccaacgctgaagtatgttag

SEQ ID NO: 4532 - DNA, 1932 bp, Saccharomyces pastorianus
atggatacggctgtatattctcatgccttggatatctgggccaaggcggatttgacaaatctccaaaaggaattggatgctgatgtcattgagatcaaggataaagaaacccagtcattgacgtcgagaaagtctttggccactgagacaaagaaatttaaaaagctcgaagcagaagagaagctgaaccacataaataagattattaagcaatatcaatgcgaaattgataacctgacacagagatcaaaattttctgaaaaagtcctatttgacgtttatgaaaagctttcagaggctcctgaccctcaacctttgttgcaaagctccttggaaaaattaggaaagatcgatgactcaaaggaactcaaagaaaaaataagtgatttagaagataggctagccaaatacgctgattatgaaactttaaaatcaagattattagatttggaacaaagctcagcgaaaactttggccaaaaggctaacagcaaaaactcaggaaataaactctacttgggaggagaagggaagaaactggaaagagagagaggctgacttggtaaaacaattaacaactgtacaagaccaaaataaggcactagagaccaaaatatctagaaatatcgatattgacaatagcgaagaaagtggagagtatactcagaataatcagaatgaaatgaagacaaagattgcagagtacaatctgctaactcaagaattggagaccacacaagctagaacttaccaattagaaaaaagaaacgaagaattgagtggagctcttgcaaaagcaaccagtgaagcagaaagagaatctgagctacatgctaaggagctgaaactcaaccaattggaaagtgagaatgctttgttgagtgcatcttacgaacaagaacggaagtcaaattctaatacaattaatgaattcaaagagcaactaaatggcattatggccgaatctgaatcttacaaatcagagctggagactgtcagaagaaaattgaacaattactccgactatagcaagttaaaggaagagttatctgccttgaaaaaaattgagtttggagtaaacgaagacgactccgaaaatgaaaatgactccgaaggtaaaaatgacaataccgtcgaatcgtccttactatcagccaataaaaaactccaggcttcccttgcggaataccgctcaaagagtactgcacaagaagaggaacgtgctcaattaaaaaaatccgttgaccaactgaagcagaaaattgctaccctagaagaagcaaacgagaaattagaaatggatctcgaaaaactagaagatgttggtcctcagtttaacgatgctgcaagtatgatgtctggtgtaacaagacaaatgaacagtcgtacatcccatagaatatcaccaacaagctctattataggcattccagaagaaggagaactaacttcactaagtggaaaccaatccaccattttgccaatagttactaaacaaagagatagattccgttcgagaaacatggatttagaaaagcaagtaagacaaggaaactcagaaaagggcaagctcaaattagaaatctcaaagctgaagggcgataatacgaagctttatgaacggatcaggtatttgcaagcctataacggtagtgctactccagcaacttcaaaaccagaaggcgttgacgtagaatctcaatattctagggtgtatgaagaatcgctacatccaattgcaaacttcagacagaatgagttaaaccactataaaaataaaaaattatcggcactagaaaagctatttttgagtttcgcaaaagtcatcctgcagaacaaaacaacacgaatggtatttttgttctactgtattggcttacatggactcgtattcatgatgtgcatgtatgtgatcatcttagcggttacatga

SEQ ID NO: 4533 - DNA, 279 bp, Saccharomyces pastorianus
atgttagtgacggcacaagatataccaatattcgcaccgacttgcagtttgataacaatatcacaccaacctttaccatcccatcttgttaggaagtcttcaccactccatatagccgcgtctacaatacacgttatattcattataagcaaccacgttatcaaaattatagccggaatattcttggtcttggaatgccacgctaaaggtggtatgagtaatatcactccaagtagacatagtcctattattgctgacttgtatgacataaggctttga

SEQ ID NO: 4534 - DNA, 1011 bp, Saccharomyces pastorianus
atgcattatttgtcgtcttccatttctagtcaacctggatcgtatgggtcctggttcaataagagaccgacattgtctcaattttttcaaccaagtccttctctaaaacacaacgaatcttgggaaagattgcaaacgactgctggtaatttgcacaggacttctagttcttcttctctgcaacaagccacctctaggctatcattaactacaccacagcaatctccttctattagtgaatatgatgagtatccttggatggggaccccaggctctcctaatgttggagaatcatcgcatgctctcccatttatcaagaatatatcatataagtttccactgaagaatgttgatctaaaaagagactgtcaacgaatttctcaaaacgatatattggatgaagcttttgaaagaatatgccaaccttcattgaatgatttaggctccagttacgaaattttcccaggcaattcctcgtatgcagatatattgactaccgatatagatattggtgatgagctgatgaataaaccactggaactgttgcccaaatatacaatgtatatgacccattttagcaactttttccaattacaagcgtgtcccgccggccaagaatctgagagtagaataactaattccatgaaaattgatctattgaaagcagattacacaaggagtttactggtttcattacgctcgagagacatcagagatattgcgctaaaaagagagttcaccagtaatagtaaccataataaccctaatatttatgatgaaaacttcactggtaaaaggaattatgtgctgaagcagaaaactaaaaaaatattttcctgtggtaagattggtagattgggttccagcctagaaaattgtgttaattttgttgagagtagtataaagagtgcgatgatattgtatgatgataacagaataaacgcagatctgcgagattctgaagctctacggatcttttcatctcttgttcattactgtgatgcaagttag

SEQ ID NO: 4535 - DNA, 1338 bp, Saccharomyces pastorianus
atgttaggtaatttgttgagaaacaagaccaatgtatctgcttctgagaagaatccagatcgttccgaattttcatcggtcgtgcccaatgtttctgtgtattgtaaagcagccaacacaggaactacgaagactgctgttggggcgcttctagacactgccgtcaatgtggaagagcattcggaactgctgtcgaccacttctccacctatcttagaccatatctcggatgatttaaaacttaagctcttcggctctagggatgtcccctatagtcgtcccattgattcgctacaaaaaaacggcgggctttgtactgacaaaataacctcaatcaatgagggtacgcacgcatttaggattttgatcatcgaagaagctggtcaaatggcgtgtaggaacaattatcgtgatatcttcgattacaccacctcaaaaatctcaaactcgatggaccaaatacggcctagtgaattgaaggagtacatatttggttctcctgtgagagcgtcagacttgactcaatgtgacaagatcaggaccattcctaactcggatttggtgctgataactaggatattttattacatgcaccaatacaaccgtattgcgattagcgtatgcattcctaagatattgctgccagtggtagctgagtcttggtcttgtctttcatcgtggttgacccaaactcaaaaaatgctcactgttttattaaataaaaatcgtgcaatgcaagagaatactggcaacaacagtaacaatctaattataaggttatcgaacatagacatcaaaacatattacccaaaggaaatcgaaatcatggttcaaactttgcaaaaaagacttattccttgtttgcgctctttgtctgaaatcccaagacttttcttgtaccctgagacattcaaagaattcgttcatgtttggttcaagagcatatttaactggattgaaattaaggatggtcccaaattgggatttcttccccttttgatggcaataatcatatcagattacagagaaacgatgaaagaattgacgacgtccaaaatcgttattctttcaggaaatatggtggttgcgaacaagttattgtttatcttatctgccttattagagccaaaatacaaggggaaagtaacaatacggcacgaaggtctggacccagattcatctgccgtatcaaaaactgaatctaattacaacattggaagtaaatctgaggcggagttgagcacgttaacttcaactgacaatcttccgggccgcgcagatagcaataataatcatagtaattttaacactaacaacaacaacaacaacaacaacaac

SEQ ID NO: 4536 - DNA, 120 bp, Saccharomyces pastorianus
atgattacaattcagctcggtaccggggatcctctagagtctcactgttctggtacgacttgcctaaaatggtgttgcactggtgttttgcttatcctagcaagtgccttattcacttga

SEQ ID NO: 4537 - DNA, 1419 bp, Saccharomyces pastorianus
atggaaggaattcctagatggttactgtattctctgatatcgtcggtgctttgtatactaggggcactgtgtgtgccgttgatatcggttgcgtttgataacaagcggaacagccagtcgaagctggtcaattacggtctctctttaagtgctgggtccatgataaccacgtcgctgtacatgctgctgcctcggattgacaaatcaaaccggttcaaggtgtttcctgggttgctcattggtatttgcctcagttttttcctgaactacctggttcatgcctttgctagcgaatccttggtgcactgtgccgataagtctgacaatggtacacattcgcatgtgcactcgctgtcacaatcacaatcacaatcacatttacattcgcattcgcgttcgcatctcgataacgatcaagatatagaaaattctccctctggacatggccaactgacctcatcttctagcgtgtctgaaaatgacgcattgctctcaaaggacaaccagaggcccaaaatgaaaagaaagctatctttgattgatttgctaacacgaagaaaatcagaaggtgagtgtcgcgacttgaacgagtgcacaccagtgctgcaatctgaagagccagagtatattgcttgcgttccgccagttataaagtcgtctcaagatgaaggagataattctcatggttccagcgagtctgacgataacctacagggggatgctaaggaccatcgcggtcttgtttgtatggagaataatgttggttatgatttggaaaatttatcactgtatcgtaaaaatttcctctcgagccgtcataatcatacctctggaacctctgagaactacggctccaatcagtcatcgcactctctgtcgtcatctttgggtagcaacatagctgaggaaccagccccattggtggaaacacaatctcatcatgaaaacgcctctttgtaccatcaccatcatcatttagaaacgcccttctcgaaactattgtccattggtatgcagacctgtctagtcttggcactgcataaatttcctgaaggtttcattattttctacaccaatagatcagattcgtcaaaatccttggggttttctatctttttaagtttgacgattcataatttcgttgaggggttcgcaatgactttgccattttacactgcattcaagtctaaatgggttgccattttaattactgccgtcctcggtggtggttctcagccattgggggcattaataggttattttattttcaggggtagcactccaaaggaccacgaaccaaatatggatctcttattgagcatcaccgcaggattcttgttggtaattggtttgcaaatgttccaaaccggtattggctttagcgatgggcatcatcatcatccagatgaaggagattaa

SEQ ID NO: 4538 - DNA, 126 bp, Saccharomyces pastorianus
atgaacacaagaaggaggaagggtatttctacaggcgggtttatgtcgaatgatggcccaacattagaaaaatatataagtaccaagctgtttgtacaattgagggaaaatgacctggtattgtaa

SEQ ID NO: 4539 - DNA, 186 bp, Saccharomyces pastorianus
atggagggtgatgatttatttgatgagttcggaaatctagtcggagctgatccttttgattctgatgaagaaggaagtgtgctagatgaggaagaacaatatgaaacggttatgtttgacaacagtgatagggaaagtgaaactggaagccatcaactaattactgtggcggatgagacctgcagc

SEQ ID NO: 4540 - DNA, 147 bp, Saccharomyces pastorianus
aaggagtcggaccaccgtggacatccttacgtcaaagacgtggaagtgctaatagaaaccgagaacacacagtcaactgaaacccctttagtagagccagtagcacaacgaacaaaactacagaacatacaatttttacacaattga

SEQ ID NO: 4541 - DNA, 1914 bp, Saccharomyces pastorianus
atgctatccattgccgacatcccagaaagaataaggaatgttggtataatcgggcctcttcattcaggcaagacctctctggtggatctcttggtgactgaatcacacaaacggatcccagatatgtctaaaaacgtagaactcggttggaaaccgttgaaatatatggacaatttaaaacaggagatagatcgaggtatctctctaaaagttaatggatccactttactttgtactgatctggaatctaagtccagcatgataaatttcttagacgccccagggcatgttaatttcatggatgaaacggctgttactcttgctgcgagcgacatagctttaattgtaatagatgttgtcgaaggtgtaacttctgttgtagaacagttgatcaaacagagtatcagaaataaactaggtatgtgctttgttataaacaagcttgataggctgattttagatctaaaactaccgccaatggacgcatatttgaaattaagtcatataatcagagacatcaattcgtttaccaagggaaaggtgttttcaccgacatccaatgatatcatttttgcatcaacaaagctaggttttacattcactgttaaggaattcgtaaactattattattcctcttcgatcccttcttctaagataaatgaatttactgcacggttgtggggtgagatttactttcataaaggcaaattccaaatgaaaccattcgaaaatattggaaagtacccaacttttgttgagtttattcttaatccactctataaactattctcctatgctctcgctatggggaaagataaattgaagactttgttaaaaactaactttaaagttactttaacacaagaagctcttaagtatgacccacagccatttttaaagcacgttctgcagttaatattcagagatcagaccggtctcgtggattcgatcacgaattgttatgaccctctaagcttaatagaaaataaaatatgtcatctctcaggtcctcgtgaagatatctcagaaaaagttttttgggctcatgttttgaaaactttggattatggtggagcagaatggtctctcgtacgcgtttattcgggccatttgaagagaggggaccacatacgtgttttagattctttgcaatccgaatcccgccaaaagaggcaattgcatggaagttttgctatggaaacccacgacgaagaagaggaagaagaagatgaaacgccaatttgtgaaatagaagaaatctgtttactaggtggtagatatgtttatcctgtccacgaagcatccaaaggacagatagtacttgtaaagggtatttccgatgcatacatcaaatcagctactttgtattctgtcaataataaaagagagatgatgtcactaaattattttaagcctttggattatataattcaaccagtgttcaaaatcgttcttcaaccgttattaccaagggagctccctaagttattggacgctctaagcaaaatctcaaagtactatccaggtgcgattatcaaagtagaggaatccggtgaacatgtaatactggggaatggggaattatatatggactgcttgctgtatgatttaagagcaaggtatgcaaatatagaaatcaaaatttcagatcctttaactgtcttttctgaaagttgctcaggtgaatcattcgcttcaatccctgtgaataactctgtatcacgttcaagtgataaagacgtccagagcatatcgattagtgtcacagcggaaccaatggattctaaaatgattcaggacttgagtaagaacagattaggaaaaggccaaaacagtttggatgttgaccaaattatggataatcccaaaaaactgtacaagatattgagaacagagtataactgggattcttaa

SEQ ID NO: 4542 - DNA, 363 bp, Saccharomyces pastorianus
atgaaaagtcaaacaattccgttgatgaagaaggcctgttacgttggtctgttgacagcaacacccacattattagagcccatttacgaagttgacgttatggttcacgctccactgttaccaatagttgaagaactgttcaagaaaagacgcggcagtcgattatacaagacaacgaagcttgtaggaacaccgttgttggaaattcgcggacaaattcccgttatcgaatcagcagggtttgaaaccgatttaagaatatcgacaaacggtctggggatgtgccaattgtacttctggaacaagatatggagaaaagtgcccggtgatgttttggataagatgcctttattccaaaattga

SEQ ID NO: 4543 - DNA, 201 bp, Saccharomyces pastorianus
atggaaggaaagaagtccgacagaggcaggcccaacggcaagagagtcgcaaagaatgccaagtacggtcaaggtggaatgaagagattcaagagaaagaacgacgcagactccactgccgatgtcaccggattctcctccagaaagatgaagggtaagaccaacaggccaggaaagaacaaacgtaccaaaagattctaa

SEQ ID NO: 4544 - DNA, 1875 bp, Saccharomyces pastorianus
atggtagatttgattcagaaactgcccaggaattttttaaatttgccctactcacaaaggaaaaaggtgatgattgaatatgcaccacaccaggactacaaagccctgatgtcattggtgaaaaagttcatgctaacatcttcaaagagtaatttctctctcactgggtttgtcaataatgctccagctactgaggtcaccactaccaatagcaacaacaattttcaaaatgctagcaggaatcagtccaataacggcaacgataacaatgcaaatgcgcgcccacctcagcgatctaggcatggctcaattgcatctcagtttttgagctcattttcaccttccatgacttcaatagcaaacatgaacaccaattcattgagcggctgcgccagcggcagtgtgagacccgatgataaaggtatggaaatattaggacaccgattaggtaaaattataggtttcggggcatggggtataatacgtgaatgcttcgatatcgagacgggtgtcggaagagtgataaaaattgtgaaattcaaaggccatgcaaaaatcaagaggcaggtgttgagagaagtagccatatggaggactttaaagcacaatcgaatacttccccttttggactggaggcttgatgaaaactacgcaatgtactgtttaacagaaaggatcaatgaaggaaccttgtatgacttggtgatatcctgggatgaatccaaacgctctaaaatatcatttgcagagagatgcaaaatgactatttttttgattttgcagctactatctgctttgaagtacatgcattccaaaaagattgttcacggtgacattaaattggaaaattgtcttttacaaaaaggacataaaaaatcagaatggaaggtgattctatgcgactttggaatgagttgtcatttcgatgacaaacatccctaccgcaacgatactaaagataaaagtatcaacagtagcaaaagatctagaaacgaaagcggagaagaaacaagtttggttaaatatcccacaactaactttctacctgatgaactaaccaacgactttgacgtaaatgaagacctcaaatatcagtttaaaaatcggaaatatgattcctatacaccaaaaaaagtggccagctctagctcttattcactaaagcctcttaactcaccatcttcatcatcttccaacctatttcacaagccggcctctcaaccacagccacaacaccgatacccgtttcatgggagacacaatactacagtttttccaaatttgggacccgagccttccaagtatatcggatccttaccttacgcttccccagagcttttaaagtactcggacacaagacgctcgaagtcggttgacttgcatatttatgattcgcccgactcttctcaatcagaaattagcgcggcatccttatcttcctctaactcgtcctctacatcatcgactggaaatgcatccatgaacaccaagcctggtgtagctaaaaactcaccatcgagttctctaatcgatgaaccatgtaacacttctcctttagggccagcgtccgatatttgggcattaggggtgatgctttatacgatattagtaggaaagttaccattcaatcatgaattcgaacctagactacgctctttaattaaatcaggcgagtttgaccggatttcgttagctcaagtctgtaaatatgacaagaaaagcaccgaagaaaccatgtttcaagggttgtatgacacagttattggatgcttgacgattgatttagacaaaaggtggagtctcgagagaatagaggaggtctttcaaaacgaaataaaactaaatgagtccatttacgatgataatgatttatga

SEQ ID NO: 4545 - DNA, 105 bp, Saccharomyces pastorianus
ttcacaccgctttccaactgggaagcggagagacgatcctcgtatacaattagtagcaacaacaacagcattacacaaagtaataacttcccttcgccaaactga

SEQ ID NO: 4546 - DNA, 747 bp, Saccharomyces pastorianus
atgtatacgtcgcaacgacaactacgacaaaatgagagcccgatttcatcgccatcacgttcgtcacagccttcctccggcacgccatcgccattatctggctctccagcatcgaatcacagctatggaagggatatgcgaggcatggtaggaattgatatacctgctaacgaggcggcgccggagagggtgaaaagcagcgatacgctctacttcaggcccaagaagatttaccagatggaacatgagcatccatcgcggtctactctcgtgcagctgcatagcaaaccgcacccagacgattccgccagtagctacaagaatgctaatgctgatgctgggcgtggtggcgttgagtcgggaaagtcgtgtggcaagcagcctttacacacgatgggggcagagtacgtcccagatttggacttcacaaagctagttgatgattggcaaaagtccagtgacgatttttacgagttcagaaacagtgctactccgcaggtggaaattaaaaacgatagtaaaggcaactatgaactttggaactctccagaggcaatattgggtcgacaccaacttagaagagacagtttttcccaagaaaatagcgattcaatgagtccagaaggctctctcttatcgagagatttgcactctaatgtcaagcctatccctttacccagaaatagtcaaccaatattcacaccggtttccacttggaagcggaaagacatcctcgtatacaactag

SEQ ID NO: 4547 - DNA, 2190 bp, Saccharomyces pastorianus
atgaccgcccaagacgggagagaacaccaaggactcgcagatagaagagcaagatcattttctgagtctttcaaatgccttttcaaaccctcacgttcaagaggcgcaagcccttctaatgtcaccagacttccctatcgatcgtcatcttcttcacccaagaggaattccgagccaccgagacggtccaccatatctgcacagttagatccgaaagcaccctcggtatggcagcatacgtatacattgaggcgttgttccccaggtatgccaaaactatttaaacacgcaggaagtgaagcaagtaatagcccaaccagacgtcgttctagatccaacaaaaaagaagaagcaaagaatgagtcaccaggaagttttggatcaacctctaatgactttcgcggtacgcaaggtctacgctctagaagttcatcaaattcgtcatgcgacggttcgaatggaacaactacttcttcagagagccattgggcaatggactccctgttagaccattctgataacgatgttataccgtatcggggctcaaataaggatgtactaaatgccagagacaaggtgcctgatgatttcatagacagttatgaggaagatgctttacatagagcaacttcatatccaatttccctcccccctaagcagctttaccacgaagggttgtatacaataaggtcgcatactgacggcgaaagtctaaaaagcctgcccagatttgcaggagcagatttaacatgcattattgagcaagatggatttaaagtttacgaggatggaagccatgagcacaatgtaaaagtgatggagatagtcactaaactagagaaaagtgagtccttaccggttcaccgtcaagggtcattatccaagccaaaactaggcatcgcgctgtccggtttgtttaaacatcataaagatgaatgtgacatcgaaaacgcattgtcacttttaccaaatgaaaatggctctgaaacaaatcataagaagcaagccaccgatcaaagctgtgacaagaacggaaagggcgacagcaatagtatcccgcccacacaaaacaagaaagattatttaaaaatagtaaatcctgacgcatcgctaggagatgatgaattgaaattgataaattcattatcaagcaaaatacatacaagtttacaacattatctgcacgaaaaaaatttaaagccagcggcgtgtgctagagaagaagcccctacttttcaagaaagctatggtcatcctgttgggacagtgggcgctggagcttatggtgaagtgaaagtgtgtgccagatccagaactgacagtgatattccgccatttcagacatatcatgatgataagttcatatattatgctgtgaaagaactgaaacccaaaacaaacaacgatctggagaggttttgtacgaaaatcacatcagagttcatcatcgggcattcattaagccactatcataaaaacggccaaaagccggcccccaacattttaagcgtatttgacattttggagagcagtagctctttcattgaggtcatggaattttgtcccgcaggtgatctttatggtatgctggtggataaatcaaaatcgaaaggtcgactacacccattggaagccgattgtttcatgaagcaattactccacggtgtcaaattcatgcatgatcatggaatcgctcattgcgacttgaaacctgagaatattctcttttatcctcatggtttgttgaagatttgcgattttggcacaagttctgttttccaaaccgcttgggaaaggagagttcatactcaaaagggcacaatcggatcggagccgtatatggctccagaagagtttgtaaatggcgaatattacgatccaagattaatagactgttggagttgtggtgttgtttatgtaagtatggtactaggacaccacctttggaaggtggcctccagggagaaagacatatcctttgacaccttttgcaaggaaatgacacgcacaaaagagttcaaagtattcgaagagctgaagcacgtgaactcagaactagcggcaactagaaagatagcattatattgtatattccaatgggagcccaaaaagagaatttctatcgataaacttttaggcatgcagtggatgaagcatacaaattgttgcctaatatatgaatctagctag

SEQ ID NO: 4548 - DNA, 408 bp, Saccharomyces pastorianus
atgtctaaaatcacacagcaactgaattttttgaacaagattagtgccaccactaagttaccccaaatcctcatagattcgaagaagtattcggggcttaggttgacctttcagatgaaaaaccacaacgggcatatgggtgccagagtcttttggcatgactacctacctaccttgcaattctacaatccagaaatcaagttcgatgtgataagaatcaagaacgaagataagcagaagagtgttccgtgcaaactggaaatcctctctcaagagggcacggttacagaaactattgacatgcgcaataagatgcatgacgacataatgaaagatctacttgaaaagatagaacacaaccctcttccagagaacgaggttataagggctgggtcgccaatagaataa

SEQ ID NO: 4549 - DNA, 144 bp, Saccharomyces pastorianus
atgaggtatacagtcattatgcagctctcggtaattttttcccgtcgcttcagctacgggatttcttcgatgcgattgaaaaataaagttgtgttcaatgagaatatgggaaggaaagacactttttacaaactgatcttataa

SEQ ID NO: 4550 - DNA, 939 bp, Saccharomyces pastorianus
atgcttttatctacctttacattatgcgacgccgttaagatcgaaagcctaaaccaaatccatttagcaggattactgattataatcagctccttctatgctctttacaagatatacctgaatataaattcctatacgcgtaccatattcaccatacaaatttctttagtggctgccatgctagtagttacccatcgttcagctgtgtctctgcagcttagacaagggttaccaagggaatctcagattgctggttgggtgatttttttcgtatcactcttcgtaatgccatttttacattacagaaaacctaacaatgattataaagttagattactagtcatctacttaacttttgctcctgcgtttatcattttaaccatctcctttgaatcactgttctactttttgttcaccgtttatatggtgcagtggattgaaattgaagacaaaatcaaggaaatgaaaactaaaaagaatgaaaattggctgcaggtgttaagagtctccgtaataggattttttctattacaagttgcattttttggaactgggaatgtcgcttccatttcttcattttcattagactcagtttatagattgctaccaatttttgatccgttcccaatgggtgcattattaatgttaaaactgatcattccatatgggctactgtctacatgcttgggtatactaaatttgaaactaaatttcaaagactacacaatctcgtctctgatcatttcaatgagtgatattttgtctttgaattttttctatcttttaagaacagagggatcatggttagatattggtataacaatttctaactattgtttggctatcctgtcttccttattcatgttaattttggaagtagttggccatgtattgttgagaaatgttactatccaaaataaaactaagaaaacacagtaa

SEQ ID NO: 4551 - DNA, 1797 bp, Saccharomyces pastorianus
atgtggaacaaaaccagaacaacgcttctggctgttggtgtcttattccatttgttttacttatggtcaatttttgatatctacttcatttcgccgctagttcatggtatgagcccataccaaagtacttcgactcctcctgccaagagattgttcctgattgttggtgatggcctgcgtgcagatacgacatttgataaagtcacccacccggtaactggaaagacggagtttttggcaccttttattagatctttagttatgaacaatgctacttatggtatttctcataccagaatgcccactgaatctcgtcctggccacgttgccatgattgctgggttttatgaagatgtcagtgctgttacaaaaggttggaaatcaaatcctgtcgattttgacagttttttcaatcaatccactcacacctattcctttggttcacctgatattttacccatgtttaaagatggtgcatctgacccaaataaagttgatgcctggatgtatgatcatactttcgaggattttacacagtcttcaatagaactggatgcgtacgtcttcaaacatctggatcaactgtttcataattcgacactaaactcaactctggattatgaaatcagacaagacggtaacgtattctttctacatttactgggttgcgatactgcgggacattcttacagaccttattctgctgaatactatgataatgtcaaatatattgacgaccaaatcccaacccttatagagagggtcaacgaattttttgacgatgacaagactgcattcgtatttaccgcagatcacggaatgagtgcatttgggtcacatggtgatgggcatcctaacaacacaagaactcccctggtcgcttggggagcaggtttgaataagccagtacataattcctatccggtatttgacaactatactgaaaactgggagctatccgacattaaaagaaatgatgtcaagcaagctgacattgcctccttaatgtcatatttgatcggtgtaaactatcctaagaattcagtaggcgagttaccaatagcatatatcgatggaaaagagagtgataaacttgctgcgttatataacaacgcaagaagcattttagaacagtacctggtcaagcaaagcgaggttacggattcccagttttattataaagagtatccaagatttgtcgagaagcctcatttgcgttacttggaggagatagaaaccctaattcaacgtatatctgaaggagagaactacctagaagaagaagcaatcacacttacagaagaactaatgcaaacgactctggaaggtttgtattatttaacaacctataactggagattcattagaactatcgtcacttttggcttcataggctggatctttttctcttttacaatatttttgaagtcatttattttagaggatgccgccgatgaccagaaaacatcgctgttaactcatgtgacatttggatccgttggaattctattgaactggatcctcttttaccagcattctcctttcaacttttacatgtacctgcttttcccgttatacttttggaggtacattttcacaaataggtctgtattacgcacgggtatcaaggagttttttaaaggtacttccatatgcaaaagaattctaatcacagtttccattatttcagtttatgaagggatcgtatacgggtttttccatagatggacatttacgttagttacaaacatactagcattttatccatttatctgcggtgtgagggggttactgtaa

SEQ ID NO: 4552 - DNA, 297 bp, Saccharomyces pastorianus
atgcaagagctctggtactctggaaatgaacttaacgccggtatcctaacagatggtaagggcagaatcggttctattgttgccaacagacaattccaatttgatggtccaccaccacaagccggtgctctttacgctgctggttggtccatcactccagatggtaacttggccattggtaaccaagacattttctaccaatgtttgtccggtaacttctacaatctgtacgatgaacacattgggtctcaatgtaacgaggttcacttacaagctatcgatttagttgactgttaa

SEQ ID NO: 4553 - DNA, 471 bp, Saccharomyces pastorianus
atgcaatacaagaaaaccctagtcgcatctgctttagctgccaccactctagctgcctacgctccgaaggacccatggtccactttgactccatctgctaccttcaagggtggaataactgactacgcttctactttcggtatcgctgttgaaccaatcgctactaccgcctcctccaaggctaagaggggtgcagctatttcccaaatcggtgatggccaaattcaagctactaccaagactcaagctaccactaagactcaagctcctgctgtctctcaaatcggtgatggtcaaattcaagccaccaccaaaactcaagctcctgccgtctctcaaatcggtgatggtcaaattcaagccaccaccaaaactcaagctcctgccgtctctcaaatcggtgatggtcaaattcaagccaccaccaaaactcaagctcctgccgactctagagatcgccggtacgagctg

SEQ ID NO: 4554 - DNA, 1290 bp, Saccharomyces pastorianus
atgcaatacaaaaagaccatagttgcatctgctttagctgcgaccactctggctgcctacgctccgaaggacccatggtccactttgactccatctgctaccttcaagggtggaataactgactacgcttctactttcggtattgccatcgaaccagccgccaccacagcttcttctaaggccaagagagctgcttctcagatcggtgacggtcaagtgcaggccgccaccaccaccgccgctgtttctaagaagtctaccgccgctgctgtctcccaaatcaccgacggccaagttcaagctgctaaatctaccgccgctgccatctcccaaataggtgatggccaagttcaagctgctaaatctaccgccgctgccatctcccaaataggtgatggccaagttcaagctgctaagtctaccgttgctgctgtctcccaaattaccaacggccaagttcaagctgctaagtctaccgccgctgccgtctctcaaataggtgatggccaagttcaggttgctaaatctaccgccgctgccgtctctcaaataggtgatggccaagttcaggctgctaaatctaccgccgctgccgtctctcaaataggtgatggccaagttcaggctgctaaatctaccgccgctgccgtctctcaaataggtgatggccaagttcaggctgctaaatctaccgccgctgccgtctctcaaataggtgatggccaagttcaggctgctaaatctaccgccgctgccgtctctcaaataggtgatggccaagttcaggctgctaaatctaccgccgctgccgtctctcaaataggtgatggccaagttcaagccactacctctactaaaggtgctgcttctcagatcacagatggtcaagtacaggcttcgaaaactaccaacggcgctagtcaagtgagtgatggtcaagttcaggccactaccgaagccaagagcgccaacgatccagtcgatgtcgtctcttgcaataataatagtacactatcaatgagtttgaagaagggtatcctaactgatgttaagggcagaatcggttctattgttgccaacagacaattccagtttgatggtccaccaccacaagccggtgctctttacgctgctggttggtccatcactccagatggtaatttggctttaggtgaccaagacactttctaccagtgtttgtcgggtgacttttacaacttgtacgataaacacattggttcccagtgtcatgaagtttacttgcaagctattgatttgatcgattgttaa

SEQ ID NO: 4555 - DNA, 1515 bp, Saccharomyces pastorianus
atggcgactgattccgatagatgtgtttttcgtgcctttggccaggaatatatcctgaataagcactttcgactcgtagatgaaattggccggggctccaacgggcttatttgttcttcgacttatacagagaagaacgaagaaagcacaatcgctatcaagaaaatccctaatgcttttgtgagtaaactatcctgcaagagaacccttcgtgaactaaaaatattgagacattttagaggccaccctaatataatctggctttttgatactgatatagttttttatccaaacggagtattaaacggcgtgtacttgtatgaagaactaatggaatgtgatctttctcaagtgataagatccggacaatgcttagaaaatacacactgtcaaagcttcatataccagatactttgtgcattgaaatacatacattctgctgacgttttacaccgcgacttgaagccaaacaacctacttgtcaatagtgattgcctattaaagatttgcaattttggtctgtcacgaggttattcagaaaactatgaagaaaacaatcactttcttacagagtttgtagcaacaagatggtatagagcgccggaaatcatgttgagttatcaaggatatacgaaagctatcgatgtttggtcaacagggtgtattttggcggaattgctgggcggaaaacctatctttgatggcaaagattatgtagatcaactgaatcatatcctccaaatactcggaactccatcaaaggaaacattacaaggaatcagttctcagaaggttcagaattacatcttccagttcggtaatataccaaggacaccttttgagagtctattgccgagagctagttcagaaggattagacctattacggaaaatgctggagtttgatccggaacgacgagtaacagtaagtgaggcattagagcatccatatttgtccatatggcacgatatagacgatgaaccttcatgcgaaataaagtttgactttgagttcgaacatatcgatagtatagaggaactacaaagccaagtcataaaggaagtgtttgactttagacaagttgttaggaaacatcccattggtggagacttttcatcatcatcttcgtcatcagaagaccccattctccaagaggttgctgatgtccatccctcaataaaaaaattaggcagccctaactccgatgcctctcttatgagtcaactaccatcattgactacaactcagccgtttgaaagccatgtaaaggcaaactcaggttcgtctcaaggtgcaaacacgctcgaatgcaataccacccaggaacataaggacgcgttgaggtcacacagcgggccaaataaaacggaatgtttgatcgtgtcatcatctcctcccgaacataatacaaatggtaatgagagtgtaagccaggataccaatgacaatgacagtatttttttctttgatttagaaaaagaattagaatttggactggatggtagatttttataa

SEQ ID NO: 4556 - DNA, 2586 bp, Saccharomyces pastorianus
atgaccagcaacaccccaaaacgtgaaattcttccagataatgtcgcccctttacactacgatttaaccgtagaacctgattttaaaacgttcaagtttgaaggttctgttaaaatagaactaaaaatcaacaattctgccattgacacagtaagattgaacactatcgatattgacatccattctgccaaaattggcgatgtcactgcttctaagattagtactgacgaagaacaacaagtcgcagactttgtatttcctgaagggaccttgtcctcatttaaagataacgcaattttagaagtaaagtttacaggtatcttgaatgataatatggctggcttttatagagccaagtatgaagacaaattgactggcgaaacgaaatatatggctactactcagatggaaccaacagatgctagaagagcttttccatgtttcgacgagcctaacctaaaagcttcgtttgctatcactttagtctccgacccatccttaactcacttgtccaacatggatgtcaaaaacgaatatgtcaagaacggaaaaaaattcactttgtttaacacaaccccaaaaatgtcaacttatctcgttgcttttatagttgccgaattgaaatatgtcgaatctaaaaacttccgtatccctgttagagtttacgctacaccaggtaatgaaaagcatggacagtttgccgctgacttgactgcaaaaactttggcattttttgaaaaaacttttggtattcaatatcctttaccgaaaatggacaatgttgccgttcatgaattttcagcaggtgctatggaaaattgggggttagtcacatacagagtggttgatctactattagacaaggacaattctacgttggatcgaattcaaagagttgccgaagtcgttcaacatgaattggcccatcaatggtttggtaacctggttaccatggactggtgggaaggtttgtggttaaacgaaggtttcgctacttggatgtcatggtattcatgtaacgcatttcaaccagaatggaaagtctgggaacaatatgttactgataccttacaacatgctttggccctcgactctttgagatcttctcatccaatcgaagtacctgtaagaaaagctgacgagattaaccaaatatttgacgctatttcttactcaaaaggtgcttctttattgagaatgacttcaaaatggttaggtgaagaaactttcatcaaaggtgtttcccaatacctgaataaatttaagtacggtaacgcgaagactgaagacttatgggatgccttagcagatgcttctggtaaggacgtccgttctgtgatgaacatttggactaaaaaggttggatttcctgtcatctcagtaagtgaagacggtaatggtaagataacgttccatcaaaaccgttacttgagtaccgccgacgtcaaagccgacgaagatgaaacaatctaccctgtgtttttggctttgaaaaccaaagatggtgtcgatggatctgctgtattaaatgagaggagcaagactattgaattaaaggaccaagaatttttcaaagtcaatagcgaacaatccggtatttatatcacatcctatagtgatgaaagatgggcaaagctgggaaaacaggctgatttattgtctgttgaagaccgtgtcggtttggttgctgatgttaagaccctatctgcctctggttacacctcgactaccaacttcatgaatttagtctccaaatggaataacgaaaaatcatttgtcgtttgggagcagataatcaacagtatttcttcattaaagtccacttggttgttcgaaccagaggagacccaaaatgctcttaataacttcacgaaacaactgataagcggcatgacacgaaacttgggttggaaattcgaatcctctgattcattctccactcaacgtttgaaagtgaccatgttcggtgctgcctgtgctgccagagatcagcatgtcgaaaaagctgctctgcaaatgtttactgactattgcaatggtgacaaagacgccatcccagcattaatcaagccaattgtattcaacacagccgcaagaattggtggcgttgaaaactacgaaaaagtctataaaatctacttaaatcccatctctaatgacgaaaaattagctgcattgagaactttaggtagattcaaagaatctgagttattggaaagaactttaggctatctgtttgacggcactgtcttaaaccaagatatctatatcccaatgcaaggcatgagagctcaccgtgagggtgtcgaggctttatggagttggatacagaagaactgggatgaaattgccaagagattacctcctggtctatcaatgttgggttctgtcgtcaccttaggtacttccggctttacttcactgcaaaaaatagatgaaatcaagaagttctttgctactaaatctactaagggcttcgatcaaagtctggcccaaacattggacaccattacctcaaaggcccaatgggtcaacagagaccgtgatgtggtcaacaagtacttgaaggataatagatacttttag

SEQ ID NO: 4557 - DNA, 393 bp, Saccharomyces pastorianus
atggtggattccacaatcgatcctaagaaattaactacaaccgctgagttcttggtagacatattattgatcactgaatctagctgtgagaatggtgtggatattttgatcgcatgcaacaaaagcgaatcatttactgcaagaccatcatcaaagattaacgatgctttagaaaacgaaattcaaaagatcattgaaaggagaaaaaaatcgttaaacgaagtcaaaagaaaggtcaacgaagacgaggataccgagaattcattagatgctttacaatctgctaatgggtttaaatttgcaaatatggaagggtctgtcgttaccatcgagggtagtgtcagtaagaataatatttccaaatggcaaaaatggatagacgaaaaactttag

SEQ ID NO: 4558 - DNA, 309 bp, Saccharomyces pastorianus
atgctaagtaattcgctagtgattgcctgtttattggtgataataactgccatagcatttatcacagtgcaaaagacatcatcatcaaagactgggattaaacaaaagagttatcagccatctattgttattgcaggtcctcaaaatacaggcaagactagctttcttacgctactaaccacagattccgtgagaccaaccgtcgtgtcccaggaaccgttattagcggcgaattacaataattctagagctagtttggtggattcccaggccacgtcaaattacgctataagctctctgaatacttga

SEQ ID NO: 4559 - DNA, 753 bp, Saccharomyces pastorianus
  modified_base (16)..(16): a, c, g, t, unknown, or other
atgtacgattgtcagnatgttgctccccttttcatgatcaggcatcgcattgatgttatgctgagccacgactggcccagtggtgtcgtatatcatggtgatataaaacatctattgaagtttaagcctttttttgaacaagatattcaaaagggtgaactgggcagtccagcgacttggcagctgttgagagatttgtgccctcagtggtggctgagtgctcatttgcacgtcagatttcaagcttctatcaaacacaataagaggaactctcaattagccaatcgatcaacctcgaaaataaaaaaaaactccaacgaaatcgacctggatttgtccagcgatgatgatgaaaagccgcctgctgtggcaaaaagtgaggaaaagagcgaacctagcttgaagtacgatgagacacggttcctatcactggacaaatgcctacccaggaggcgctggttagaaatagtggaggtagagccggataaatcgcacatttcgtggaaagacaaagaccattgtatgttttgggatccggaattcattaacaatataaaaatatgggagcgaaatgaagatgctttacgaaataaatcgtttgacgatatcaattggatgggactatctcaatcaaatggaaaagaagacatcgaaatcgaatgggaaaagtatgctgttcctgaatacactttagatatacaaaaagatgagatagggcagactaaattattcgccgacaaatttttagcttag

SEQ ID NO: 4560 - DNA, 1611 bp, Saccharomyces pastorianus
atgcacaaggacaactggaaatggcacatgtacgataccgtgaaggggtctgattggctcggtgaccaggactctatccattacatgacccgagaggcgcctaagtcgatcatcgagctggaacattacggtgtgcccttttcgagaaccgaaagcggcaagatctaccaaagagcctttggtggccaaactaaggagttcggtaagggtgctcaggcctacagaacttgtgcggtcgcggacagaacgggacatgcccttttgcacactctttacggccaagccttgagacacgacacacatttctttatcgaatatttcgccatggatctgttgacccataacggcgaggtcgtgggtgtcattgcgtacaaccaagaggatggtaccatccacagattcagagcgcacaagaccattatcgccaccggtggctacggtagagcatacttctcctgtacctccgcgcacacgtgcacaggtgacggtaacgccatggtttcgcgtgctgggttcccgctgcaagatctggagtttgttcaattccacccttcgggtatttacgggtccggttgtttgatcactgaaggtgctcgtggtgaaggtgggttcctgctcaattctgaaggtgaaagattcatggaacgttacgcccccacggccaaggatttggcctgtagagacgtcgtgtccagggctattaccatggaaattagagaaggtaggggtgttggtaagaagaaggaccatatgtacttgcaattgagccatctgcctccagaagtcttgaaagaaagattgcccggtatttctgaaaccgcggccattttctctggtgtagacgtgacaaaggaacctattccaatcattcctaccgtgcactacaatatgggtggtatccccaccaaatggagcggtgaagcgttgactattgacgaagaaactggcgaagacaagcttattcctggtttaatggcttgtggtgaagccgcttgtgtctctgttcacggtgccaatagattgggtgctaactccttgttagatcttgttgtttttggtcgtgctgtagcccatactgtcgctgacaccctacaacctggcttaccacataaaccactaccttcagatctaggtaaagagtccattgccaacttggataaaataagaaacgctaatggttcaagaactaccgccgaggttagaatgaacatgaaacaaacaatgcaaaaggatgtatccgttttcagaacacaatcgtctctggacgatggtgttcgcaacatcaccgctgtggaaaagaccttcgatgacgtcaaaaccacagacagatcaatgatctggaattccgacttagttgaaaccttggaattacaaaacttactaacttgcgcctcccaaactgccgtttctgccgctaatagaaaagaatcccgtggtgctcatgcaagagaagattatccaaacagagacgatgaaaactggatgaagcacactttatcctggcagaaggatgtcgctgctccagtgactttgaaatatagaaaggttatttctcacactttggatgagaatgaatgcccctctgttcctccaactgtaagatcctattag

SEQ ID NO: 4561 - DNA, 150 bp, Saccharomyces pastorianus
atgctatcgctaaagaaatctacgctctctaagcttgctgtgtttaagagcgcaaggacgttttcatcgtccgcttttgtccgccagacacaggggtctgtgaatggctccacgtccacttccgcggatggacaagtaccatataattga

SEQ ID NO: 4562 - DNA, 2160 bp, Saccharomyces pastorianus
atgattagaagagatagagagaagagagaagaaaaagggatggcgaatagcataagacgtgtaagcatcgcagatatgaagggcaacaacggcaatgcagtcacgggaggcggcacaggaacctcgcacgcgtctgattcactcttaacggatggtagtggcagtggcagtggtagtggcagtggcagtggtagtggcagcaacagcgggagcagaagcagaagcaggaaatcaagtgggactgccggcggtctgctgaagaacccaccactgcaggtaaacagcgaatcggcgaatggtgcagtgcctgccgcgccgcacactataactaataatggcggtacgctcgacgtgagcataaacaatcctgacccgcaggtggttgatgtggtggcccgccacctgatccggaacccgaccaacaatctgcacttgcaaggtggagatatcacgagagacctgtacaagtggacgaacgagcatccggcgtcgccgtcgcagaaccagaacctgcccgctccgtccacctcgataccttcgcaagcgccctcattctccaaccgcaggaggtcgatgagcttttcagcggcctccgtagcatcctcatcctaccctaacaacaatgcagatgcgaacgtgaactctttgacggggaatgtatccgccatgggtctggcgcccgcatcgatgacgcacgaagagatcagggcccccggcgggttcagaaggtcgttcatcatacaaaagcacaagaggcataacatcaatgcccccgtaccgaattttttcaccaggaactttatcgagtttctgaccctgtacggtcattttgctggtgaagacctgtccgaagaggaggatgaggaagaaaccgaggcggaacaggaaccagaagaaccggaggaggaagctttggaaacggaaagcacccagcttgtctctcgcgaacgtgaccgccgcccccataagtcctccacggtgaaggcagtactacttttgttgaaatcgtttgtcggtactggtgtgcttttcctgcccaaggccttccacaacggtggctggggatttagcggcgtctgtctactcatgtgcgccattgtttcttacggatgctttgtttcgttgatcaccactaaggacaaagtgggcgttgatgggtacggtgacatgggtagggtactttacgggcccaagatgaaactggctattctcctgtccatcgccttatcgcaaatcggattttctgccgcttataccgtcttcaccgccactaatttgcaggtcttttgcgagcattttttccatttgaaaccgggcagcattaatttagccacctacatctttgcgcaggtgctaatttttgttccattatcattgacaagaaacatagccaagttgagtgggaccgcgttgatagccgacgtatttatattactgggtctggtttacgtttactattactccatttaccacatctccgttaatgggattgcatccgacaccatgctcatgttcaataaggcagattggtctttgttcattggtactgccatctttactttcgaaggcatcggcctgcttatccccatccaggagtcaatgaaacacccgaatcacttccagccatcattgtccgcagtgatgtgcattgtggcagtagtcttcatatcctgtggtctcttatgctatgccgcatttggggccgatgtgaaaacggttgttttattgaatttcccgcaagatagctcctacaccctcactgttcaactactgtacgcattggccatattattatccacacctttgcagttattccccgccatacgtatcttggaaaattggactttcccctcaaatgcatctggtaaacacaatccgaaggtcaaatggttaaagaactacttccgttgcgccattgtgcttttgacatccgtcctagcatgggtaggtgcaaacgatctggacaaatttgtatccctggtagggtcctttgcatgcataccattgatatacatatacccaccgctgttacattacaaggcgttcagcctatccggaatttcaaggccaaggcttctgttggatttggttatcataatcttcggagtcgctgtcatggcctacacttcatggcagaccataaaaatgtggagctcataa

SEQ ID NO: 4563 - DNA, 93 bp, Saccharomyces pastorianus
atggtcctcctggtaccggtaagacattatgtgctcgtgctgtcgctaatagaactgacgctactttcatcagagtcatcggttccgaattag

SEQ ID NO: 4564 - DNA, 660 bp, Saccharomyces pastorianus
atgtttgaagcatccgatagtatgctgaattcattaacaagaccttaccaaattgctagttttcccactagaacgaatattaaaattcctattttattaatttatggcggtattgattccttagtcgatattgaagtgatgaaaagaaatttgccttccaactctgtatttgatgtaaaagttgacaattacgaacatttggatttgatttggggtaaagataccgacaccctagtcatagctaaagtactcaggtttatcgagttttttgattctagcaatagtttaatgaaaacaaaccacttactaccatctgcaagtttagttgaggaagtaccaactactacatggaaagctatatctcacccatcccatgactatagccaaaaggttcaatcattggatcgttcccctttgtcagtgcaagctgacgaaatggatgaaaaacccagtgctgataatgcgaggtttttgagacgagtcttctctaccagtgccatagacgatgaaaatgggagtgtgccccaagaagagacggaaggtgaaattcataaggagcagcaaagaagattaagcgcttaccttgaatcatctaatgacctacgacaactagacaccaatctttcatcagcggtgctagatggcacggaccaagaataa

SEQ ID NO: 4565 - DNA, 972 bp, Saccharomyces pastorianus
atgtttttccctttcttgggcagattatcaataacagactacatcatagtcatcttagtatacatcgaaagtattgtctcatctgtacttaaattaataccgcaaccgatgtttaaccttttcgaatggctgatcaacttctcaacatgctctgacgataataccattgaacagaaattaagggcagctccaaccatccatgaaatgtgcgcacttttcgatatctctgtcgaggaccatttggtaaggaccgaggatgactacatcttgacgttgcacagaattccaccactttccaaaaataggttcaataataaggtggtttacttacatcacggtcttttaatgtgttccgacgtttggtgttgtaatgttgaaagacataaaaacttgccatttgttttacatgatttaggttacgatgtttggatgggtaacaataggggtaataaatactcgaccgcccacttgaataaaccaccaaaatcgagcaagttttgggatttctctatcgatgaattcgcgttctttgatattccgaactcaattgagttcatactggatatagcgaaagtggacaaggttatttgtattgggttctcccaaggttcggctcaaatgtttgcagctttttcgttaagtgaaaagctgaaccaaaaagtctcgcattttattgccatagctccggctatgacacccaggggcctacacaacagaattgtggatactctggctaaatcctcacccagcttcatgtatcttttctttggtaggaatatcgtgttgccttctgctgtgatttggcaaaggactttacatccaacccttttcaatttctgcattgatgtagcaaacaaggttctcttcaattggaaatccttcaacattcagccaagacaaaaaattgcttcctacgcaaaactttattcaaccaccagcgtgaatccatcgttcattggtttcaaatattaa

SEQ ID NO: 4566 - DNA, 1008 bp, Saccharomyces pastorianus
atgcaagtcggggagggaacatatggtaaagtttataaagcaaaaaatacgataacagggaagttagtagcattaaagaaactaagactacagggggagagagaaggctttcctataacctctatacgagaaatcaaattattacaaagttttgatcatccgaatgtttctactattaaagaaataatggtagaatctcagaaaaccgtgtatatgatattcgaatatgctgacaatgatctgagtgggctgcttttgaataaagaaatcaacatttcccattcccaatgcaaacaccttttcaagcaactcttattaggaatggaatacctgcatgatagcaaaatcctacaccgtgatgtcaaaggttctaatatcttaatcgataatcaagggaaactaaaaataacagatttcggtctggcaagaaaaatgaattccaggacggactatactaatcgtgtcataactttatggtacaggcctcctgaattactattaggaactacaaattatggagcagaagttgatatgtggggctgtggttgcctactagtagaattgtttaacaaaactgcaatttttcaaggttcgaatgaattagaacaaattgaatcaattttcaaaattatgggtactcccacaataaagaactggccaacgctttatgacatgccgtggtttttcatgattatgccacagcaaacaaccaaatataagagcattttttctgaaaaattcgaaagtattttgccatctgcaaaatgtctacagttagcaactaatttgttgtgttacgatcaaaaaaagagatttactgctagtgacgccttgcaaagcgactatttcaaagaggagcccaaacccgaacctttagttcttgacggacttttaagctgccatgaatacgaagttaagttagcgagaaaacaaaagcgttctaatattgcatctaataacgttaataacgctaacaataataagagtaacactaataatgataaatag

SEQ ID NO: 4567 - DNA, 141 bp, Saccharomyces pastorianus
atgcaagtcggggagggaacatatggtaaagtttataaagcaaaaaatacgataacagggaagttagtagcattaaagaaactaagactacagggggagagagaaggctttcctataacctctaacgagaaatcaatatac

SEQ ID NO: 4568 - DNA, 549 bp, Saccharomyces pastorianus
  modified_base (418)..(462): a, c, g, t, unknown, or other
atgtcttttaacaacggcagtacttattcaaagagttatagcaggaataataagagacccccgttcggaaagaggtcgccacacccccagtctctatcgaggccaccgccaccaaagagaatacggactaataatagttaccagtcaaatctagataatgactcgcctcaaacgatggatccaactgatacaccagctcatgcgaaaagtcgcaataataatatcctttcccgttacaatgacacatcttcccaaacaaactcaagatatcaaggttcgagatacaataatagcacatcgtatgcggataggtccaacactatgaagagggatgaaacgaaagctgaatttctatctcatttaccgaaggggcctaaatctgtagagacgtcgagatataataattcaccaatcaccnnnnnnnnnnnnnnnnnnnnnnnnnnnnnnnnnnnnnnnnnnnnncgtactactacttctaattaccacaataataggggtcaggaaataccaattctccgtgccccaagaaaccacaagtatcagttctaa

SEQ ID NO: 4569 - DNA, 336 bp, Saccharomyces pastorianus
atggagcaaaacaaagatccgcaaatgatatcaaaacatagttcgagactacctgtatgggtactcagtccccgtgaagaacaacaggcccgtaagaatttaaagacgacaacatatgaaaaatgtgcaaattttgtgcaggccatggctgattgcgccaaggcaaatggtatgaaagtttttcctacttgcgataagcagcgagacgaaatgaagtcgtgcctcttattttaccaaacagatgagaaatatttggacgatgaaagggacaagattgttttgaagaaaatcaacaagctagaagagctacttcaaaagcaaaactcagcaaagtaa

SEQ ID NO: 4570 - DNA, 1032 bp, Saccharomyces pastorianus
atggaatatgaaccggagtttgtctcaagagctattcaagctttatctcaactaggtattaaatatgcacaagaatcatttgttagcaaagtcttggatatactcctagaattgttagaaagacaggatacaataaaggacgactgctgtatatcgttatgtgatttattgagacattgtcctgaaaacaatgaaatggccaaacaagtctgtgcagtattcaacacatggtccaatccagaagttttgttacaatcagatattgccaagtgtaatttcgtatggttattgggacagcatccaaatgatttttccaatttagagccaaagatcaatatcttcatagaaaattttgttcaagaagaagctttgacacaagtgtctttgttaatgacagttgtcagattgcattccactttaacggggagcgcactacaaagtgtcttggaattggccacacaacaaacacatgaattagatgtccgagatatggctatgatgtattggagatgtctttctatgccaaattctgagaagcttattaatgatttatgtcaaagtaaactcccaatgatttcaaatacacttgataagttctcaccagaagtcttagaaaaattattgatggaattgggtaccataagttccatctatttcaagcctaacgcagacaggagaaaaggtgaaaaatacgtccaaaatatagtcaaggggaagcatatggaggaactagaaagcatggcaaaagatgaaattgccaacaaggcaaatgacgatgtgctactagatttcgatgatagaaatgatgcgacgaatacgagcacaggaatgctcaatacttcaagcacattgggcgatttagacgacttattcgatttcggatcttccgaggatactccacaaataaataaggatggttccaagactgttcaagggctcaatagcttgaatttgaacgacaacttaaacaccatgtctaccaataataaaaacaacaatggagtgtcgcaggacctacttgacctgttttga

SEQ ID NO: 4571 - DNA, 1077 bp, Saccharomyces pastorianus
atgccaccgctggataagaggatcaagaagtttttaaaggactccattagaatagcacctaaaatttccagtaagggtgaattgggtgaattacgaaccggcctagtctctcaatacccgcaaactcggaaagatgccatcaaaaaaactattcaacaaatgacattagggaaagatgtatcttcactgtttcctgacgtcttaaagaacattgccacgattgatgttgaacagaaaaaactggtttacctttatgtgatgaactatgccgaaacacaccccgagttatgtatccttgccgtcaatacatttattaccgatgcgcaggatcccaatcccttaattcgttgtctggcaattagaacaatgtcaatgataagagtggagaaaattttagaatacattgaaacccctcttcgtcgtactttgcatgatgataatgcttatgtcaggaaaactgctgtgatatgtgttgcaaaacttttccaattaaacaaggaactatgtgtcgagctaggtgttcttgaagatttggttaatgccctagatgattcgaaccctttggtcattgcaaacgcaacagctgcattaatagagattcacaatatggacatgaatgctgtcaaactttcaagtttgattcaatcgcacgtgtcacaatttctactggcgttgaatgaatgtaccgaatgggcgagaatcactatattgagtacactgtctgaatattcggcgaaggattcgctagaagcacaggatatcattgacagagtaaccgctcatttacaacacgtcaacccagcggttgtcttggcaactataaaagtgatcgtaagaaacttaccacaaattgaatactcttcaaatagcatgataatgaaaaggttatcatctgctttggtatcattaatgtctacaccgcctgagatgcaatatgtggccttgaagaatattagaattatactagaaaaataccctgaattattaaccaaggaattgaggatattttatatcaagtttaccgatccactctatgttaagctggaaaaaatcgacattcttgtgagaattggttga

SEQ ID NO: 4572 - DNA, 1842 bp, Saccharomyces pastorianus
atgtttgaattcatgaacgttttaaacacggatgtctcattatgtaacatgctaaaatcagtcttgaatagtcccgagatatcatcgaaattgagcgaagaagagcttaaagttggtaaaatcttattggatgattttgaaaagtcaggcatatatatgaatcccgacgttagagaaaactttattcagttatcccaagaaatcagtttaataggtcaagaatttatcaaccatacagattatcctggttctaattctgtgaagataccatgcaaggagttagataacagcaatgtaagcacattcctattgaaacagttaaataaagatgttaagggccagaattacaaagtacctacatttggttacgcagcttacgcattattaaaaagttgcgaaaaggaacaagtaaggaaaaagctatggaccgcattacatagttgttctgacaagcaaatcaaaaggctgaaccacttacttaaactgagggcaaatttagctaacctgatgcacaaagaaagttatgcggaatatcaattagagggaaaaatggcaaaaaccccgaaagatgtacaagattttatcttgaccttaatgaatgataccatagataagacggcaagcgagttaaaatttatagccgaactcaaggccaaagatctcaagaagcctttggctacaagtacagacgaaatactgaaacttgtcagaccttgggatagagactattatactggcaaatatctacagcttaacccttcaaatgcaccaagtgccaaagagataagctcatatttcacattaggaaatgttatccaaggtttatccgatttgttccaacatatatatgggattaaattggaaccagcaattgctgacgagggagaaacatggtcccctgacgtgagaagattgaatgtgatatcagaagaggaaggaattattggcgtgatttactgtgatttgtttcaaagaagtggaaagacttcaaatccagcacatttcactgtttgttgttccagacaaatatatcctaacgaaacagacttctcaacaattcaactgggtgagaatgcagacggttccttttttcagctgccggtaatttcgctcgtgtgtaactttgccccaataccgattgcttctaagaaaagcttgtgttttttacaactaagtgaagttgaaaccctctttcatgaaatgggtcatgcgatgcattcaatgttaggaagaacccacatgcagaatataagtggtacaaggtgcgctactgactttgttgagctaccaagtattctgatggaacacttcgccaaagatatacggatcttgacaagaattggcaagcactatgagactggagaaaccattgaggcagatatgttgcagagctttatgagaacgacaaattttctacagaattgtgagacgtactctcaagcaaagatggctatgttagaccaatcatttcatgatgaagaagtgatttctagtattcatagctacgatgtagttaaaaattatcaagcattagaactacgtttgaaggtactagttgatgaccagagtaattggtgcgggagatttggccatttatttggatacggagctacgtactacagctacttatttgataggacaatagcatccaaaatttggtacgccttatttgaagacgatccatatagccgaaagaatggtgataaattcaaaaagcatctactaaaatggggtggattgaaagatccttggaaatgcatcgctgacgttttacagtgccctatgttaaaggaaggcggcagcgaagcaatggagtttattgcacaaagtcataaatcttag

SEQ ID NO: 4573 - DNA, 492 bp, Saccharomyces pastorianus
atgttttatatggcaaccctgaagagagggttcaatgtcttgataccgtcgctctcccgccaaagtcaattaattaggtcgtttgccacagccggtgcagtttccagaactagttcaaaaagtataaagaatattttcgacgacaattcatactggagaagcataaacagtcaggatgctaataacagtaagattgcacagtaccttttccaaaaaaccaaaaccggactttttaagaacccttatttgacttccccagacggcttgcgtcaatttagccaagtctctttgaggcaagcacaggaacttctcgaacgaatgagaaacgattcttctgaaaacggtaaattaacctacattatgaacctggatagattgagcgatacattatgtagggtgattgatttgtgtgagttattagatcaacacatccagatgatgcgtttgttaaggctgcccaagactgctatgaacaaatgtttgaattcatga

SEQ ID NO: 4574 - DNA, 1392 bp, Saccharomyces pastorianus
atgtggaaatacctgcctaagcaggccaaacatggaagaaccataaaaagacttagcgttctccagtttgttatcaatgatcggctcaggttatattctacgttcgaagaacatagtatttggagaacgccattcagaaaaagaagcaagttccagaaatggactttgtcgatagctatagtaagttttgtttcatttaacatatggtgggtcttttggccacatcacaccttccccaagcctgtggctaagatattaaggaaggggttacatgcagaaattgaaaaagaaggtgctgattacagaaaaagccttcattactaccttgaagctttagaagaatgcaaggttgagaacgtgcatcctctatcggacgagtacactggtatcgaaattaagatcggagaaatgtatgagaagttggattcacttaacgatgcggtcactttgtatgaaggcatgttaaaaaggttctacaatgaactcagcaagcccaccaatatcttaccgatgagaaaagccttgttattcaaaagggacctccaaattttgataagatacattgaagtaaacaagagctctgaaatgaacataagtttactgataatgcaccttctattggcacaaaaatattttatggatggctcaccagaacttaaagaaatctgtcagaaatccgaaattcaagaccatcagcagcttgactggagaaatttcaaaggactgccattaattggcaaatccaaagctcagtatcaaacatatttgagctcaaaaagcaaacaagttctaaacataaaggagcccgaaaacagtcaaaatgtctttgtaaaggagctgttaactgcaagggagctatacactcagtattgcctcacgaaaaacaatcttacaggggccttgaatagcaaaataacaacattcgaatggatgctactgacagataggcctcttgatgaagtcttgctcgcgcaggcagaactaggttcaatattttatctgaactcagagaagttcgaaggaagtatatatagtattagtaatgaactacacagaggacctgaagataaagaacacaccaaatctaagttgcaaagtaatcaagaagcttgcttacaatattcggctgattgctataaaagcattattggttttgctcatgaaaaccaatatccacagaacgcaacggatagcgaaacagaccaaaaaatactcaaggcactatctctttcccattacgggctaggtgtgataaatttgcataagggacggctgaaggcctctaagaagcaactaaaaagggctattcgcatttcagaaatgatacatttcaacgaacttattaaagaagctaattgtgaaatcaaaaagggtagcgatatagttgtgtaa

SEQ ID NO: 4575 - DNA, 1653 bp, Saccharomyces pastorianus
atgcgggataaatattggttcaatatggcagctagaattcaacgggcatggagaagattcttgcagagacgtattgacgctgcgattaagattcagcgtactattagggagaaaaaaggtggtaacaagtatgaaaagcttcgtgacagtggtaccaaactcttaggtggtaaaaaggagagaagatctatgtcactgcttggatatagagctttcatgggtgattatctgtcttgtaatgagtccaaaacaaaaggttcatatatcagaagacaagcggggatcaaggagaaagctgttttttcgatgcaaggggaatgcttacattcaaaatttggcaggtcagctcaaaggttaagagcagtatttatcttaacaaagaaggcactttatattgttggacaaacacgagtacaaaatgccatgaaatatacacaggattatggaatcgatatcaataaaatcagacaagtgaatttaacgaatcttcaagacgattggattggtatcattctcgctaacagtacacaacctgatccatttattaatacacctttcaagacggaattggtcacgcgtatgaagaaattgaatgaaaagataataattaatgtaagtcctacgattgattaccacaaacaacctggtaaatctcatactgttcgttcgaaaatcagcgactcagcaccaaaatatagtgatatttataagtctagtacgatctttgtgcgtcgcgggcaccctcctaattccaagtcgaacaagaaacctgagaatccaggtgggcttgagggaaggccgatcaaaagcaaaaaaagtaaccatacacacacacataaacacaagcatagtcatagacctcagggaaaggctcaaaaaaaacaaccgttgcctgcgcaaaagttaaaaagcaatccgttgtccctggcggctacagctgcacaagcagcatacaaccctaaaccagcttctagtagcaaaaccgtgacccccaaatctgctgcaaaaccaagcttaacgaatacctcaaagccctcttctaaggaaagaacccaagcaaaaaatgtctcttcgattcataaatcattatcaagtaaaggaacgaaaacaccagtgccacctccaaaaaaggtagatggaagtcaaaaaccgttaaaggaaaaaacttcaaatattccagttccacctccccctcctcctatgggtgaacctgaagatccaaaatttgaagccgcatacgatttcccaggttctggatctgcttcagagttgccattgaaaaagggagacattatatacaaaagtagagacgaacccagcggttggagtttagccaaacttcttgatggaagcaaagaaggttgggttccgactgcatatattacggcatgtaaagggagtacaaaaatagcacccaccccggtagcaacaaatagccctgcaaaccaggaatcgagcctctttagcagtagcatcccaacagcgcaagaaaatgtgacaatagaaactgttcagtccactggtaatgcagaaaatagtcccatgggagagtttagtgatggtttggcttccgcattggcagcaagagcgaacaaaatgcggacggaaagtgctgacgatgacagtgaaggagatgaagaggatgattggtaa

SEQ ID NO: 4576 - DNA, 1797 bp, Saccharomyces pastorianus
atggctgtcataaaaagaggagcacgtaagaaggacgtcaaggagcctaagaaaagatctgcaaaaatcaaaaaagctacgtttgatgcccataaaaagaaagaggtaggcgtttctgatttgacacttttgtcaaaaatatctgatgagtctatcaatgaaaatttgaagaaacggtttaaaaatggaattatttatacctacattggccatgtgttgattagtgtaaatccattccgcgatttgggtatatatacagattctgttttagagtcctataagggcaaaaatagactagaagttccacctcatgtctttgcaattgcagagtctatgtactataatcttaaatcatacaacgaaaatcaatgtgtcattatttctggtgaatcaggcgctggtaagactgaagcagccaagcgtattatgcagtatatcgcagctgcatctagtagccattcagaatcaattgggaagattaaagacatggttctagccacgaatcctctccttgagtcgtttggctgtgctaaaacgttgcggaacaataactcgtcgagacatgggaagtatctggagattaaattcaactctcaatttgaaccttgtgcaggtaatatcacgaactatctattagaaaaacaaagagttgtaagtcaaattaaacacgaaaggaactttcatattttttaccaattcactaaaggtgcgtctgatgcatatagacaaacatttggcgtacagatgcccgaacaatacatatatacagctgcggccggctgtacttctgcagacacaattgatgatgtgaaggattaccaagggaccttagaggctatgagaactattggtttggtccaagaagaacaggatcaaatattcagaatgctggcagcaattctatggattggtaacatttcttttattgaaaatgaggagggaaatgctcaagtaagagacacatcggtgacggatttcgttgcatatttgctacaagttgatgcctcattattgataaaatgcttagtcgaaagaattatgcagactagtcatggaatgaaaaggggctcggtttaccatgtgcctctaaatgcagttcaagcgacagctgcgagggatgctcttgcaaaagcaatctataataatttatttgactggatcgttgacagggttaatctatctttgcaagccttccctggtgccgataagtcaattggaattctggatatttatggtttcgaaatttttgagcataactcctttgagcaaatatgcatcaattacgttaatgaaaaactacaacagatttttattcaattaactttaaaagctgagcaagatacttatgaaagagaaaaaatcaaatggacacctatcaagtatttcgataataaggttgtctgtgatttgatcgaagcgaaaaggccgccgggaatctttgctgcgatgaatgattccattgcaaccgcccacgcggattctaatgccgctgatcaagcatttgctcaaagactaaacctatttaattcaaatccttattttgaattgagagcgaaaaaattcgtcgttaagcattatgcaggtgatgtcacatatgatattgatggtatcactgacaaaaacaaggaccaactccaaaaggacctgatcgagctagttggcacaactacaaataggtttctttctacgatgtttccagacgatgttgataaggattcaaaacgacgtcccccaactgcaggtgataaaatcatcaaaagcgcaaatgaactggtagaaactttgtcaaaggccgaa

SEQ ID NO: 4577 - DNA, 351 bp, Saccharomyces pastorianus
atgaacgattttgtcaaaagccctaatgttgttgactcaccattcccaggtgacaagtccctgactgtcactgaatgtggcgatttttcgtatacggacttggatggttccatctccaagaaccaaggcctattcgtaaagttatcaaacggggctaagtttgttttgagattatcgggcacaggctcttccggtgcaacaataagattgtacgtagaaaaatacactgataacaaggagaagtacgatgaaaccgccgatgtctttttgaagccagtcatcagttctatcgtgaaattcttaaaattcaatgagattttaggaacagaagaaccaaccgtccgtacatag

SEQ ID NO: 4578 - DNA, 93 bp, Saccharomyces pastorianus
atgaatcgtttcgcaataaagaaagggttgaactgctacgaagtcccaaccggctggaagttcttctgtgctttgttcgatgctaagaagtaa

SEQ ID NO: 4579 - DNA, 1083 bp, Saccharomyces pastorianus
atgtctttttcaatagagctcatatctactacgccttacaaggaccagaaaccgggcacgtccggtttacgtaagaagacgaaagttttcatgaatgaacctcattataccgagaattttattcaagcaatgatggaatctattcctgaaggtccaagcggcgctactctggtggtaggtggtgatgggcgtttctataatgatgttattatgaacaagatcgcagcagttggggctgctaacggtattaaaaagttagtcattggtcaaggcggtctactctcaacgccggctgcttcgcatattatcagatcatatgaagacaaatgtaatggtggtggtattattttaaccgcttcgcataatccaggtggtccagaaaatgatttaggtatcaagtacaatttacctaatggtggtccagctccagagagtgttacagacgccatctgggaagcttctaagaaactaactcattataaaattataaagagttttcctgagttggatctgaataagatcggtaaaaaccaaaagtatgggccattgttagtggatataattgacccaaccaaggcatatgttaaatttttgaaagagatcttcgattttgatttaatcaaaaacttcttgacaaaacagcgtaaggctaagggatggaaattgctttttgattctttgaacggtatcacaggaccatatggtaaggccatatttgtggatgaatttggtttaccagccgaagaagtgctccaaaactggcaccctctacctgacttcggcggtttacaccccgacccaaatctaacttatgctcgcactcttgttgacagagttgaccgtgagaaaatcgcctttggtgccgcttccgacggtgacggtgacaggaatatgatctacggatatgggcctgcttttgtctcaccaggtgactctgttgctattattgccgaatatgcctcagaaattccatattttgccaaacaaggtatttacgggttagctcgttcattcccaacatcctctgccattgatcgtgtcgcaataaagaaagggttgaactgttccaagtccaaccgctga

SEQ ID NO: 4580 - DNA, 1689 bp, Saccharomyces pastorianus
atgatgaccattaaagtctataatggtgatgattttatcttacctttccctataacttcaaatgagcaaatattgaacaagctactggcctctggtgttcctccaccacataaggaaatttctaaagaagtagatgcgttggtcgcgcagctgtctcgtgttcaactgaaaaaccaaggtccagcagatgaggatttgatttcgagtgagtcagcggcaaagtttattccgtcgactatcatgttaccaggctcttcgactctaaacccattactttactttactattgaatttgataatacagttgccactatcgaagcagaatatggtaccattgctaagcctggtttcaacaagatatctacatttgatgtgacaagaaagttaccatacttaaagattgatgtatttgcaaggattccctcaattcttttgccatcgaagtcgtggcaacaggaaatgggtttacaagacgagaaactacaagttatactgaacaaaataaattccaaccaagatatacatttggattctttccatttgcccataaacttaggtttcgattctgcagccagtattagactatataaccaccactggattacattagaaaatggattaggcaagataaacatcagtattgattacaagccctcgagaaacaagcccttgtcaatcgacgatttcgatcttttgaaggtcatcggtaagggttcattcggtaaagtcatgcaagtgagaaagaaagacacgcaaaaggtttacgctctgaaagcaatcagaaaatcatacatcgtgtctaaatctgaagttacgcacactttggcggaaagaacagtattagcacgtgtagattgtccatttattgtgcctttgaaattttctttccaatcgcctgaaaaactgtatttcgttttagcctttatcaatggtggtgaattgttttaccacttacaaaaggaaggtaggtttgatttatcccgtgctagattttacaccgcagaactgttatgtgcattagataacttgcacaaattagacgttatttatcgtgatttgaagccagaaaatatattgttagattatcaagggcatattgcactttgtgactttgggctgtgcaaattgaacatgaaggacgatgacaaaacggacactttctgtgggactccagaatatttggcgccggagctactattaggtttaggctattcaaaggcggtagattggtggacgctaggtgtcttgttatatgagatgctgaccggtcttccaccttattatgacgaggatgttccaaaaatgtataaaaaaatcttacaggagcccctggttttcccagatggatttgatagagaggcaaaggatctattgattagtttattaagccgtgatccgacgaggagattgggatataatggtgccgacgaaatcagaaaccatccctttttcagccaattgtcttggaaacgtttattgatgaagggttacattccgccatacaagccagctgttagtaatgccatggatactagtaattttgatgaagaatttaccagagaaaagccaatcgatagtgtagttgatgaatatttaagtgagagtgttcaaaagcaattcggcggctggacatacgtcggaaatgaacagctcggcagctcaatggtgcaaggtagaagcattcactag

SEQ ID NO: 4581 - DNA, 771 bp, Saccharomyces pastorianus
atggacgtaacacaaaatatcggtattgatcttttcattggaattggggcatttaatgccgcatatacaagaacatacacaagggacgggctattggaagacccagataatgtcagcctccgtgaagctctgtcagaaggtaaagatattgaagttaccaaggatcttcaaagagttcatgatccacatgacgagagtgacgaaatgacatctgatgaagttgaattacacgttaacttaggtcaaattggatttgtttttatagaagcgaatgtgaaaaaatatgcatttggaagcgtttatggacaaatcggaattcctccagcttataacggaactgagatcaacaaggatacgatcttacaaaagggggaagagttaccacccagatatgctgacgctgacaattttttcggtaaaccgcaagtgagagaaggctcgtctgctggaataatagctcagacaagtagatccaagcactcgattgggacgtatgaaaggatatcctctaatttcgacagagaaaacaatgtttacgatgatagtcttgacatcaactacaacaacggtagcaataatgacgaaaatgcagattacaatgaaacttctccgttattagaaaatgccagtactaaaagctcagtaatcataaataccccttctgaaatatccggtggagctaccaataagaaatctataaacaaatctagcaagagacgcgaaaagaacaaaggtaaaggctccaaaaagaaaaagaggtcgagaagatag

SEQ ID NO: 4582 - DNA, 834 bp, Saccharomyces pastorianus
atgtatgtcacttttacgcaagatttggataaggcgttcagtaatctagaaagtacaaccaatgactttaaagtaagtgaccctaacatggtgccaacacctcctatggattcggattccgcggctataagtttggcattcctaataagtctctcgatcacatttgcaatattgatgcttatcttgatagtaatcgctgcatatgttaccttttgtggtgacgatgagtcagaatatgatgaagagaatgctttgggtacacgaacttcaggaactttacattctttgtttggaaagaaacatagcggcatcttgctggattccagctttgcatctccgggtgggtttgatgacgagatcgctctgcaagaaagagaactcgaagagttgccaaagatgtcagcatatgaggttgaactatatataagaacgaaagaatttcagatgatgagcccgccaatggtaaaggaatttggaacgtacttggataaggacgatcagcaattcattaaggatcgtggtattcaaagttacttcttgttgcccagtataaatgataatatagacgaatatggaaactttctgcctagttttattgtccaagacaaactagatatacaattttcaaaattcaataaaagctcatccacagtaatgaattatcccttgccccacaacaagaaggacgcggtatatttcgaagtgaaggttttcagacatatcccaaaatccaatagcattttcagtataggtttgactaccgttccatatccttattttagggtacccggtatggctaagtattccatcgcttatgaatccacagtaaattaa

SEQ ID NO: 4583 - DNA, 330 bp, Saccharomyces pastorianus
atgattgcccattccaagcatcttgagggtattccaattgtcttggagactccgtacgagaatgatgaaggctatgggaatgaaattaaactgttagagtggttggaatccaagagtgacagtgaattgctagaagacaaagagtacttaaataaaaatgagacattacagaagttgggtgctaagtcgcgtaaggaacaattagataggtttgaagtaaaacagaaaaagcaagcgggaggtcccaaaagaaaaagagctactgctgaatcaaataataatgacatcttatctcaaatggtaaaaaaaagaaaagttaagaaagaatga

SEQ ID NO: 4584 - DNA, 687 bp, Saccharomyces pastorianus
atgtcctcaaaaactagttttgttagatctgctgtttcaaaatataaatttggtgcccatatgtcgggggccggtggaatttcaaatagtgtaacaaatgcatttaacactggttgtaattcctttgccatgtttttaaaatctccaagaaaatgggtgtctccacagtatacacaagaggaaataaacaaattcaagaaaaattgtgaaacttataactacaatccactaactgatatcttaccgcacggccaatatttcattaatttagctaatccagataaggaaaaggctgaaaagagttatgaatcattcatggatgatttaaagagatgtgagcaattgggcgttggtctctataacctacatccaggctctaccttaaaaggcgaccatcaattgcaattgaagcaattggcctcatacttgaacaaagctatcaaagaaacagaatttgtcaagattgtattagaaaatatggcgggtactgggaatctggtaggaagctccttggtagacttaaagcaagttatcggaatgattgaagacaaatcaagaataggtgtttgtatagatacctgtcatacctttgccgcaggctacgatataagtaccactgaggcataccacaattttcggaaagaatacgacgatataataggattcacaccatctacagcgctattc

SEQ ID NO: 4585 - DNA, 924 bp, Saccharomyces pastorianus
atgggcgaatataacgatctacaaccttcttcgtcttccaataataacgataacaacgatgacgaactgtccagcgcaaacatgaggaataattccattgactatactaaacatcaggaaatttcaagtgcggcggcctcgccaaatacaattaagaatgagaataacataagcgacaccaaaaatgagaatagtaacaacagtaacaataacgacaattcgaacctattggaaggcgtcttggataaatcatctagtcatcgttatcagcccaaaaagttgcccaatgttaataaatggaacaaaccagatcaaatcactcattccgatgtatcccttgttggactggatgaaccaaacgatggcagtaattcaaatgttcacccaaccttggccgaagtggacgcgcaagaggctcgcgaaaccgctcaattggccatagataagatcaattcttataaaagatctatcgacgataaaaatagtggtggccacaacaactcatcaagaaacgttgtggatgacaacctgatcaacgatatggattcagaagacaaccacaagtctaagagacaacatttgtccgatatcacactggaagaaagaaacgaagatgataaattgccacatgaagtggcggaacaattaagattactgtcgtcacacctaaaagaggtggagaacttgcatcagaataacgatgatgacgtggacgatgttatggtggatgtagatgtcgaatcgcaatacaacaagaaccctactcaccatcaccataaccatcacagccaacctcatcacgacgaagaagacgttgccggattaatgggcaaaccggatgatgatgatgatgatgacgatgatgatgatgacgacgatgacctttctgacgaaaatatccagcctgaattaagaggccaataa

SEQ ID NO: 4586 - DNA, 1347 bp, Saccharomyces pastorianus
  modified_base (845)..(905): a, c, g, t, unknown, or other
atggacaagctggtcgtgaactactatgaatacaagcaccccataatcaataaagacctggccattggggcccatggcggcaagaaattcccgacgttgggtgcttggtacgacgttatcaacgagtacgaatttcaaacgcgttgtcctatcatcctgaagaattcccacagaaataaacattttacatttgcctgtcatttgaaaaactgtccgtttaaagttttactaagttatgctggcaattctacgtcctcggacacttcttccccttccggcaatgacaatgtagacccctccggagcttctgatcatgttcatcaccatagcgacaacattaacgatgacgacaacaataacaataatgtcaataacaacactaaggtcagaaatgacaacaaactcgaattcgttacagacgatcttgagtaccatctggcaaacccgcatccagacgatgccggtgacaaaatcgagtcgagaaacaatgggggcgatgggaacaacgacgatgatggtgatgctaacaacattttcaagcagcagggcgttaatatcaagaatgacaccgacgaagattcggtaaacaagtcgtctatcgatcaaaatttggaaaactctaatgattctactactgctaacgacaacaacaacaacagcaacaataacaacgctaacgatgaggatgacgttcacactcaaatgactaagagctactctgatgtggtgaacgatgaagacattaacgttgccattgcgaacgctgttgccaatgtggattctcaatcaaataacaagcaagccgacaaagacgacgacgcctccaataacaatgatgacaatannnnnnnnnnnnnnnnnnnnnnnnnnnnnnnnnnnnnnnnnnnnnnnnnnnnnnnnnnnnntaataacagtgttactaaccacgacatttcctctcactcaccttcttcgatacgagaatcatctatgaatctcgatgtcttcaattctgctaccgacgacattccaggtccatttgtcgttaccaagatcgagccctatcatagccacccgctagaagataacctatcgctggggaagttcatcttaacgaagattcctaagatattacaaaacgatttgaaatttgatcaaatactagaaagctcttacaataattccaaccacactgtaagtaaattcaaagtttcccattatgtggaagaatctggcctgctggacatcctaatgcaaagatatgggttgacggctgaagatttgagaaagattattgtctcaatcgcgagacgtataccacatacaagcaagatttgttctgaaaaagaaaaaaatgggcgaatataa

SEQ ID NO: 4587 - DNA, 231 bp, Saccharomyces pastorianus
atgagactgaaaaaaaggaaggtggcagaatttttgggctccacctcagaactacctgacactgaatccgaagatgacgatgaagcagccaatagcagcgtgaagcctcaacaaaaacctgctgctaaacgcaagggcagaaagaagtacaacctagtgagtaataacttcagaaggctcaaactaccaaagaaaaaccgtttcccaaacaggcgttggggaagaaggtga

SEQ ID NO: 4588 - DNA, 246 bp, Saccharomyces pastorianus
atgtattcgttggaactggataaactgaaagtcgagctaaaaacatgggaacacaaatttattgatacgcataacagagaaccaacgagagatgacatcaagggtctacgcgatgttaaacatatgtataagcaatattccatactaaagaagaaaaacggattgcaacaacagcgggacctcttgctcaagaatctgctaaaatggtggttcatattaaagatcgacggccgatttggccagctt

SEQ ID NO: 4589 - DNA, 768 bp, Saccharomyces pastorianus
atggagatagggcctacaccccaagtttatggcaaggcaatcagtatctttgaaatgaacctgtcacctatcaagcctgtttacatgaccactgcaaataattttggtgccgatgacgactctaaaacaatatccaatgaatcttccccacaaaggaccatttcacaggaatcttcgccggcaaatcgaactctagtatcagagtcaatatcgaatgtcaagcgccagttgaacttccaaatgttgaaagcaccatcttcgcatactccaatttcatccccatgtaagaaagcagagccatcattggaagctgaaaagcccgactttgtattcacgatggctaaacccgtgttaaaaccaagcaacccatcgagatattatggccctaactcgccactaaaattagaagaagaaaacattcatctaaatatttcattagaatcgaacactagacgccggcttcaaatggcattcccatctttacaaaaaactccctccaaggacaatcatgcaggcgtttcaacttcattcagtccatctcctttgattaggagacccctaacgaaatctttgatagaattagccaaggagcatcatgaaatcgttaaagaattcagcatccttcaagaagaggatgaagaggatgaagatggtggtaatgataatgacggcgatgaagaaggcgatgagaacgacgacagccttgaaagcgggttagttagaccaacggtggtgaaggatatattccagaggatgacacgaagataa

SEQ ID NO: 4590 - DNA, 3327 bp, Saccharomyces pastorianus
atgagcagacgcatgggcgataggaggacggcccaagaaaacagtccagacgccctagcagcggctgccgcaattggtaacgcgctcagcaataacggaagaactgttgataaaagcaaaatacctcaatataaccaaaacttcatttctcgaacaacgtcaattgcaggaattaaaagatatacattgacttcggatcataagaccagttcaaaagcaccttcaatgtgtgcgaacacaaatcaattctctaggcgtacctcgagtttgcccaataggaaacattgtaccaccgccaacaattcgaacatgagaaaacaacacaggattcatgaggatgcagaaaccgccttccgggagttcggaggtcatgaatcgacaaggattttgaacgttccaattacgaacgatagaaacagtaatcctaggaccgcatcgcttaggaactcaagtagcataatagggacaaccaagaagtatataccaggtcccaggggactagttgccgtggaagttcccgtgcgagaagaatccccaagatttagcttgaactcacattcacgtaatccagctagtagaacatattcattacctactggaaaccccaacatgaatctaatgcacaggaagaaaaccactaaaacagtggggccacaagagagaaaacctgaacgagaactcaaatcaaaatctcatcgttcaatcaaagcgccacctaaaatgcatgccaagtcatcaaagcaaaaccataacgatagtattccactaattcaaataaccatgaatgaagaaacggaacaggaactgaaagaggatcgcgatgacccatttgagttcaagcccatgattatatctgacgacgactttttcattgagtcaaatgcacttggtcaccatgaggctgataaaagttctagcactctaagtggacgtgggaagaaagaacagatcgaaaaactacttgaagatgttcatgctctagaagcaaaaatatcaaatatcaaaatggcgaaatcaaacgaagaagaacgagaacaaaagctaatcctagaattacaaacagttaaagtaaatgaagaacggagggtagagatattggaaagggaactgagtatagccaaggaaaatgccgaccttgaagcagaagaactgaagctaatagagctgaaaagacaagagcagcttcgtaaggaaaaggaaaccaaaaccaaaactgaactggtcgatgttcaactgctaactgtaactgaatctgggtccgaaaaatcaccttcaaaagatgcacaaaatgagccaccgaatactcaaaataaagatgaaggtattgacgagagtaatcattcactacttgaaactgtcgacaaaaccctggcaaaccctattctccctggatcgtttgacaaatctgccttacatgttaattcaaccagtgaatctgaagttgatttagattctgatagtcccgctggaagccaattatctgattataactacatagagggatctacaattgacctgcgtgccaccgcaaagacaagtgtggagtccgagatcgacacaaatcaaaccgaactgaaatttccacaaggcgaggattttgacaatacaaagaaccacatttcaggcccaggcaacgattttttttcagatgaaaacaaaaaagattttggtcaagaagacttacatttgaatgatgctgacccagagagctttgaagcatcttctgacacttctaagatccgtagcatcatagcggagaatgagagtgatgttattgaaaacgagcacggaaatgacgacgatgatgatgacgatgacgacgacgaagaatttcatgattcttatgacgtaatagttcacgaacccattcaggtaaagcaaacaataactaatgttcctcacttaaagtattcgttgcagcacctgaatgaagtggaaatcgacaagaacattggacaaagttatgatgctgtagaggtcaaccaatccgaagcgaacatggccaaatacttacgtaatgataatagttatccccccagcatgagttcaggaactcttgagttggattcacaaaacgggaactcaaggtcctctactgaaaccacaaggatttttcctagtatctggaaggacttaccacagccagcattcaaatccgctctgaagaaaacactagctactccattgagtacatcttcctccgtatactcaacaggcacacctccaaatagtaacgttcatatagcacacacgacaacctccaatatcaaaatcaacggccagaatccgccaactcatgacttggaacagaaacatagcccacccaatcagcctgttttaagggaaattcctgcgatgtcaccaagacgtttggaagataaaaggaaaagccctaaccatttgggctttaggactttacgtggtggttccagcggggctcctctttcccaaaagatacccgagtcatattctaatccacctttatccccatcttaccgcaccacaaagtcgtgggtaactacttcaacttctgcagctcctgtttcaaaagaagcttctaaaactcattcgaccgtttctccaacaatcaaaaattcaaataaaatagccaaccagcctccctcgaacatcgatgaacataacagtattctttaccccaaagaacctctaaccaagaagtctagtttcgaaaaagaaagacctatgaaggataatctgggattcaaaagtatgtctttaagagggccacttgtgacgaagaattctccggttatgagagcaggaagttttgaggcggaggacaggcatgaacagaggaaccatgtctctaggaaatcatggaattttagcttgtcttctccactaaaaacaaagatgaaccattctgctcatccctcgaacgaaatagagaaaatagatcacccaatgagcgacttcaagaataagtttaatgtaaatggagaaaaatcatcagtgaacaagagagacagtgaccgccaaaattcatctttatacataggatcttcgacgaccaattacgagaatgcaagcgaagtgggaactgagggccaccggttttcattatttagaaacagaagccaaacatcgaataggaatatgccagctggaacaaccagtctgaatccagcgtactctgaggtatctacagctctacccttaagcgttccggtaaccgttatcgaaaagaatggagagatacacaagctatataatgacgatgctgctaagaaagataagtctcataatcatcacagtagtcataataagtttagtaagaagcttaggaaaattttcggtagaaagtaa

SEQ ID NO: 4591 - DNA, 1623 bp, Saccharomyces pastorianus
atgcactcttggccctttaatagagaggttacggtggtagttcccaataaagaaaaaaaactacaaaaacaaagcaaggaaaagatggcggaacaacgagaaatactagaacaattgaagaaaacccttcaacagcttagcgttgagccatccaagaatggccaaatcgcggacgagacgaaagaaaggagacacgaggagtttacagctcgtgacctagagcacagttacgaggtggcttctcaggagttcatcgacttcatgtacgagaaccccaccacctaccatgttatatcgtttttctctaaaatgttagataagaatggcttcaagtacttgagcgagaaatctaattggaacgacagcatcggcgaaaacggtggtaagttctacaccctgagaaacggtactaacctttctgctttcgtcctagggaagaactggaaggcagagaagggtattggtgccatcggatctcatgtggacgctttgaccgtcaaattgaaacctgcttccttcgaagacttatcgcaaggttacggtagaattgctgtcgctccctatggtggcactttgaacgagctgtggctagacagagacctgggtattggtggccgtcttctttacaagaaaaagggcaccaacgaaatcaagagtacattgatcgactccacgccctatcctatctgtagaattccctctttggcccctcacttcggtaaaccggcagaaggcccattcgacaaagaagaccaaaccgtcccggtcatcggattccccactccaagcgaagacgagacacccactgacgacgaaaagaattcgcctttggccggcaagcacaacacgcatcttttgagatacgtcgccaatttggccggtttggaggtgtccgagttgattcaaatggacttggacttattcgacgttcaaaagggtaccattggtggtatccgtaagcacttcatctttgctccacgtctggatgacagactatgtagttttgcagcaatgattgccttggtctcttacgccaagaacgttaacaccgatgactcggacgctttctccaccgtcactttgtatgataacgaagaaatcggctcattgacaagacaaggtgcgaagggtcgtttgttggagtcagtggtggaacgtgctacttccgccttcagcaagaagccagttgacttacacactgtgtgggcaaattccatcattctgtctgcagacgtcaaccatttgctaaacccaaacttcccagaagtctacatgaagaaccattccccagtgcccaacgtcggtatcactctgtccttagatccaaacggacacatggccacggacgttgtgggcactgccctggtggaagaactcgcacgcctcaacggggacaaagtacagtacttccaaatcaaaaacaactcaagatcaggcggtaccatcggcccatccttggcctcccaaaccggtgcccgtaccatagatctgggcattgcgcaaatgtccatgcacagtatcagagctgctacagggtccatggacgtcaaattgggtaccaagttcttcaacgggtttttcagaaactggagatccgtctacgatgaattcggagaattgtga

SEQ ID NO: 4592 - DNA, 489 bp, Saccharomyces pastorianus
atggccggatccaagcttgtcgatcacgatgacactgagtttcacttcttgaattggtcatatattggcaagtactttatcacagctataattagttacgttgctgctttaatatccaccatggtatcgttatctttattcaatacctcacaaccagctttgttatacatcgttccttccttgttgattagtactataatggtggcatgctggaacaaagacttcaagcaattctggaatttccaatatgacacgattgaaatggatgagaattcgaaaaaaactgtggagaaaaaggaagactccatgacttattcgacctttatcttgtcggagtactacgatgacgctgacaaatatgctctgtttgttgatgatttaaacgagaataatgatgaagatgaagaatttgtacaagacgaagatttaaacgatagttctgaagaagagctctctgaatatgatttatcggatgacgaattctcttaa

SEQ ID NO: 4593 - DNA, 1005 bp, Saccharomyces pastorianus
atgaacaagtatttaaactccgttgtagaccacttctcggagtggtcgtctcgtatctttagggccaattcgtcaagcacgagccaaggtgcgtcgaacaaagaactagaagaagtttttgaaaaaattaatgctatagtcgaaaaccataacaacggcttggccactacctttgacaagatatcgtatcgtgtggcccacaagatcacacacctagtcgaaagccattctttagcgttcaactatgctaccctagttctcattgccagtgctttggtcgttattggctcattcacgtccatatcttctattccgtttaccgctttgcctcctaccagggaacacccgttgtttgaccccactgatttcgatgtagatcatgattgccatgtaatttaccatgagaatgacgaagacaaaaagaagaagaaaaagagcaaaaagttctttgatatgatggatgagaaacatgcgattatacttcctttaactagtggttgcactttattagctttgtattttgttattaagaagctacatttgaattggttgagatacgtggttaagattttgaattttaacataacactattgaatataccagcaggtacatttgtctactcatatttccttaattctttttccaggaatatatcgcatatgacttcttggaacccattgactgttttgccaaggtaccgtgtaaccattgctgacgataacgacgatctaaacaaaataggtgggttcgttacaaatttgaactataaagatggattaactaactcggctgttcaccaaaagaccttgactgaaatcgaaaaggaccactggatgaaacatttctatagaagggaactgattaaacccaaagacgtcaagtcgaaaagacaaatcagtaacatatacctgaataacgcacttatcgtttcatttgtgctctccgtagtcgccactgtctacttttatttgtctcctaacaatggcctatatccatgcagtgag

SEQ ID NO: 4594 - DNA, 753 bp, Saccharomyces pastorianus
atggctaagctagtgcatgatgttcaaaaaaaacagcatagagagcgttctcaaataacgagtcgtaccagatatggtttcttagaaaagcataaagactatgtaaagcgtgcacaagatttccataggaagcagtccagtttgaagattctcagagaaaaagtgaaagaaagaaaccctgatgaatactaccatgctatgcattcgagaaagacagatgcaaaagggctcttaatcacctcacgtcacggtgacgatgaagacgagtctctttccatggaccaagtcaaattgctcaagacacaggatagtaactatgtgaggacgttgagacaactagaattgaagaaactggaaaaaagatcgaaggagctgatgttcaaaagcagtgggaatcatacaatatttgttgattcccgagaaaagatggaggattttgctccagaaacgtttttcaataccacttctgagatggtgaataggtctgagaatagattaaccaaggaccagttgacccaagatgttttgaacaataagagcgcctcatcaataatgcccaaggaatcactagacaagaagaagttgaaaaaattcaaacaagtaaaacaacatatacagagagaaacccagttgaaacaagtccaacagagaatggacgctcaaagagaactgttgaaaaagggttcaaagaagaaaatcgtggactcgtcagggaagtcttcttttaaatggaagaagcaacgtaagcgttag

SEQ ID NO: 4595 - DNA, 195 bp, Saccharomyces pastorianus
  modified_base (12)..(12): a, c, g, t, unknown, or other
  modified_base (43)..(43): a, c, g, t, unknown, or other
atgcactggagnctggtacggcgttcgtctatggatagctccntactatacggcagtgatcccaacctagtagacgaaatgttagagaagctaggcaaaataaagttcgaggaagttaatgagtttgaaaatccgcttttcttggaatctcttgtagtgaaaaacgtaataggcaaagtcgtgccgcctgtatag

SEQ ID NO: 4596 - DNA, 762 bp, Saccharomyces pastorianus
atgacataccatttaaaacatcattgcagttgtgtacagcggttacgatatggtagagagcggtgttgtcgggtgagggtggtgaaaacagtattagtaatgggcgatcatagtttgccggatttccgaacctgtttgaagttttctgttactgctcgaaagagctttctctgtatgtacagagatgacgttgcagacgaaaaattggcttctccaatgcccagcgcctgcgatatacagctgaagacgacgatcggcgaaatgtaccccgctgcggggatgagggtcacaatcatgaattcaacaaccgaaagcttggattcactagcaactacgcacattcaggattttgagattgttattattccagacgtcaattcactttcacgaccagaccaggccaagttagtgagagttatgagagagtctgaaatatctagcgaaagggcgcaatcaggacgaatatttatcggggtcattcactggagtaatcaaacaccgccttcaagcgcaaccaaagacggagatgatgcaagtaaaccaaccgccaagacacgagtctttctacccgcatgcatacatatagatggctggctcaagcacaagttttggtttgcatgtgcgccgccccacttaaatttcgatagtttttctgaatcaagcataagtacgagggccaccaacaacaccgaagccacgaaagaagaggaacaagaatccgcagatcagaggtctgttggggtggacgaggaggcaatttag

SEQ ID NO: 4597 - DNA, 162 bp, Saccharomyces pastorianus
atgctcctatttacgttcgccattcttgaaggccggaaacctatcatatggcccgatccggtcacggcactgggtgttgtgggctcaaaacgcgcgcagaccacgcctcgcggtcttggccgggccccacctggtgcctgcggagttgcccttcggagctaa

SEQ ID NO: 4598 - DNA, 843 bp, Saccharomyces pastorianus
atgtctgaaagaaaggctataaacaagtactatccaccggattacaacccgttggaggctgaaaagctgtccaggaagatgtccaaaaaactgaaaaccatgaataagagccaagcatcgattagattgatgacgccattcagtatgagatgtttagaatgtaacgaatacatccctaaaagtagaaagtttaacggtaagaaggaactcctgaaagagaagtatttggactctataaaaatctacaggttaaccatatcatgtcctcgctgcgccaactccattacattcagaacggatcccggtacctctgattatgtgatggagatcggaggtgtgagaaactatgtcccacagaagcccgatgataattctgaaccaaaaccggcggcggaaagtatagatgacacactccagcgattagtacgagagaaggaaacggagcagaatgagaaattgggcataaaggaccaagcagacgacaagatggatctgctggagaaacgactggctaagattcagcaagaacaagaagatgacgaagaattggaaaatctaaggaaaaggaatctagaaatgggacaaagagcagaattgataaactgcaacaaccattcccaacaggaaaagacagagacgtcgcatgagcttgacgatcttgtggagcgagtattcgataatcacaggcagcatgctgccaagacagacgatggccacgataaaaaaaaggccccactgttcaatcccctagccatcaaggggagagtgcaaaagaagaagaagctctcgcggactaatccattggggatagtcgtgaagcgtgggaacccgtctcccaagtga

SEQ ID NO: 4599 - DNA, 213 bp, Saccharomyces pastorianus
tcctccaaggagctgccgcccgtggacgtgctgggcgtgcgtgcccacgaccagacgctatactacgcctttggcggctgccaccgtctgcaggcctacgaccgccgggcccgcgagacgcagaacgccgccttccccgtgcgctgcagggtgctgccggccactccccgccagatccgcctctacctgggcagcagcctcgacatcgagtag

SEQ ID NO: 4600 - DNA, 147 bp, Saccharomyces pastorianus
atgtcactacagagcaacagtgtgaagcctacggaaattcccctgtcacagatcaggcgcccgctggcgcccgtgctggatccacagaagatcaacgccatggtggccactatgaagggcgtccctacggccagcaagacgtgctcc

SEQ ID NO: 4601 - DNA, 306 bp, Saccharomyces pastorianus
atgtctaacaacttggtcgctggtttcttcaacagattgtcagcttctaccaagtacatgttcggttgtctagtcgtctacggtgaaaacaacaacaatggtattgtcggtgccgtcctggtcagaggccaagattttgctccagctttcgatgttgccccagattgggaatcttacgaatactctaagttggacccaaccaacgaagaagacaaggaatttatcaacaacatgtgggcttgggataagccagttgttgtcaactgtgaatccaaggaaattgctgacggtaaggttttgaaatga

SEQ ID NO: 4602 - DNA, 288 bp, Saccharomyces pastorianus
atgatgccatacaacaagaaggacgttgacgctgctttcactaaggttgacaacattgctgctgttttcgatgctagactaagagactacacttttgttgcaactgaaaacatctctttggctgatcttcacgccgccagtgcttgggcttttggcttatcctctattttgggtccagaatggagagccaagcaccctcaactaatgagatggttcaacactatcgctgcttctccaatttttaagacccagacctgcaggcatgcaagcttggcactgccgtcttta

SEQ ID NO: 4603 - DNA, 237 bp, Saccharomyces pastorianus
atgtctcaaggtactctatacatatccaagtctccaagaaactttgcttccaaagctttgatttctcacttcaaactagatgttaaaatcgttgagaaagaccaagccagcgagtttgcatctttgttcccattgaagcaagttccagctttcttggggccaaaggggttcaagctaactgaagctatcgccatccaatattactgtatgttatttccttttttatctccacattaa

SEQ ID NO: 4604 - DNA, 1365 bp, Saccharomyces pastorianus
atgaggggtattaagctatctgattcattcaagactaaaccattaaacgtcattgatcgttctgtaaatacatactcttacaaactatcaagtgaatccgacttgcatgatgtttttattaagggaagtgtttatccgaacaatactttcgcattgacaaactcaagtgattccattcctgaaagctttaccattgacttattcgaaaatgagaagctatttgaaacgtacaaagtgaattctgcggtggtaaagaactcttatgcctccgagaagtgtcctgccggagtagcgtataacattactttcggtttgtccagtgacagattattttctgtccaagaagttagctgcatttgcctaaacgaaaatgacgtagatgaatcaaagcaaactagaaatagaaatactcggttaaacattgcctccaaggaaaccgaaattcagaggttgtctactcccgagcttctgaatttgcacaatcatgtcaaattactcgacaaacaggataataaaagatttcaattacaagaaaatttaaacatcctcgagagcgacttatacgatgctagaaacctgttaatggatgatgaaattgtacaaaatggaccgaaatctcaagtagagaaattgtcagaaatggtcagagtatatttagattggcttgaggatgcatcttttgacactgatcctcaagacataatcagcagaattagagagattggaatattaaaaaagaaaatagagttatacttggaatattcgaaggaacccctgaactccgaacagtttaaaggaatgcttgaagaaggaaatgaattattacaggctgtggaaaaacacaaaaacactgttgaagggtttttgagtgaatttgaaactgcgtacatagatacgatagaaaatgttcgggaagagttcaaaaagactaaatacccggcatatatttccaaagcactgtctacttgggaagaagccctaacctcttttaaaggttccattatcgagatcgaagcacttttggccaaaaacttattcggtgaagatctccgagagcgcctgtttgaaataaaattgagattcgacacgtatcgtgccagcttagaggaaaaactgcatcttattaaaagcggtgatgaaagtcgtttgaatgaaataaagaagttacatttgcgcaagttccgttctcaaaagagaaaggaggaaaaattgaaaagaaaacttgaacaagaaaaaagcgaaaggaataaccaaacagaaccggtaataaacaattcgactaataaggaggatactcctgttaacgataaaactactgaatcaaatccatcatttaagaatgacattctgcatgatgaattatag

SEQ ID NO: 4605 - DNA, 297 bp, Saccharomyces pastorianus
  modified_base (276)..(276): a, c, g, t, unknown, or other
atgcgaggcgttttaaaactgttgctttttgcaacttttatcatcacaggatctttggcagccgttttaggtattgactatggccagcaaaatatcaaagctattgtagtctcaccacaggctccagtagagcttgtgcttactccagaagccaaacgtaaggaaatatctggcctttcaataaaaagattacctggtttcaagaagaacgacccaaatgcagttgaaagagtttacggttccgctgtgggaagtttggcaacgaggtttccccanaacacgacctgcagcatgcag

SEQ ID NO: 4606 - DNA, 2340 bp, Saccharomyces pastorianus
atgctggaaactgatacatcggctctagaacaagaacgagtggaaattttacgcagaaaagaaggctatttatcgccattagctagcttcatttttccagacttcagagcactatttaatatagggtttaactcatatccgaacttgaattataaggaggtagatatcaatggatttgaaatttacattgttgaacaatgggcagcgcaaagaaaaatatcgactctgattacatcatatacgggcaatttacaggacaccatttctgcagttgaggttgttcttccacaagatcctgaagaatggcccagtggtctgaagaaatactatgatgaattgctgaaattttcccgtcccaaaaaaactacgaaagggacactgttcattacaaatctctcttctttcaagtttacactcagtttattgcacgtagaatgtggtaatctcaaaaaaatctggaaaaattttaagacgaattacgatttgaaaacgttgcattgtggtgggcgttcggctcagttgttgaaaaggacgcctagcgcttcaatagcaaagtttgctcaactgtataaatttccgaattcagcatttgctcatgaaattacttccgatttccaacaggctcttcttcagaacgataatcgtgactatgacgacctagatgacatagaaaatatcactgttaactactgcccagtcgtggaactgactactttggtacaaatatctcttagctattttgcattgttcgaatataggaaggagagggatggcttattatgtaatggaacgaagcagtccctcgaaaaatggtggcaaatatatgggaagcgatatttaggcatagacaaaccaaagaatgaaacaattcttggtccaactacagtagcctcgttgctcagcctcgtattgacttgctactttaaattaatggtggaagattgcatgtcggcgaaagacccatttgatgaagatgagttttattctggcctttatgcctttcaaaagaaatatggactttctaaaaatcatagacaaacgtttttagatgagcaaacaattgataaattgttcgaagtctcctctaagacctccaataaagatatttttaaattcaaaaaagttgtgaaatcaacagtgcaagatatgactgggaaaggtaatttcatgcatttatctaatgagattttaacaactgacttagatactttagtaaagaatatacacggtggatctcttgggatgctttggaaaggaaaaagtgcatctagaaaggaaacatgtatggcttgggaaagaaagacttttttgagcttcaagttcaaacgtggcgatccagcattacaactagacaataatgagttattttatggaaaattaacacatgaaccttttacagcagctgataaaaagggagataatacaaaacaaaccaaaagaaatagtacacatgatgtaaccaatgcttcgacatcatcgctctctatttcatcgatgttatgtaactatgatgagaatcgttatgcaagcactcataacattaatagagcttatagaagagaatacttcaggcgtaattcgattccgtttcttagtgatggtatgcatgatacaaaaaaatgttcccttgatttcaatgaagtagaaggactgtatcgttgtaactcatattctgaagtacaaaatgcaatagaaacttggaaactgccctttgattcttcggtggtcaaattagcacgagatttattaaagatacaaagtttgttatccgttcagcgtcagctcgatgaaatacgtgatggatacttggggaaggactcagaaagatcctatcaagataatttaaggttcaaagaaagcctgaataagttacaagatatgtgcgagaagtgtaagaaaggttcaaacgagttcaattgggaatatactaacacgcaaaacaaacagcaactcttagagaacgagaaaaaaaatatgaaatctctctcttcgaaactaaaatataatgttcgtattttggataggcgtgtgagagatgttgaaaccagtgttgatcattttgacggaaagttggaaggtgttaggaaaaaacttttggaacaaaataaaagtaaacagatttcgattgccttagaaagtccttatgataagcttgaattcgatagcttcatggactctatggtacagtctgaacaaacaaagtatgaagggctctgtttcaaaatcctggataaaaaaagtcttggaaagctaaaaaaggaactttggaaatggagtacttggacgtttgataccttcctatttaaaaataaatccaacagagaaaaggacatgttatag

SEQ ID NO: 4607 - DNA, 240 bp, Saccharomyces pastorianus
atggtgaacccaaataattctgttagctacttttatgaaacctctatcccaaagagatccagcgggttacttacacaaacaactaagccaacaagttttcaagaagctttcaatcaaaaagaagaggaaattgaagatgaggatctgatggtggacctaaacacaggatcattgactccagttaatctaaagcattggactcaaatgagcagcatgaccgagaaattcgggaagctatga

SEQ ID NO: 4608 - DNA, 801 bp, Saccharomyces pastorianus
atgaaggcccgccgccgcccgggctacatgtgttatggttgtggtggtagagaccattggatcaagaattgtccaacgaatagcgatccaaattttgagggtaaaaggatcaggagaaccacgggtatcccaaaaaagtttttaaaatccattgagatagaccctgagacgatgacgcccgaggagatggctcagcggaagatcatgataacagacgaggggaaattcgtggttcaagtcgaagacaaacagtcctgggaagactaccaaaggaaaagagaaaacaggcaaattgacggcgacgaaacgatatggaggaaagggcatttcaacgatctacccgccgatttgaagtgttccttgacgggaggccttttaaggcaacccgtaaagacaagcaaatgctgcaacaaagacttttccaaagtggcgctggaagacgcgctggtggacagcgactttgtttgccccaattgcgaaaccagcgatattcttctggattcgttagtgcccgacgaggataagcaaaaggaagtggaagcgtttttgaaaaagcaagaagatctgggcggcaaatccaaagatggcaagcagcctgaaaccaagaaaatgaaactattggacactaccagcactgccgccttgaatactcccactcctatgaataacggtggcacacccgtccccccagtacctctgccctttggcatgccgccttttcccatgtttccaatgcccttcgtgtcttcggcaccgacggctccaaatcctcgccaaacagaggcaagccccaagaaatga

SEQ ID NO: 4609 - DNA, 1071 bp, Saccharomyces pastorianus
  modified_base (818)..(1029): a, c, g, t, unknown, or other
atgagtagtaccatcttttatcgttttaaatctcaaaaaaacacatcgaggattttgtttgatggtacagggcttacagtgtttgatttgaagagagaaattatccaagagaacaaactaggcgatggaacagatttccagctgaaagtatacaatccggatacagaagaggattacgacgacgatgcatatgttatacccagatctaccagtgtgatagtgaaaaggtctccggcgattaaatcattttctatacatagccgacttaaagggaacgtgggagcagcagccctggggaatgcgacgagatacgttactggtagaccgagagtgttacagaggaaacagcatgctgccacaaccactgctaatgtaagtggtgtcacagaagaagaaagaatagctagtatgtttgccacgcaggaaaaccaatgggagcaaacacaagaagaaatgtctgcagctacccctgttttttttaagtcacaagggaacaagaattcagcacaagagaatgaaggcccgccgccgccgggctacatgtgttatcgttgtggtggtagagaccattggatcaagaattgtccaacgaatagcgatccaaattttgagggtaaaaggatcaggagaaccacgggtatcccaaaaaagtttttaaaatccattgagatagaccctgagacgatgacgcccgaggagatggctcagcggaagatcatgataacagacgaggggaaattcgtggttcaagtcgaagacaaacagtcctggttaagactaccaaaggaaaagaggacctgcaggcatgcaagcttggnnnnnnnnnnnnnnnnnnnnnnnnnnnnnnnnnnnnnnnnnnnnnnnnnnnnnnnnnnnnnnnnnnnnnnnnnnnnnnnnnnnnnnnnnnnnnnnnnnnnnnnnnnnnnnnnnnnnnnnnnnnnnnnnnnnnnnnnnnnnnnnnnnnnnnnnnnnnnnnnnnnnnnnnnnnnnnnnnnnnnnnnnnnnnnnnnnnnnnnnnnnnnnnnnnnncgtcaaagcaaccatagtacgcgccctgtagcggcgcattaa

SEQ ID NO: 4610 - DNA, 1344 bp, Saccharomyces pastorianus
atgaagcctggcgtatttgctaagaaggattttatctcttcaatcaagttcgatgcttttacaagtataatttccacagaaactattcaccaattaatctccatacattatcgtattactttacaagtattattgacgtttatcctgttagactttgatggtaacatttttgaagaacaattgtccgctttattggatttgcattataagcaatctttattcttacacctctatagacaagataagtttctattaacgaaggttcttctcaagaactcatctgaatattcttatggtgtcaaattcttcaactacggacagctcatttcctatattgactcgttaaactacgatgtctacaacgcttcaatcacggagaactcattctttttagcatttttcaaatcgtatatcgttgataactcctcgcataagaatacaagtttcttcttggagaatgttgagcgtcccttctatttacgtaataatgcggtacgggagtttatgtttgccatgacgttattcagttgcggtaaattcgatcaatcatacgaaatatttcaattacacgattatccagaagccattaacgacttattgccgacatttctagaagatcttaaaagtgaaatttaccatggcggcagtatatggaaagaccttttgggtactttcgcatcaccatatagacattctgctttctactatcaattatctcttctattcgatagcaataacagtcaggagtttgccttgaaatgtatatcgaaatcagcagaatattcactgaaagaaattcaagttgaagaacctcaagaattcaaagagaggcagcatatccactatttaaatcttttaatccatttcagaatgtttgaagaagttttggacattctgagattaggtcatgaatacctcactgatacgataagaactaactttttccgtttactactgatgaaagatgcatattctcatgattttttcagtacgctcttacgcttatgcgattctcatgcaaatgatgaaggactttaccttcgtactgtggatatcaaaatagtggataacattttatccgaaaacttaagaagcagcgattggaaatgcttcaagaagatctactgctttagaatgttgaacaagagcgagaggtcggctgcagaagtgctgtacaagtatatttcaatgcaatctgacattaatgttattgaaaagaagaagtgttatttaatgattattaacgtattatctacctttgacagctcatatgaccaatggatcttggacggtagcagagtgataacattaaccgatataaaagacgaattgagcaatctctag

SEQ ID NO: 4611 - DNA, 1701 bp, Saccharomyces pastorianus
atggcatgcctctcgagaattgatgcaaatttgcttcaatattacgaaaaatctaaacctaataataccgttgatttatacatcaacaataatggcaataataagagattcaaaactggagagagcgtgatcacaactccagtttctcaacaccatggtagcgaatattcgaattgtatccttttgagtaactccgaatatatctgttaccacctttcctcaaaatcaacactattaacattttattctttaagtgatgcatataatggcaagacgataaatgttcacttaccaaatgcttctatgaatcaaagacataccttaacgatacgagaggtaaaccaatgtttgctggctaatttgattttgaaagacggttcgttcttaactttgcaactacccctaagttttatcttttcatcagatgacactctcgacaaagagtggtttcacattcagaacccatatgatttcacagtcaggattcctcatttcctgtattttgtagcacccgagttctctgtcgtatttttggaagatggtggtttgttgggtctaaagaaaatcgataacttaaattacgagcccttactattcaatgataattcttatttgaaaagtttaacaagatttttttccaaaaattccagttcagattttgatggtgtgatcagttgcaagctattccatgagaaatatttaatcgttttgactcaaaattgccatttaaaaatttgggacttagcttcatttgccctaatacaagattatgatataatttctcaaccaggtttaaatacaagtcatttcagaaaagtggaagtggtaggacagtacctttccttatataacaatactctggttacatctttgcctttagaaaatgggcttttccaaatgggtactttgttagtcgattcaaacggtattttgacttacacttttcaaaataatattcctactaatctttccgcatctgccatttggtcaattgtggatatagtgttaacgagaccattggagttgaacgttgagtctagttatctaaatttgattgttttgtggaaaagtggtactaccagcaaattacagatactgaacataaaggatgaaagttatagaaactacgaatggatagaatcggtaaataaatctttagtagatttacagtctgaacatgacttagatatcgtaacaaaaactggagatatcgaaagaggtttatgtagcttgaaatcaagatacggtgcccaaatatttgaacatgcacaacaaattttgagtgaaaataagatcgttatggctcgtaacgaagacgaagaatatttggcaaacctggaaacgatattaagagatgtgaaaactgcttttaatgaagcttcttcgataactctttacggtgatgaaattatccttgttaattgttttcaaccatacaaccattctctctacaaacttaatactacagtggagaattggttttacaatatgcattccgatactcaagagtctgagctattcaaatatctaaagacattaaacgggttcgcttctacattgtctagcgatgtgctcaggtcgatttctagaaagtttctggacataataaccggagagctaccgaattctctgactacttctgaaaaattcacagatattttcaaaagttgcttagaaaaccatttgaaatcacaaatctaa

SEQ ID NO: 4612 - DNA, 240 bp, Saccharomyces pastorianus
atgcaaccacaatcaacatgcatgcaaccacaagctcaagctcaaccacaaccagaagctcaaatacagaatggtcaacctgtcaacccacaacaacaaatgcaattccaacaatactatcaattccaacagcagcaacaacaacaagccgctgctgccgctgctgcagcacaacaaggtgttccatacggttacaacggttatgattacaattccaagaattcaagaggtttctattga

SEQ ID NO: 4613 - DNA, 120 bp, Saccharomyces pastorianus
aagcaggaacaccgctcaaagggacgatcggatgacgacaacgaggggccagacgaagaggagagtacgaaggaggttctcaagccaggaactatcatccatttctcaaccaatagatag

SEQ ID NO: 4614 - DNA, 1557 bp, Saccharomyces pastorianus
atggatttaagagatgcagagcctaccataaacccaaacgtgtttaacatatctaaacttttggactgtaagaatgaaagaccaagaattgcctgtatattcttgagtcagtttgatatgaaaaaaggaaatatcataatatggtctaaaagtatcaaagatacaacattcaacttgaacaatattgaatttaaatcgttacctgctggaattcacgaacaaaccgacgatattgtcaattttgtagttcctaagggagaagcacttggcgacgatgatactgttaagaggcctgtctatgattacggaattgcctatttcaaacaaaattcctttgatattattgaaaatgataatcaggttgatagaaataaagttctaatgttttctcttggtatagttatcgatgttcaagatctcctatcgaatggtaaaaaaaacttttataaagagatataccatgcttacgacgcaaacagatatacaagccatttaaaggagctgcttagtcaatggatgaggcagggcgagcttgacaacttttgccttttcgaaaatttctttgaaaagaataataaagatcacataactgaaaattcaatagaaactgtggaaaccacacccaaggaaacgcgacatttgatcgaatacatgccgtattgggcgagaagtttgggccctttaatatttacattatggaaggcaagccttctccaaaggagaatattggttctaattcctcaaggagaatcatttgaaaaatgtaattccttggcttattgcattttcttaatatcaatgctttctaaggatatggtggggaaccatataaacgatgaatacgttgtgcctcttttcactgtatcaacatcggatatatcattcctggagtcgcttggcgaagagcgtggctatgtggcaacaactagtgaagagattttgttgtataaacctgaaatttacgatatcatagtcaaacttccctcaagttcaatcaccgaagaatttccagaaaacgatgtggagatcatcgctgcatctggtgaacacaatagagccactcctcttgacttagaaacatatgaaaaagttatacttagtgaattagaagaagatgtttcaacaaatgtgaaaaataagctttataaggtgacagagcctatatcgtggttacaatttttgattgatggtttctatctcctaaccacagcgggttatttaatggcgccgtaccatatggcaaagaatttcaagcctttaaagcttatttctggttcaaagtccaatgattcggaaattcagatggccgaaaatttaattcgttacttccaccttagaacgttaaacttatacaaccgattgaaagacgttattcaaaaaaatgaaagcatcgggtccgaacaatctattaccatcttagcctcatttttaaccgacttgaatctggattgctttagtttacaagatcatcaatttataaaggatatcacctataaatggtttcaaagaaatatcgatattactaatcttccagaatgtgttggggatctctgctaa

SEQ ID NO: 4615 - DNA, 768 bp, Saccharomyces pastorianus
atgttcaagtcaatagctaggttgcggaggccgcggttcatctttttgaattctcaacggtttattcacatcaagactttaactactccaaatgaaaatgccttgaaatttctctccacggatggtgagctgttgcaaactcgtggttccaagagcatcgtcatcaaaaacactgatgaaaatctcatcaaccattccaagctagcacaacagatctttgtccagtgtcccggagtggagtcgttgatgataggtgatgattttctcactattaataaagatagaatggtccactggaacgtcattgagccagaaatcatcgagttattgaccaagcagcttgcttctggcaacgatgtgatatctgaggaattccatgctgttcaagaagaagaaggagaaggtggctacaagatcaatatgcctaagtttgaacttactgcagaagatgaagaagtcagcgagttgatcgaagagctaatagacacaagaataagaccggcaatattagaagatggtggtgacattgactaccgtggttgggatccaaagacgggaaccgtgtatttaagattacagggtgcatgtactacttgctcgtctagtgaagtgactttgaaatatggtattgaatccatgctgaagcattatgtggatgaggtaaaagaagtaattcaaataatggatcccgaacaagaaattgcgttaaaggaatttgacaagctcgagaagaaattggaatcgagtaaaaatagccgtggtgcttaa

SEQ ID NO: 4616 - DNA, 741 bp, Saccharomyces pastorianus
atggccggatcaagcttgtcgatcattgctctgggttacggtattgtttaccctaaattaaacaagactttaatgaggcgttgtcaagtgtatgctgcagtgacctatgcaatttgtatcggatttttgattcaaagttatttgagcaatatgcaagcaccatctgcattgatcttaattactttgattccaatggcgcttgctttggctgtattttactacatgattatcagctccatgacaaaaactttaatttatttgaaagaacaaagacagattgtgaaattgaacatgtacaagaggttactcttcatcatttacgcttccttcttaagtgttttagccggcagtatagtttcatcatttatttacattggcatgaacaccattgatatgattgaaaagaactggagatcaagattcttcattactgatttctggcctacgttagtatatttcattgtttttgttaccattgccttcttgtggagaccaacagacacctcatacatgctagccgcatcccaacaactacctacagacccagaaaacgttgcggactttgacttgggcgatttacaatcgttcgacgaccaagatgatgccagcatcatcactggtgagcatggtatggacgaagatgacctgaatttgaatttcactgatgatgaagaaggacgtgataatgtaaataaccatggtctaggccataaaacattgcctacttctccaagaaaataa

SEQ ID NO: 4617 - DNA, 87 bp, Saccharomyces pastorianus
  modified_base (71)..(71): a, c, g, t, unknown, or other
atggcgttatattcatttgccttctggaaacacaagcatgaattgctaccattgcaaaagtatttgttggnctttatcgagttttaa

SEQ ID NO: 4618 - DNA, 624 bp, Saccharomyces pastorianus
atgagagtacgtcaacattgccgaccttttcaactgcttgcttcccttctatgttggctactagcgttcgtagcagctaataaggagaagataaaccaaaataattaccaagtgtgtgcaggtatgtattccaaagaggattggaagggtaaagtagatccatttatatcgttcaacgtcaagaaaattagtgagccaattgacgaatctgatgctggtattgtcgttgcgatttacgattttcaagatttcgagcacttgggtgtagaattgcctgatggagaacagtactatatctgtgatgattatgctattgacatcggaatctgtgaagaagagcatcgtgatgagtttattgtccaagaagttgtttacgatccatatacttccacgaataaatctctcgctaatcccatcatgacgttttctaaaaacgacgtaggtttgcacgatactaaatacccggtgacgaaaactggattttactgtgttactgcattcagatcatcgaaaagtaccaaatttaaggctgtggtaaacttcagaaacgcttatggtcaccttgcaggtactgagatcataaactaccgctatatggtcttttggctgtcgcatatgttgtag

SEQ ID NO: 4619 - DNA, 711 bp, Saccharomyces pastorianus
atgacacatcctgtagatgtaaaagcatgtttgtttgatatggatggtcttcttattaacacagaagatatttacactgaaacgttaaatgaaaccttggcggaatttggtaaaggtcctttgacttgggacgtgaagattcagttacaagggcttccagggccggaagcgggaatgaaggtcattgagcattacggcctcccaataaccttaaaggagtatgaagaaaggaatatctctttgcaatctcttaaatggggcacctgcgaatttctgcctggtgcatttgacttgttgaaatacttaaagtcaaagggtattcctattgctctatgtacctcttcgaataaatcgaaattcctctgtaaaacaagtcatctaagccatggtttcgatcttttcgatgccattgtaactggcgatgatccaagaattccaaaaggcaggggaaagccgttcccagacgtttggcaattgggtttgaaggaactaaatgaaaagtatcatactgacattaaacccgatgaatgtatggtcttcgaagatggcatccctggtgttcaatcaggcaagtcgtttggtgcacatgttatttgggtccctcatccggaggcacatgctgttttgggcgatacaaaaactttgttggctggtaaaggtgagctgttgtcctctttagaagaattagaaaaagctaaatatggcctgtga

SEQ ID NO: 4620 - DNA, 1995 bp, Saccharomyces pastorianus
atgtttaaattatctacacatttaggcagcttgaaaaaagttctcaatgaagatctgggtaagttgagtgatactattcgatttgagaacaccgataagttgtcgatcatggcatatgcggttaatattttacaaaaagatgatgacgatgacatattggtcaacggaatagttaagcgtttacttgactcgattaatgaatccgttgaacccctgagtttagtcgataaaaaagatagaataacagagcaaagtaaccgaataacgacaatggtaaacttcgaaaaaatagaaaatagagacactgtaattactttgccaaggttgtcaaaagaaatttcggtaaacctgcaaaattttgcatgtcatattggatccttgctattagaaaaccataacctaaacaatgtagttatggagttgatttcagaacaggttggttcgccaaggacacaaaagatagttgcattatggttaagtgccagtttcctcaaaggggcggggcgaaaaccaagggaggaagaaaattacctgcaatttggttcaagtatagatgattctggctcagtagttgaagaatcgtgcttaacagtgctggaatattgtaatgaactttctcaagatattagtatgaaaattgaggggaacggtattaaaaagagcgatgaattcgccctatgcacaattttatcgtccatcgaaatagtctgttctgtcatgaagcgtgattttcaaccagaattaattgattatatatataccgttactgatgccctggcatcaccttctgaagccatcaggtatgtgggccagtcgtgtgcattgaccatagcgaataccttgtatgatggatccgtttccactatgatccttagaaacgtggattacttagtagaatctatttcttcgaggttgaattctgggatgactgaaagggtaagtagcatattgatggtgatttgtcaattggccggctatgaaactatcgaaagctttaaagatgtaattgaaacaatattcaagcttctggattactatcatggatatagtgaattatgtcttcaatttttccagttatttgaaacaatcattttggagatgaaaaaaaaatatgtcagtgatgatgagatgatcttgaaaatagcaaaccaacacctttcgcaaagtacatttgcaccttgggggatgactcactttgaacaagtgcttaatatgttagataaagagacaggatctaaagatgatataatggatgatgcaaaactgttggaagagaacacggggcctagtagtttccaagaatacttcgattccaagctgagagagccagacagtgatgacgaagaagaagaagagccagaaggagatagtccgagtaatgacgcagatcagtgggtctcgcctataccgcgggactcatataaaatactactacaaattctaagctatggagaaagattgctaacgcatccatcaaaacgattaagagtgcaaattttatctgttatgaggctgactttccccttgttagccacgcaacataatctgttgataaaggaggttgccagtacatgggattccatcgtccaatgtgtcgtatgtgcggacttttcaattgttcaaccagcatgcatgtgtgtcgagcagatgattaaatattccggcgattttgtctctaagaggtttgtcgaactttggcggaaaatgtgcgaggaatcctttcttttgaaagaactaagagtcgatccgacggtgcacaacgatgatacaagatgtatagaaaagcgtgtaaagtttccgccagtgaccgaaaacgcgctggtgtcaatggtgcatatggtcttggaaggtatcaagattacagaatacttagtctctgaggcggtgttggagcaaatgatatactgttgtgttcaggttgtgccaatggaggatatatccgctatatctttgattacgggtgatatcgtgtggaaaataagaaatataaattga

SEQ ID NO: 4621 - DNA, 1179 bp, Saccharomyces pastorianus
atgttcaagagctccggggaaatgaattcagacacggaagcatttaagggcataagggttgcatgcgttgaactgtccaaaaccgcctttttgcctgctgaatcatttgatccgaattcattaaaattgttagcatgtttgaaaaaagttgaattgaagctttcaacttaccaagacgattcactctcccctaaatttgcagattatgtttttgttcctatagcaagtttattgaaacagccaactcttggggaatctcaaacagaatatgtcctattgatcatatcacacctattacggatatgttggtcatccaatggaaaacttccacaacagttggcacagcaactgttccccctgatttcatttttaataagcccagataaagaaaacctcaaacttaattctcggtcagatgagtttagatacgctggtagtttagtcctatatcaattttttgattcattaagattccaacaatatcacaatgaattcttttcaaattcaagtcctaaatcacttcccagtttaggacattctattactattctcctgaagattttggagcaaacaccgcaaaataacgagcttcaattgaaagttttatcagctttagaaatactctttcaagacattataacagatggagaaatgctctcatttatactaccaggaaatgtttctgtcttctccaaaatactaatgagacctggccgtcaaatacattacaaagtgagtgttcgtacgctggaagtcctggccaagttgttagtattggtttatgatgattttggtttacaagttcaaataaatgagttgacagatattcgagaattgaaggaaaccgggatgaagtccgaacaagatcaatctttttcgtttaataaacccattattgttttacagaaagataaagaatctgatggcaacactcatagagacacaagttggttaagggcaacttcaagccaaattaaaattgctttagaggcctttattcctaagttactcaaacgcaataatgactcaatcaatgagaaattagcgttgttcgtttccactctgctaaatagatgtgaaaagtctctgcataattgtgagcctgtatttgtatccaccttagtaaacttacagcgagatactctagagatccccggtaccgagctcgaattcgtaatc

SEQ ID NO: 4622 - DNA, 420 bp, Saccharomyces pastorianus
atgttgttctatatagccgccgccgctgccacctacaactggttggtatgcaccgagggatcgtgctgcaccttgatcatgggcctgtacataggctcccacatctgcgccttgacccattgcaaacactcgtcaaagtcacgaggcaccttgaccgtctcaccgggaacaccgccgggcacctgctcctgttcgatgcgggctgtgccctcttctagcgcctgcaggatcactgcggtggctagacgggccgaggtgttggtgatggtgtccaggccgggcaacagccccggcctggagtcaccctctctcagtggtgacaattcggccagttggtccactgcagcagaaatcatcttgtccgtaatgatggtggcgcgcgaaagcacggcaccaagaccaattcccgggaaggagtaa

SEQ ID NO: 4623 - DNA, 2448 bp, Saccharomyces pastorianus
atgaggataagttttagtcgccaagtgtgccacagtggtgcaaaatcattgaaaacaccagctatgagaaatcccatgtcccccacggaacagcactcacagcataattctactctggcggcctcaccctttgtttctaacgtatctgcagcaaggacacaacataatttagcaaatgatactcaaaatgatcattctcaaccctggaacagaaccaatacgacaaccagtccttaccaatcgttggccaatagccctttgatacaaaagctacaggcaaatatcatgaccccgcaccagccatcgatcaattccggctctgctgccggcaataatgcaaatgacaacaacttattggcttccatgtctaagaatagcatgtttggttctactataccgtccacattgagaaaagtgagcctgcagcgggaatacaaagattcgattgatggcacgcttgatgatggtgacgacaacaatggtaatacgactgtgaatactaataatgatcgagagagtaaactagaaaataatgggcctctgacgacaactacattgacgacaacaactacggcgactcaattagatgtttctgaattgtcagctatagagagactgagactttggaggtttgacgcattgatgcaacatatgtacaggacggcagaatacattgctgataaagtatacaccatatcgaatgatcctgatgacgccttttggctgggtcaggtatactataacaataaccagtacgtaagagctgtggaacttattaccagaaacaatttggatagcattaatattttatgccgatacttattaggactttcttttgtgaagttacaaaaatatgatgacgctctcgatgtcataggcgagtacaacccattcagtgaggatccaacatttgcagctgcaaacgtcacgagcaataacgggactaatagtagcacgtcacaacctaccgatgggggaataaaaatggaatcatcattgtgttttttgagagggaaaatatattttgcgcaaaataatttcaacaaggcaaaggaggcatttcgtgaagccatcttggtggacataaagaatttcgaagcttttgaaatgctcctttcaaaaaatctactaactccacaagaggaatgggacctgttccattctttagatttcaaagagtttggcgaggacagagaaattatgaaaaacctttataaaatcaacttgtccaaatacatcaatacagatgagataacgaggtccaatgagattctaacagaggaatacaagttgggtgataatgtagacgttataagaagcagagtagatattctttacacgcaatgcaaattcaacgagtgcttagagttatgcgaagctgttttggaaaatgatgaattcaacacgaacattctgccaacgtatatcggatgcttgtatgaactgtccaataaaaataagctttttcttttatcacatcgtttagcagagaatttccctaaatctgcgattacttggttcagcgttgccacatattatatgagcctagacagaattagcgaagctcaaaaatactattctaaatcctcgatactagacccgagctttgcagctgcatggctaggatttgcacatacatatgccctggaaggtgaacaagaccaagcgttgacagcatattctacagcgtcaagatttttccccgggatgcacctgccaaaattgtttctcggaatgcagtttatggccatgaattcattgaacttggcagaatcatatttcgtcctggcatacgacatctgccccaatgatcccttagttttaaatgaaatgggtgtgatgtatttcaaaaaaaacgaattcgttaaagccaagaaatacttaaagaaggcgttggaagtggtgaaagatttagatccaggttcgagaacgacaatatcgattcaattaaatttaggccacacttatagaaagttgaatgaaaacgagattgccatcaaatgctttaaatgtgtcctagaaaaaaatgacaaaaactcagaaatccattgttcactaggttatctgtatttaaagaccaaaaaattgcagaaggctattgaccatctgcacaagtcattatatctgaagcctaataatgtatctacgacgacattactgaaaaacgccctagaattaaacgttacgttatcgctggactccagtcatccgctgcttgacaagtcgaatctaatggatcaagcaaacaaaaacaagactttagtcaacaagaaaaggtcttcgttggcatatgatcctgttaatatggccaagaggttgaggacccaaaaggagctttttgatcagaacaatgagtttctcaaagcgggagtgcacgacagtaacaatggcaatggcagtaatgataatggtgatgatgattttgacgctgatatggagttagagtaa

SEQ ID NO: 4624 - DNA, 1248 bp, Saccharomyces pastorianus
atgagtagcattgaagggaagaaccagtttcgtattattgtaggctcgtatgaacacaatatcttatgtttatccctagatattccggcgcaaaaggaaaacgatgtggccaagacacctcattttatgccgatattccatttccaagctcattctttaagtatcaaatgtttggctgtttccaggagatatctggtctctggatcgaatgacgaacacatcaggatttacgatctacagaagagaaaggaattgggtacgttgttgagccatcagggttctattactgcgttgcaattttcgcatccagcttcttctagtgaagatcctgccattgcaaagggtagtaagaacagcaaatggttattatcggcatctgaggaccacaagatcatggtttggagagttaaggattgggaaactgtgggatcgttgaagggccatacggccaggattaatgatgtggacatccatcctaccaatagaatcgccattagcgttagtgatgaccattctatacgtctctggaacctcatgactctaaggaacgctgctgtactaaaactaagaaaatataacacaaatgggtccttcgttagatggttaggtgctaaaggtgattacttcgctgtaggtttaagagacagagttcttatttatgaaacaggatccgccaaagtgtacaaagaaatacttttcgatagaaagactatcatgcatcttgagacacacatcctgccattcgataataaggaatacctttctgttggtgttagtgatggtaatgttcatttctacccttgtgaacaattattcgaaaaggaggaagaaacagaagacggagacgaaagtgaagatgacaagaagaagatcgaacctgctttttcattattaggccacacaaaccgtgtcaaagactttaaattctatacaaatgaattcggtacctacttaataaccatcggttctgacggtaagattgttgtttgggatatgtctacaaaagagcaagtagcagtctacgactgcggtgaaagattgaactgtctaacactatgcgacgaaagcattgaaaagtacagcatgatgaagaaaagagatgctgaaacagccgagctaggtgagcaaagtgaagtagaaagtgatactgaagaattgaagaaaattatgtttggtgagaagaagaagcttaacaagaagaaaaggaaggaaccgaagaagagcaaagtctctgtagaattagaataa

SEQ ID NO: 4625 - DNA, 1866 bp, Saccharomyces pastorianus
atgagcatagaagacatcgcgctggcaagctcgtctattgctataatcagatatgaaagtgaggtattcagtgcgcaaagtttattgtgggtgttgagtcgtggggtcatgtctaactggaaagaggcgaaagatgcaaacggaagggtatattactacaatacgttgacaaaagaatctacatgggagaaaccaaaggaactagttcctcagcaagagggactttttcaggagaatggctggaaagcggcaaagactgcagaaggaaagacgtattactacaatgcatctacgaggcaaactagttggactattcccgcctttgataagagcacagatctcatcgcaaagagagaatctgaggtaataacatcggcacaacccaccgcaaacaagtcaatttctataggtgaagagaagaaggcgttgcaacaaacggctaaagaagaggaaagccaatataccaataactctagattgctaaatgtcactagaaggacaaaggaagaagcggaaaaagaatttatcacgatgttggaggataatcaagtagactcgacttggtcgttcagtaaaattatttcagaactgggaaccaaagacccaagatactggatggtggacgatgatccattatggaaaaaggaactgtttgaaaaatatctttctaatagatcagctgatcagcttttaaaagaacataacgaaacgagcaaattcaaagacgccttcctaaaaatgctacagaataattctaatataaaatactacacccgctggtcaaccgcaaagagactgattgctgacgaaccaatatataaacactctgtggttaacgaaaagacgaaaagacagacttttcaagaatacatagacactcttacaaacactgaaagagaatctaaagaaaaactgaaggagcaggctttagttgaattaagagagtatttaaacagcattttggctgtaggttcgccatcttctgaggctttcataacatggcaacaactattgaatcactatgtttttgagaagagcaagagatatatggcgaacaaacatttccgaattttgacccatgaagatgtcttaattgaatatctgaaggtcgtggatacgatggaaattaacctcgaaaacgaactgagccagcttcggctgggtaattatactaaagaccgtatcggtagagataactttaagagtttattgaaggagattcccattcaaatcaaagcaaatacccaatggtccgatatttatccttatttcaagtctgatccacgctttttgcaaatgcttggaagaaatggttcttcctgccttgatttatttttagattacgttgatgaacaaaagatgtacatctttgcacaaagatcaatagcccaacagacattgatagatcagaatttccaatggaacaatggggatagcgatgaggctactaaaaaggccatagaaaaactactggcgaatgatcccaagttcagcaaagatgataaagaagaccttggtttgataactgatggaataattcagcaaagaaacgaaaagatacagcagaagctacaaaatgaacgtaggatattggagcaaaagaaacattacttttggttacttttgcaaaggatttacacaaaaaccggtaagcctaagcctagtacttgggacctcgcttccaaggagctgtgcgaaactcttgaatttaaggcattaggtgatgacgacgcaacgaggaagcaaatttttgatgatttcaagcctgaacactctgcacctaataccgagagcgctacagttggtgtaacattaaccacatctaggaagaggcatttaagcccatcaatcgagttagactattga

SEQ ID NO: 4626 - DNA, 321 bp, Saccharomyces pastorianus
atgtttaaagttactaacaacaattttctgcacgccacattggtgtgttttttattcacccagaatgataataaattagaaggcttagccaataagttagctacgtttagaaatataaatcaagagattggagaccgagcggtctctgacagttcggttataaaccagatgacagattcgttggggtcgatgttcaccgatattaagaactcatcctcaaggttgacgcgatcattaaaagccggtaatggtatatggagaatggttggtttggcactgttaatattcttcattctgtatactctgtttaagctgttttga

SEQ ID NO: 4627 - DNA, 138 bp, Saccharomyces pastorianus
atgtccaccgattctattgtcaaggcttctaactggagattagtcgaagttggccgtgtcgttttgatcaacaaaggtcaatccgcaggtaaattggctgctatcgtcgaaattattgaccaaaagaaggtatgttaa

SEQ ID NO: 4628 - DNA, 456 bp, Saccharomyces pastorianus
atgaaagctcaacttcaagccatatcattaagaatccaagctgttcgaagtagtgaccaaatgacccgttcgatgagcgaggcaactggtctattggcagggatgaacagatctatgaatttgcctcagttacaaaggatatcgatggagttcgagaagcaaagtgatttaatgggccaaagacaagaattcatggatgaagctattgataacgtcatgggtgatgaggtagatgaagatgaagaagcagatgaaatcgtaaataaggtcttggatgagattggagtagatttgaattcacagttgcagagcacacctcaaaacttggtttctaacgcgccagttgcagaaacaatcgtaggaattgctgaacctattggagcaggatcagactctcatggaaatcctgatgatgagctacaagctcgattaaacactttgaaaaagcagacttag

SEQ ID NO: 4629 - DNA, 1653 bp, Saccharomyces pastorianus
atgtgtaagagaccaaatttgaataaatgcgtgttccattatttcgatgaacaatattcattttgtcggtcctgtgtcatcgtaaataatgaaacgatggaagattcgaataattgcagatgtgtacaatgtgctttaagttctcttaataatagttgttttcaagactactgtacttctggagatgaacaaaaaacgttacagaactttattgaacagttcaaatcaatcaatggagtctcggataacggagtaagcttgaagcctgggaataataaattttcaagtaaaaaattgacttactttgttgaccagaatcataccgttttcagaaatcctttgccattcgaaaaaaaccaattaatttttgcaatattagcctctttaacgaatagccaaaacggcaagctatcacttgctgtggtcagtgaagttgagaatgacaatgaataccaggatataacagaaactcaattttggggtggaagaagaagaaagaacaaaaaacaattacccaaaacagctgatgatgaagatgataatgacgaagatctagttgaagagaagcatagagacgacaaagaagaagacggaaataacgaaaaagaaggtgaaaactgtaatgaaaatcacggtgatgatgatgacgatgaaggaagacctagaaaacccccattgctttatactacaactgaagcttatacatcctatctcaccaaaccgagggaaaatccggtcacctattcagtggatgaatgtaaaaatataagaacaataaccgcaatcgtagatactctttacgatactgaaactgaaactaaaactgaaactgaaactgaaattttaacacgaattgaatataagcaagattttttcaccaccacagaaaccaaggtaagagaaattacgaaaatcattggagtcggtaaagtaacaattactgattacgatacaattaccgaaacaccatacgaaattgtgaccaaaactaagttcagaaaaaaactcacaaaagttactgaaacttcgactgtaactcaaacgaaaactgcgataaccacgtcaacaaaggcaaaaagaaggtggttcccaaggacgacaacaataacaagtactacaaccacaacgttcccaagtacgacaactactactacaacgagcttgttgataactgtggtcaatccaggtaggctccagaaaataaccggaatcaagtttggtcttttcaatgttagtggggaggctgttccaccaccagatgagaaaaatgtgcaatcaatagtgaaaagaaatataatcgccgattcaaatacaagcacgcaaagtagtataatcaatacaactaccacgcaagtgccttctaaatcagaacttgattctggccaatatatctcggcggcatctcaactagacaaaaggattttcattttcaccgttatcacagtctcaataactacattaacgatgctggggttttcttacaggtcgcgagtgtcttttagagatcatactgttgatgaatccgacgatgatgatgattggtctgatgaagaagttgaacttgatgaagaagatttctactctctccctataagcataccagaaaaggggctcagtttagacaaaatggcacagcaactcggtgtagagtag

SEQ ID NO: 4630 - DNA, 354 bp, Saccharomyces pastorianus
atgcaggtctacctggtgcctgttgaaagggtggcacagctgaaaccttacttcaggtacatcgatgacgtgaacgtaacaagaaagcaggaagacgccaagaggaaccctaatccttcatcgcagcgtgcacaagtggtcaccatgtcagtgaagagcgtcaacgatccctcgcaaaatagactcaccgggtccttgctggcgcataaggtggctgatgaagaggctaatcttgaattgacctgggcggaagatacttttgagcaattcaaagattctgtcgtgaaggaaactgaaggtaagatcctaattgcctcagaaaaacaagaagattacatagataatttagtttga

SEQ ID NO: 4631 - DNA, 1209 bp, Saccharomyces pastorianus
atgttcactaagtttccgtggaacaattttttgcacaatgttattttcgacattgctcagcaaatttttaacgggccacttaaaactggttataacaggtttcttttgaaggattatttggtagatgcatacttaactcgaaagatagtagatgctgacaaagcatgtcaaaactacgaaaaagaaacaggtttacgctatggttatatgggacatttaacattaattgccgaagaaatatcaaaattcaaagagtatattgacgaaatgaaactgactttttgcaatactgttgtttcagatcgtcttgatgaagctttttggaaagaatatagtgaaacaactttggcggataccagagagaagtataacacggttttgggagatttcggaaatgaacaagaaagtgatgacgatgacgttattagaaattctgattcagaagatataattagcgacacccaaggcagtgataactacggagatggggatgatgatgagcttcttagtaatcgacacgatgctgggaacatggacttatattacaactttaataacaacgaaaatgacgaaaatgaagaagactacgcagagtatagtgacgtggacaataaaaattactataacaatgtcaacgctaatgttgatgattatgatagtgacgacaataattccaagaattccaatccaaactttacagacaacgtatctcaacataatgacgattctgaagatagaaacaataagagtctacatagtgaagacaatgacgaaaacaagaatgacaaatggacttcaggtgcttccttgtttcccctagaccattttcctagtagatcgcaaccttcggaccccaaactgcaagatcagaatatctttcagcacgaattcggctttaatggtgctggtgatgatgatgattatatggatcctaatgacgatggtcaatcgtatgccagaccaggcaaccccttatatagtaccccaaaaacaccaccaagaccaaaaacaatacttttcaattccttatctgcattggaagacgatgaagacgatggagaaatagcacaaagcattggtatcgatgatcgaatagataatgatatatcgagtgatgacgaagattccgaagacgaagatgaagataatgacatggccaatgatgacggttattcattatatagatcaaggagtaaggaagcattctaa

SEQ ID NO: 4632 - DNA, 81 bp, Saccharomyces pastorianus
  modified_base (76)..(76): a, c, g, t, unknown, or other
atgagggaatgtttgagagagaaaccacttgtgggagacagactaaaaatcgctctagaagacactaaaatactgngttag

SEQ ID NO: 4633 - DNA, 2472 bp, Saccharomyces pastorianus
atgtatgataggaaagtaattccaagaatgccatggcatgatgtgcaaatgatgactttgggcgaacccgcaagagatttagcccgtcattttgttcaaagatggaattacttattaagagccaagaggcctagtagattaactccgctgttaacaccaccttcagatttgaccgctgaagagttgaatagattgccaatgtttgaaatattacgcgaaaaatccacttgtgaaactcagatacttagaagtgccgggaattggtcactcggcttaaaagaaacggaatgttccattcaaaatgcttacttaaagttgattgaaaaaagtgaacatttcatttatattgagaaccaatttttcattacatcaactgcctggaatggtacttatgttttgaataaaattggtgatgcccttgtggatagaattatcaaagctaaccaagacaacaaaccttggaaagccttcgtgcttatcccactaatgccagggttcgattctccagtagacgccgcggaagcttcaagtcttcgtttgatcatgcaatttcaatatcagtcaatttcaagaggtgagcattctgtttttcaaaaattaaaaaaactaaatattgacccagctcaatatatccagtttttttcactgagaaaatggtcaactttcgaaccaaatgaaaaactaatcactgaacaactttatgttcatgctaaaatcatgattgctgatgatagaaggtgtatcatagggtctgccaatatcaacgaaagatcacagttgggtaatagagatagtgaagtggcaatccttgttagagataccgacctggtgaaaactaaaatgaatggtgacgaatattacgcgggaagatttccttgggagttaagacaacgtttgatgagagaacatctgggctgtgatgtagatcttgttgaatttgttgagcaaaaattcgagaggtttgaaaacgtggctacaaagaattataagacactccataccttggataatgatggtgatggtagtaacaaatggacggaacagcaaatgatcgattctgctatgattgaattaggttatcgtgaaattttcgattgtaaatgcagttcccaatggcataatattcatggaaacgttgctaatgccaataccactaaatatggaataaatgaagaagaaccgaaaagagcaggtgaagatgcttacaacaagctctttacatctgtggatcatcaacaatcatttcgtaaaaggaagccattgcccaaacatcgcttcgcatcgttaggactaacatttaatcacagagccggtgttgagaacattggtattagagaccataaagttttaagtacagatccaagattaagaaaaaatgatgaacacaaaaaagaggttgacggctatgggcccgatggctggaaaaaagaatctaacgaaaagtataaatccgacgccactgaacagttgaaagaatgggcgttaaagtcgctaacctcaaaagttcttgatgataaaaatttgattaaatccaaagcttcagagggattttcagaatacttacctgatgagaaagatcttgaaatgtatatcatggataaaagcgttacgaatagaaacaaatggggtatgctgaaaagaatttgctatttacaatacctatcccacaaacttgatgataggaaatcgcagaggttaaagaagattaaagatatgaaaagacatttgagttcaagtactgaaagcacgaagaatgcctctaatagtcctccgttgaacgaaaaaagcaacgaaggagaaagtacagacgttaatcaggatggtgatggcgatgaatatcatagattacacgcagacattttgagaaaccaagaattagacgataattcactagatgatttactttctcagatcattccaaagataaccaattttaacagtggcgaaattgatgatgcgaaaaaagaagaattattgaaactgaactttattgatccatattcatttgaggatcctctaatttcttccttttccgaaggactgtggtttactgttgcattaagaaatactctactttacaaattagtattccattgtcaacccgataatgctgtacagaattggaaggaatatggagagtttactgaactggaacaagaatttcacataaaccaggagaaactgattgatttggaagcagagaacatcaattctacagcaacaaatgtagtagataaagaaagggagaaggaaagaatgaaaagagctgctgaactgaggatgaaattatccggtagcttgctgtacggatttaaccaaaagatctttgataaacatacagcccaaagaattttggaaaggatccatggccatttggttattttccccactgagtggttagctaaagaagttgagagtagaaactggatttttaactcggacagactctcaccaatggaaatctacaattag

SEQ ID NO: 4634 - DNA, 351 bp, Saccharomyces pastorianus
atgaggcaggtgtcagcatcaatggggcaagtttgcaaaggcatggataaggcgttacagaatatgaacctccaacagataaccatgataatggacaagttcgaacagcaattcgaagatttggacaccagtgttaacgtatatgaagatatgggtgtgaattcggatgccatgctggtggacaacgataaggtggatgaactaatgagcaaagttgctgacgaaaatggcatggaattgaagcaaagtgcaaaactggacaatgttccagagataaaggcgaaagaggttaatgttgacgacgaaaaggaagacaaacttgcacaaagattaagagcattgaggggctga

SEQ ID NO: 4635 - DNA, 1938 bp, Saccharomyces pastorianus
atggcttcagaaaatggtaaaagaggaagatctctgacgattaaacccattgaaatcatactaaacaggttgccaaatgctataataggacagcaacaactcaaaaaatacataacgggcccggtctacaaatatctctgcaaactactactgataggaaacagtggttggaccaacagtatagagtcttttcaaagaggccaggcggggaagctttttttccaaaacaattttgctgattctgcaacaacttttaagatcctcgcttatttggataagcaacgatacccgttacccattgacgccaatgaggggcattcaccttctttgtctgaaggattcaaatccaccatttctattgtccagcaaaaactactgctggacgatgtcggagaggatatgagcagcgatgaggacgatcacattttgccgcgagatataaacatcgactttgtgaataaaacatattccagccatgatttaggaaaactgcttcaaaacgtggagtctaatataaataacttgtcggttcagaaaaaattggaaagggacgaactaaccaggctagacctcatgatagatgatttaaaatccagaaaattaaaaatctttgaaagaatccaactcattgatagcaagtccaccacttttgaaaatgacgtatcattaataaaggacaggatagatttcattaaggaatacagtttggaagcggacggtaaagaaaatatacagcggaatttagaagaagagacattatctgaagcctcgttctctactgtgaatgaagaagcaatctcgttgccgcataatgataaaactagcgataaacgattaaaagatttttacaaggggcccaatatgaaacgccaacttaaaaacaagaaattaaagagtatcacagatacacatagccgaaattctgtaactttcagaatgaccataccccatggagaacatgggaatagtataaccgcgcttgatttcgataaaccgtggggtactttatgttcatcaagctaccaagatcgtatagtgaaagtttgggatttgaaccatggagagcaggccggagagttacctggtcatcttgccacggtcaactgtatgcaaatggatagagtaaactataacatgttgattactggaagtaaagatgccactttgaaaatttgggacttaaacttgtgcaaagagctttattcggatcaaagtcccctgaaacagaatgcggaagaagatgttacaccatgtgtccataatttcgacttgcatagtgacgaaattacagctttatcgtttgattcagaagctttgattagtggctccaaagacaagaaaattctccactgggacttggttacaggtaaatgtattcaacaactggacctgattgtcacgcctacatataacgacactaaggtgttggcacgctccgccaacaatagcacatgtgtgcttggcagcgaagctccaatgataggtgcacttcaatgctataattcagcgttggcctctggtacaaaagatggggttgtacgactatgggatctaagagtcggcaagccggtgagggcactggagggtcataccgatgggattacgagtttgaagtttgattctgaaaaattagtcacgggctccacggacaatagcgtaaggatatgggatttgagaacaagctcaatcattgatgtcattacttatgatttgcccattacttccttagattttgatgacaaattaattactgttggtgcgagcgagaacggagtgaatgtttttaatatggaacgcgatgagcattggatgacgccagaaccaccaaactcactgaagggcgacgaggccaatgagagaattgctatcgtcaagtacaaaaacggattcctcatcaacggccacaataatggagatatcaacgtatggtcaatttag

SEQ ID NO: 4636 - DNA, 294 bp, Saccharomyces pastorianus
atggacaatagcgtaaggatttgggatttgaggacaagctcaattcttgacgtaattgcttacgatttaccagtatcgtccttagatttcgatggtaaattgatcactgttggcgcaaacgagggaggggttaatgtctttaacatggagcgcgatgagcattggatgactcctgaaccaccgcattcactagatggggatgagctgagcagaagaattgctattgtcaagtataaagacggatttctgatcaatgggcacaacgatggagacatcaatgtatggacactttag

SEQ ID NO: 4637 - DNA, 1374 bp, Saccharomyces pastorianus
atgggttcgggcgatactagaggagaaagctctctggtagctaaaccaatcgaaattatacttaataagctaccacatgccatactagcgcaacaacaatttcaaaaatatataacgagccccatctacagatatctttccaaacttctactgttcagagaggtggcttggcccgaaagtacaaaagatacccagaaaggacaagtagggatattttcctttcaaaacaattatgcagactctgcaacaactttcagaatacttgctcatttagatgagcagcgatacccgctacccaacggtgccgctgaaaagaatttaccttctttatttgaaggattcaaagctaccgtttccatcattcaacagagactgttgttagacaatgtagacggggccacgaatagtgataaggaaaaatacgttcaattgccggatattaatactggttttgtgaataaaacgtactctagaattgacctaacacatttacttgaggatgtagaaactaacgtggaaaatctgtcaatcaataaaacgttagagatggatgagttgaccagattagattccatgatcaacgaactagaatccaggaaattaaaaatcctggaaagggttaagcacattgatagtaagtctaccaatcttgagaatgatgtaacactgataaaggatagaataaattttatcgaggaatacaatttggaagctgatcgtgaacagagcttacggaagcaaatggaagaagaaagatcatctgaagcgtcgtccttcacgcaaaatgaagaagccatatcgtcgttatgtgatgttgaaagtaaggatacgagattaaaagatttttacaagatgccccatgaaaaaagccacgataaaaacaggcaaattatctcagaaacatatagccgaaataccacggctttcagaatgacaataccccatggcgaacatggaaacagcataaccgcattagactttgatacaccatggggaaccttgtgctcatcaagctaccaagatcgtatagtaaaagtgtgggatttgaaccatgggatacaagttggagagctgcctggtcaccttgctactgttaattgcatgcaaatagataagaaaaattacaatatgttgattactggaagtaaggatgccactctcaagttatgggacttaaatctgagtagagaactatatttggaccatagtccattgaaggagaagacagaagaaattgtaacaccatgtatccataattttgagttacataaagacgaaatcacagccctgtcttttgattctgaagctttggttagcggatctagggacaaaaaaaatgccactgggatacaacgacgggcaaatgtatacagc

SEQ ID NO: 4638 - DNA, 1161 bp, Saccharomyces pastorianus
atggtcaacttgaacacggtggcaccgaaaaataacagagactactacattgcgctcgggctcgaggggtcggcgaataagctgggcgtaggggtggttaagcatccgcttctgcccaagcatgccaatagcgacctgtcttatgactgcgaggcggagatgctctccaacatcagagacacctacgtaacgcctcccggggagggcttcttgccccgtgacacggcaagacaccaccggaattggtgtgtgaggcttatcaaacaggcgatagccgaggcgggtcttcaggacccggcactcgacatcgacgtgatctgcttcaccaggggccccggaatgggtgcgcccctgcattcggtggttgttgccgccagaacgtgctcgctgctctgggacgtgcccctagtgggcgtaaaccactgtataggccacatcgaaatggggagggaaatcaccaaggcccagaaccctgtggtactgtatgtgagtggcggtaacacgcaggtcatcgcatactcggagaagcggtataggatcttcggcgagacgctcgatatcgccattggtaactgtcttgacagattcgccagaactttgaagatcccgaacgaaccctcgcccggctacaacatcgagcaattggcaagaagcgctccgcacaaggacgccctggtggagcttccgtacacggtgaaaggaatggacctttccatgagcggtattctggcctccatcgactcattggccaaggacctgttcaagggcaacaagaaaaacaagatcctatttgacaggcaaacgggcgagcagaaagtcaccgtcgaggatctttgctactctctgcaagaaaacctgtttgccatgctcgtggagatcacggaaagagccatggcgcacgtcaactccaaccaggtgctgatcgtgggcggtgtaggctgcaacgtgcggttacaagaaatgatggcacagatgtgtaaagacagggccaacgggcaggtgcacgccacggacaacagattctgtatcgataacggggtcatgattgcgcaagcagggctgttagagtatagaatgggcggcattgtgaaagacttttcggaaactatcgttacgcaaaagttcagaacagacgaagtgtacgcggcttggcgtgactag

SEQ ID NO: 4639 - DNA, 786 bp, Saccharomyces pastorianus
atgagtggtaacgacgactacgtgactagcgatgacgacaatgacgccgaaaagaaatacgcccggccagtctttgttagaaaaagcaagagagaagtccaggccaagagcctcgaaggcgtaggccatcttggtgacacgcccgtgaagcaaacgcagcgccatggcgaagagaaacagaaacctactatacggctggtgccggtggctatggagagtccgcagaaccggccaaaaaagaaacgacaacgcacaagtccggcgaatcatggcagtgcgcttttcgagtacggtgaaagcatagcgggttacaagtgtgtcaccactgagagcgagagggaccgcctgaaacagaaaagagagatcgagatcgagaacgagggcgaaagcacaagcgagggcgagggcgaggacgggatagatgcctctgccttcgaccaggctaaagtcaccgagactgaagctgaaacagaacgagccatccgccagtactggcgccggcccaaaggcgagccaaccgtgctgccgctgccaggcacaccgacgctggcagccgccagcgtcgaccagatcagcgaacgcagcgtagaacggttctatgcgatgagcatcccgctggtggcagctaaccgtatagagcttctccgccgcgatagaatccggtggcacccggataagcaccgccatcaccaggccaaggtcacaaaactgtttcaactcgtcaatggcctgtgggagcgagagcaagaactgcagcaggcgcgccaccgccggccggaggcctag

SEQ ID NO: 4640 - DNA, 1095 bp, Saccharomyces pastorianus
atgaagttgtctgctctattagctctatcggcatccactgccgtcatggccgctcctgctgtgcgccacaacgataaccaccaccataacgataagcgtgccgtggttaccgtcacccagtttgttaacgcggacggtgctgttgttatcccagctgcctccactggcgctgctgcgactgccaccgcagtcgcctctaacactgaggttaaggtcgagtctgccgctatcaccgctgcaggtaccaccaccttgtcctctgccgctgccgccgcctcttctgcctcctcttcctcctcctcctccgttggctctgctgacttcgaagacggtaccatctcctgttccgatttcccatctgcacacggtgctctctccttggactgggtgggtctaggcggttgggcttccatcatggacttggacggtaacactgccacttcttgtcaagatggcttctactgttcttacgcctgctccccaggctctgccaagacccaatggccttccgagcagcctacagacggtagatccgttggtgggttgtactgtaagaacggtaagctgtaccgttccaacaccaacaccaacagcttgtgtgaagaaggccaaggttctgcccaagccgtcaaccaagtctccgggtccatcgctatttgcggtaccgattacccaggttccgaaaatatggtcgtccccactgtcgttggcgccggttccaccgaacccatcaatgtcatcaaggaagactcctactaccaatggcaaggcaagaagacctctgctcaatactacgtcaacaacgctggtgtttctgtagaggacggttgtatctggggtaccgatggctccggtgtcggtaactgggccccagtcgtcttgggtgctggttacaccaacggtatcacttacttgtccatcattcctaacccaaacaacaaagaagctccaaacttcaacgtcaagatcgaagccacctccggttctaccatcaacggtgcttgttcttacgaaaacggtgtgtacactggttctggctctgacggttgtaccgtttctgtcacctccggttctgccaactttgtcttctactaa

SEQ ID NO: 4641 - DNA, 588 bp, Saccharomyces pastorianus
atgtcgaacaaccatcacacgtttcaggggaaaagaaacaaactgtcagtgtgggtgaaaaaaattatcaacacaaccacaacgaccaatgcatcggtcacgagcaataaaccaagtcggatcggggctggccctacaagagccaagcacgcacagttggacccggatgccaccactatcagttcgtctctccgacccatgatcgaccagggctcgttgcactcaagcgaatcagacgatgaggggccgcaaagagtagtatgggacaagccaccggcaggacgagcgaagcagcagcaacaacaacaacaacagcagcagcagcaacagcagcaacagcaacagcagcaacagcaacagcacgacaacgcaagcgtcataccgctggtttcgttctgctcctcttcggtaaagtcgtccactttctcggatatccattcgatacagtccactaggcccaccatattctccggcaggacccttgagacgaactctagtgtgctggccatcccgccgcagagcattctggaccggtctagagctctcccgtcgtccaacgcaagcatcaccacgacaagaagaccgtga

SEQ ID NO: 4642 - DNA, 1389 bp, Saccharomyces pastorianus
atgccattacccagcgcgcaaggaaaattttttaagcctttatatagcaagagtcaagaatggttatttgggatcaaatgcggtggatcaacactggaagagcaggggaccaagagcatcagcatgtcagaccctatcagaacgaaacctaagtcgtcgatgaagatcgacaacgcccccacgccccacaacacgccagcgtcggtgctgaacccgagctacctgaagaacgggaacccggtgagagcccaggctcaggctcaggcccaagagcaggagcaggagcagcacgccaagatcggcaccatcagcgaggaggatatcctggccaaccagccgctgttgttgcagtccatccaggacagactaggctcgctggtgggccaagacagcgggtacgtaggagcgctacccaggaacgtcaaggagaagctgctgggcctgaagacgctgcagagcgagctgtttgaagtggagaaggagttccaggtcgagatgttcgagctggagaacaagtttttgcagaagtacaagcccatctgggagcgccggtccaggatcatctctgggcaggagcagcctgggcccgagcagatagccaagggtgcggagattgtggagtcgctgaacgagaccgagttgcaactggacgacgaggacgaggacgagggtgagcaggtcaagggcatcccctccttctggctgaccgcgctggcaaacttgcccattgtttgcgacaccatcacagaccgcgatgcggaggtcctggagtatgtgcaggacatcggcctggagtacctgaccgacggcaggccaggtttccagctggtgttccagtttgactcggccgccaacccgttcttctccaacagcacgctgcgcaagacatacttctaccagaaggagctgggctactccggcgacttcatctacgaccacgctgagggttgcgagattgcctggaaggacaacgcccacaacgtcaccgtggacctggagatgcgcaagcagagaaacaagtccaccaagcaggtgcgcaccatcgagaagatcacccccatcgagtccttcttcaacttcttcgacccacccaaggtcctgcacgaggatcaggacgaggagctggaagacgacctcgaagagcgtctggccctggactactccatcggtgaacagctcaaggacaagctggtccccagagccgtggactggttcacgggcgccgcccttgaattcgagttcgacgaagaagatgacgacgaagaagacgaagacgacgaagacgaagacgatgatgataacgacgacgacgacgacgtggggtccgccgaggagcaggatgactttgcgggcaagccggagcaggccccagagtgcaagcagtcgtga

SEQ ID NO: 4643 - DNA, 1224 bp, Saccharomyces pastorianus
atggcttctattactactgaaataataagcgagatcagcgctgtcaatgacaacgtcaatgttgagatggcagcaacctcgggcagcaagcatctcttggcagatcccggtaaccacccagcagaacatttcaagaatcgaatgtcacggttaaggttccagtcgcgggaatacctcaccaaattcacaaacaatcaatcaaatttcttatattcattacaaaaaaggcatagaacaccgcttagagatatttatttcaagtacacgtcgttcatgggtgctcatactttctacgtcatcgcattgcccatgcccgtgtggtttgggtatttcgatgtaactcaagacatgatctacatccttggttactcaatctacttgagcgggtacttgaaggactactggtgcctaccaagaccaagagctccaccagtggaaagaattgcgcggagtaagtccactacgaaggaatatggggcgcccagctcacattctgccaatgctaccggagtgagtcttctgttcttttggaaaatatgtatggctgaaacactaacgtggccaatgagattattttttttgagtccggtggttctttactacttgactctggtctttggtagggtgtattgcggcatgcatggaacgttagatttgtttagcggtgcctctgttggggctatctgtttcattattagaattggatcgggttatgttttccggaatttccatagtggtgaacacttctggttccccttcttgagtgtagcatgggggcttttcatcctgttcaatcacgttaggcccgttgacgaatgtccttgttttgaagatagcgtagcatttattggtgttgtgggcgggttggaatttagcgattggctaatccagagatacggattgaacctggtatgcagtagatacacagtgtacggcctcaaagtgtttttaagacctcttgtgggtgtcgcctccgtgctcatttggaaagatgtcattagcaagacactagtttatacgctgctaatcaaactactaaaattccgcgatgacagaggtgaaaaggcccatttgcataacaagaacagggaagacgtcgagtgttctctgtacattggtgttcctaagatagaaatcttcgggagatacatcatatatgcaggtatacccgctaccgtcattttattgtgtccaatttttttcacttgggccaacctggggtga

SEQ ID NO: 4644 - DNA, 12342 bp, Saccharomyces pastorianus
atgtattggtggtctctagcgaggaattggaacgcacaacaacacacacacactcaggcaatgccggaaaatgaggaaggacttgctaatgagctgataaggtttatcgcaaccaccgtggcaggcataaagagtctcactaaagaagatgagcaaaggctcaataattgtcttcatggtcaacatcgtgaacgttttagatcgtttcttggcttaatggatgggcaagagcatagcactctttttgtccttcttttcgaagagttggatagaatattagttactattgactttgatgaagagatggtagaaaataataattgggcagatgagaaatactctacattattgatcgtcaagtccaaaaacgaaattgtggatgcggagccgataacaacgcaagtaaacgtgatatacatgcccggtcccgtaaacacaggaaacttagcttcgattgttactcatggtgtatcgtctgtattcggccagttggtgaagtccgatgcaaagtcatattctgtcgaaaccatagataaaaccaggaggaaactagatgacatatctaagcaatttcagcagcttcataattcaattgaaactccagaccttttggaaatggttcctaatagtatcaaagatgctgtttcgaaaggtgctacttcacatgactatgcaaactatttttccagcaatgaaccgaacgatataaaaattttaaattctttgcaaagcatagcaaacaaatgggtcttagtcatcaaacaaacattagccattgacagagatataaaagatggttcagttttaaatgagctagagttttggtcgaatttgcacgaggtattgaaatcgcttatccaacaaacgcaaaatcaagaatttcaaatatgtctatctattttaaccagcgcaaaaagatttcataacttaacaaacatgctaaatgaaggcaccctttcagaaaaactaaaacaagtagatagatacgaccagtttttatcatcaatcccaatcgatgaagttcatcggtcgactagcattgaacacctacgtgaattatttgtcaatttggcatctatattgaaaaggtttagatactcgaactatccagttccaagatttattattctgatggacaaagtctcccaagaagttatagatgcattactaaacagcctctcaaatatctttaagttggattatggttcttttttggccctgtataaaaattcaatccataccatagaagaatgggatttcattgtgcaagatatcaatcttttgattagagaggatctcaggaagaacgcaccgcatgaattactatcacgaaaactgatattcacaagcgaacccgtaaaagacattttaaatcaaattttaacgacacgtaacagatttttttcattagccgaaacgttaaaggctatatcctcctctacttatcatgacgaaatacagaaactgtacgaaccatttcaacagatagacgatatttctacaaatttcaaagtgaaattagaacaatccgagcgtcaatatagtaaaagcatgtttgatttggagacaaagttgcaaagcttgctagcaaatgttgttgattccaggcgcaggccaattgaaaaattaagccatctggttaaattcaagccattgatggaattttgccctcgaataaaagtaaaagtacaagagaatcagcagatattgttaactgagataaaaaaagaaatactgcaattagaagttggattaaacgctttgcctgaaatattgcaactggaagaattgaataatattcctcccatatctgcaaaaatatcttactacttaagagtccaatcccatattgacaaaatagtccaatatctggaagttctctttggttctagttggagtgatacactagaaggacgtttgatatctgcgtcgatactgcaactgagaaaggacacgaatcctcaagaggtttttttgcagtggttgaataacttccctgaacaaataacgacaaaccttttgattatgcctgttttgaaactgataagaaatagcaaggatagttatgaattaaaagtaaatttcgattttgtcttagctgctgcttataaagagttgaggaatttaacctacatggagtttcaagtgcctagccatgtggcgcgtattgcgagagcttatatgagcttatattcacgagcaatcaccctagttgaacttattcaaacgtttttttcagtcaataaatcactttcggaaaatctttatacaaacgtttttttgaagaagagagttcaaaccgtatggacgttattgcaacagttcttggaaacatcgtgggaatcgttacacgaggttggttcgactaatcaggaaacatcatgctcccctcacagcctggacgcattagaaaaagtgatcggcgatgttatttttgattaccaaatcttaaaaaattcagaagctcagtttgccaaggaattctctcttctgaatcattttgaaggcactgctagcgagttctataaattggaaaaggtaataggtaatattcaggccatttttgaagatttttctgccaagggtcttgctggcgtaagtaagtatatccctgggtttaatgatttgattattaacatactactggaaaaggcgtctataaacgtaaagagtcttcgtttccctaagcacacatttaagcttaaattcgacaagggtaaaataacaccatcaccgtccttaaatgaaataaagggatctctactgaaagatattgagattcttttgaggacagttactcaaattgagttgctgcatgattcgggaaatcctgtttcaacgaccttgacatttgatgcagttgtgatcaagctggaaggtgatattaaaaaatctttgaacgagattcaagctttgtatcttaaaatcaatgcatacgtcaaagaatggcaaaaaatgggcttcctttggaaaattacggagcaaagtcttttggagacaatcgataacagcactcaaaaatgtcttgatatcttaacggggcttcttgattccaagtccagctttgatcaacttttgagtcgaaatatctttgcgacaaatttcgagatccaaacccaagaaacacatagttgtatccgctcaaaaatcaacatttgggtctcatttgtcagcgaacatcttttgaaactatatgaccacgatgctaggcaattagatgaagatatgaatagggatagagaggctctggaagagatggacataaatttttcttctttaaaaaatataaccataataattgaggctgtcattatgaacaaaaggcgcgccattgaacgagaagcacaaattaagctactgagatcggtcacaaggacacttacgaaacttagagtggaatttccgccaaaatttgtttacatagagcagcttgacattgattttggtacgctaagagaatgtttgggtcgtgtggaacaagagatgcaaaaacaccgcgtgttgattgctcaacggttggagcaagaagtcgaaaacattgatgagctatcgcggtctctgaatgaaagttggtcagttaggaaacccgtatctccaacattaactcctcctgaagcgcttgaaatcttgggcttgttcaataaatcactgtacacattgaagacaagagtggattgtgttacagatgccgcaaagatgctacttattcctgttattttaaaggatcaactagtacggactgtggatgaggttaaacaatatacgctagtttggaaaagtattgaggatctttggaaaaatttacaaaaaactgttgaaacaccgtggtgcaggatagatatactgtcgcttcaaccacagctaactgatcttcttcaaagcgcgaatgagcttcccagagttgtcaaacaatttgaaatattcaagtcgttgttttcgcaaattaacattcttagttctgtaaatggggttttaattgaattaaaggacccggctttaaagcctaggcattggaacatgatatttcgtgatatcggcaaaaggcaaatgcaaaagaatttagttgatagattcgaattccctctcaaagatgttatgctgctaaatttgacgctaaatgaggtattggttacaaaaattatacaaagagcacaaaaggaatttgtaatagaaaaatcgctgaacaggatcaaaactttttggaaagaggctcagtatgacgtaagagaacatccgagtggaatcaaacttgtgggtgagtgggatgtactagaacaagcttgtagagaagatttggaggagttaatatctatgagaacttcaaactactacaagatttttgagcaagattgtttggatttcgaatctaaactaacaaaattgtctgaaattcaggtaaattggattgaagttcaattttactggttggatttgtatggaatccttggtaaaaatgcggacattcaaaacttcctcccccttgagacctctaaattcaacagtttgaccaatgagtataagataatgactacgagagcgtttcaacttgacacaacaattgaagtaatacatatcccaaatttcaacacaacattaaaattgacaattgattctttaaagatgattaaatcgtcgctatcaaactttttagaacagcaaagaaggaaattcccaaggttttactttctgggtaatgatgatcttttgaaaatcataggatctggaaagcactacgatcatgtttcgaaatttatgaagaaaatgtatgggagtattgactctatagttcattctggggattgcataactggtgtgagatcgctagagggagaagtactagatttgaatcaaaaaatcaagctgcccaactcggttcaagctcaagagtggttaagtagcttggacacagaaatcaagttaagtgtctttagtcagtttaaagagtgtttgaacgaattcagaaatggtgttgatatggaagctattatgcccaattatatatttcaagcaattcttctcgcagctcaagttacatggacagaacagattgaaaagtgttttcaaactaatgagttctcaaaatacaaggaaaagaccaggaagaaaattaaagaattattggataagttaggcaactcttccaaaaatacgagaaagaaaattgaatctttactggttgaatatttgcattttgataatactatagatgagctcaaaaagtgttcttctgccgaagaagcgcaattattgtgggcaaaggtccaaaagttttatcaaaaaaaggatgctcaggatgattttgattcgatttccatatctcaaagtaactataccttacagtataggtttgagtatattggaattccagaaagattaatttatacaccattacttctcaacgggtttgccgcacttacagattctttgaatcagaagtatggtgggtgcttctttggtcccgctgggacaggtaaaacagaaacagtaaaagcatttggccagaatctcggccgtatggtggttgtctttaattgtgatgactcattcgattatcagattatttctaggctactggtaggtattacacaaataggcgcatggggatgtttcgatgaattcaataggctggatgagaaagttttaagtgctgtatctgccaatattcaagaaatacaaaattctttacaagtcgggaaggtctatactgcacttttagaagaagaaacgccgttaagtacgcatacagcagtatttattactttaaatcctggatataatggaaggtcagaactaccagaaaatttgaaaaagaatttcagagaattttctatgaaatcgccccaaagtaatactatcgcagaaagcatattgcaaattttggggtttgaagacgctaaatcactggcatcgaaaatagttcgatttcttgccctgttggcctcaaaatgtagtccaatgaagcattatcattttggtttgaggacactaaaaagtgtactgagaaattgcagccctttgagtgaggaattcggtaaacaggaaagaacattagtggaaagcttaagaagagcgattttgccatcattaaacgatgccgatgaatctgtatttaacgaaggattattggaagtatttggctctactggagaagtcttggaatcggaggcttttgttcgatgctggaaagatatttgtcaaaagaacaatctttcaatatctgaggagttttcaaaaaaatgtttgcagtttttttatatgcagcaaacacaacaggctctgatatttgtgggtaacgcaggctgtggtaaaacggcaacgtggaggacggttattgataccatggccagttttgatggtcgtgctaatattgtacatgtcattgacacaaaagtcctcgcaaaggaatccatatatggtagtatggttaaagcaaccctagaatggcgagatggactttttacttcgattctacgaagggtgaacgatgatcccacaggaactttcaaggactcgagcgtttggatcgtttttgatagcgatttggatccagaatatgtggaagccatgaactctgtacttgatgacaataaaattctgacgctaccaaacggcgaaagacttcccatcccttcgaaccttcatattatatttgaaacagacaatctcgatcatgctacgcctgcgaccataactcgatgcggtttactatggtttccatttgacgtatgttctatatctctcaagatgaattgtttgctcagtagaggctttgaagtacttgataataaaatatccatgttggggctcgataaagtaagggctgcaatctcagatgcttttaatatgggttctctagccagcctttttacaagcgtagataaactagatcatattatggggatcagatctttcaacaaactggaaactgcattgcagttaattgtttattttgtctcgagttataggcaatggctcgataatatcgacgattataagttgaaggacgttgttgttctagtaataaagcagtcattactatattctctagctggtgactcaactaccgtatcccaaacgacttttatacaagatataaacagttattttggatgtaacgatcaggaatcgccggattactccgatgtagttattacaaaggacaatttggattttacttctcttacttcccaggttccttcgattgttttagaggcacatgatgtcatgaagcctgatattataatccctacaattgatacaatcaagcacgaaaaggtgttctatgacctattaaattcagagagagcaattattctttgcggcccccctggatctggtaaaacaatgattatgaatagtacgctccggaagtcatcgcgatttgaagtggttggtattaatttttccaaagataccacaacggaaaatatcctgtcaactttgcaccgtcatacaaactatgttactacatcgaaaggccttactttgctgccaaagtcagatattaaagaattggtactgttttgtgatgagattaatttaccaaaactggataaatatggttctcaaaaggtcacattctttttaaggcagctaatagaaaagggagggttctggaaaacgccagaaaacaaatgggtcactacagagagaatacatatcgttggtgcttgcaatcccccaactgacccgggaagaatttccatgtcggaaaggtttacacgtcatactgctgttctttattttggttatccaagtgagaagtctctatttcaaatttacgaaacttattacaaggccatttttaagttagcgccggagttcaaagtatatgctgaggccttcgcttgtgcttcagttcatttatattacgaatgcaaaacttattacagcactgaccttcaatctcactacattttttcgcctagagaactgacacgtttagttagaggtgtatacgtagcaattaataatgggccaagacaatctatgagatcattattaagattgtgggcatatgaggcctggagaatttttgctgataggctggtttcaatagaggagaaaaacagctttgaagaaattctctacaaaacagtcagtgaattttttcccagccaaaatttgggtaatatagcttcaccttctcttctcttttcgggtttattaagccttgatttcaaagaggtcaaaaaattagaccttgtaaacttcattgaagaacggttcaaaacattttgcgatgaagaactagaagtgtcaatgattatacacgagtctatgattgaccacattttgcgtattgatcgtgcgttgaggcaagtacaaggtcacatgatgttgatcggggccagtaggacaggtaaaactacattaacaagatttgttgcatggttaaatggtttaaaaactgttcaaccaaagatccatcgtcactccactctcgatgattttgacattactctgaaaaaagctctactagattgttcaattagagaaactcgtacttgtttgattattgatgaatccaacgttctggaaacggcgttcttggaaagaatgaatacgttgcttgcaaatgctgatgtacctgacctgttccaaggtgaggaatatgacaaactgttgaacaacctacggaacaaaacaagagctcttggtcttctattggatacagaacaagagctctatagctggtttgtgagagaggttgctaaaaatcttcacgtggtttttacaatttgtgatcctaatgacaacaagtcttccgcaatgataagttcaccggctctgttcaatcgttgtatcattaattggatgggtgattgggacgtgaatacaatgtcccaggtggccagtgttatagtggaacgtataccaatggaatttacggactatgaaacacctaaggtcaataacgagttgatgtctaaaaaaccataccaaactgtaagagatgttgttatcgatattttagtacgttttgacggtaacttttataaagataccaaagcttacccacgatcgcctgggtattttttggacggtttacgtgctcttgagaattttgttctatcaagatatcaagagttgaaggaaaaccaaagatttgttaatgttggcctcgaaaaattaaatgaatccgttttgaaagtgaatgaattaaataaaatcttgtcaaagaagaagattgaacttacagaaaaggaaaaggaggctaggaagacattggataatatgttaatggagcagaatgaaacagagagaaaacaggaagctacagaggaaattaaaaagatactaaaagtccaagaagagaatataaggaaaagaaaagaagttgtcatgaagagtgtccaggagatagagcctaccgttctcgaggcgcaacgtggcgtaaagaatatcaaaaagcagcaattgacagaaataagatcaatgcagaatcctcctttcggtgtaaaaattgctatggaggctgtttgtgccatacttggttatcagttttacaattggagagatattcaacagtttatcaggaaggatgacttcattcacaatatagtacattacgacacaaaccttcatatgaatcctcaaattcgaaagtacatggaagaggaatttttggcagaccctaaattcacttatgaaatggtgaatagggccagtaaggcgtgtgggccattatatcaatgggttaaagctcaaataaactttagtaaagttttacataacatagatcctctgagagaagaaatgaagaggatagagtttgaatcactgaaaacaaaagccaatttgcttgctgctgaagaaatgacacaggatctggaagctagtatcgaggtatcgaagcaaaaatacagcttgttaattagagatgttgaagccataaaaactgagatgagcaaagtgcaaactagtctcgacaggtccacatctctggttgaaagtttaacttttgaaaaagagagatggttaaatagtacaaaagaattcaagaagacgagtcaagaactgattggcaactgtgtgatttcgtctatctatgaaacctattttggacacttaaatgagaaggaaagatttgacatgctgagcgatctaaaacatttattgaacatctgtggcgtcaaatacgatttgaattatcgattcatcgattatctggtaccgctagatgaaaaaatgaagtggattgaatgtgggttaaataagaacgattactttttggaaaatatgagcattatcatgaattcaaagaacacagtgccatttcttttggaccctagctcgcaaatactgacagttatttccaattattatggcagtaagacagtgattctcagtttccttgaagaagggttcgttaagaggctagaaaatgcaattagatttggaagtgtagttataatccaagatggagaattctttgatccgattatatcgaggctaatttctaaggaattcaatcacgccggaaataggattaccgtagaaatcggtgatcatgaagtagatgtttctaacgactttaaattatttatccattcttgtgaccctagtgctgctattccaatatttctcaggtctagagtaaggttaattgattttgtcacaaataaggaaagcatagaaacgagagtttttgacatcacgctgatagaagaaaatgaagaaatgcaaaaacaaagggaagagctgataaaattgaatagtgagtataaaatgaagctgaaagatctggaaaggcagctattggaggagttgagtaattcacaggggaatatgttagaaaatgacgagttgatgataaccttgaaccatctgaaaaaagaagctataaacattgaaaagaaattgcgtgaatcagaagcatttatgcctcagttcgataatctggtagagaaatactctatcataggtaaacatagtgtcagattattttccatgttggagaaatttagtcagttccattggttttacaatattgccatagcgcagtttttatcgtgttttagacgtgtctttgacaaaaagaacagcaaaacaagggcaagtgggacgagagtggatgaaattctctggacattataccaagaagtatacagccagttttctaccactcttgacaaaaaatataagatgattatggcaatgacgatgttttgtatgtacaaatttgataatgaaagtgaagaatataaggaagcggttctagccatgattggaatgctttctggagatgggagtagtgtagaagaattgagtatgaatattaatgatgatttgaatccattattacagtacatcaccaccaaatcgtatatatctgcagtacactggtttagaaatgaacttttcgtccaagaatgggatatcatggatgtagtaacaaagtcgagaactaattatttcactatggcaagcgagagagacgttgacggcacgtttaaggtagtggaattggcgaaggcctcgaatcaactgttgaagatcatccctctgggctccatcgaaaatattaactacgcacaagaagagatatcaaggtgtagaatacaaggtggttggctacttttacaaaacgttcaaatgtcgatgtcttgggtgaaaacgtatttgtacaagcacattgaagaaacacaatcaacagacgagcaagagacgtttaaagtattcgtgtcatgccatttatccggtgagaagctaccacctccattattacaaaagaccgataggttcgtatacgaggagattccagggatattggatacggtcaaagacttatgggggactcatacctcgacggataaatctggaggagcatggagcgcatattgtatgttcctattgtcatggttccatgctttgatcactgccagaacccgactggtgccccatgggttttctaagaaatactatttcaacgattgcgacttccaattcgcgctggtctatttaaaaaacatgcttgcgaccactccggccaacaatgtgccctggacgcaagtgcaggaccacatcgctacgatcgtatacggaggaaagatcgatgaagaggaagacctccaagtggtccggaagctttgttcccacatattccgcagcacggacgatctgcagatcgttcctggggtacgaatcacacagcctcttctacacgaaagcgatgaagaagaacgggcaatactcaccaccatactgcgtgatacagtcgagcctgcagattcactaagctcgtggctccaactgcaaagggactcgattctggactacgaacgtatccaggcgaaagcagtggccggctcgacaatacagcttcttcgagacatatag

SEQ ID NO: 4645 - DNA, 1815 bp, Saccharomyces pastorianus
atgcttcgtttctggatctcacaaaaacccatattcagacctagctattgtcttcgcggaattttcatcaagaaccattgccgtacaccaattacgaagatgactgaaactactacaaaagcaacatcaacagtgcagcagcagactgctgacaacaaaagactgtcctccgctgttgcggatcctgccaagcaaaagaagaccaaaaaacccaagctgagaaaatacaaagccaagaaggtcgacccaacttcccccatgggtgtcttagaatttgaagtagacgatttgctaaaatcccaaaatttatctagagatgaagtcttgaacgatgtcacggcgattctgaacgatacatctaaaatcgacggccccattactgtgcaataccatcgcatggtaaaaaacgtcaaagtcttggagattacctctaacggcaatggtctagctttgatcgctaatcccgttgaaccagaaaagaaacaagtggtcatcataccctttgggttgccaggcgacctggtaaatatcaaagtttttaagacacacccttactatgtcgagagtgatttgttagacgtggtagaaacatctcctatgagaagagatgatttaatcaaggataaatactttggtaagtcttcaggaagtcagttagaattcttgacctatgatgaccagttgaaattaaagaggaacacgatcatgaacgcctacaaatttttcgcaccgaagctaaactctgaaaagcttttacctcactttggtactaccatagcgtctcctttacaatttggttatagaaccaagattacacctcatttcgatatgccaagaaggaaggcgaaagaactaacagaaagacctcctctagggtttggtcaaaagggcagacctcaatggagaaaagagactttggacgttggtggacatggttcaatattagatatagatgagtgcgttctcgccacagaggttttaaacaaaggattaactaacgagagaagaaagtttgaaaaagaatttaatagttataagaaaggcgccactattttactaagagaaaacaccactattttggatccctcgaaaccaacattggaacagttaacagaagaaggctcccgggatgaaaacggcgacataagctacgttgaggtcgaggataaagagcacaacgtcaagttagccaagacatgtgtcacaaattccagacaaattgtcactgagtatgtagacgggtatactttcaatttcagtgcgggtgaatttttccaaaataataatgccattttacctgtggtgaccaagtatgtccgcgacaatttgcaaattccaaacaaggatggcaaaaacgaaccaagattcctagtggatgcttattgtgggtcaggtcttttcagtatatgtagctccaaaggtgtggataaagtaattggtgtagaaatatctgctgatagtgtttctttcgcagaaaaaaatgcaaaggcaaatgatgtggaaaattgtaggttcatagttggtaaggctgaaaagctttttgaatcaatcgatactcccaatgacagaacctcggtcatcctagacccaccacgcaaaggctgcgacgagttgtttttgaagcagctagccgcatataatccagccaagatagtctacatttcatgtaacgttcattctcaagcacgcgatgtcgaatatttcctgaaagaaacagaaaacggatcatcttataagatagaaagcattagagggtttgacttctttccacaaacacatcatgttgaaagtgtgtgtgtgatgacgagagtttaa

SEQ ID NO: 4646 - DNA, 1680 bp, Saccharomyces pastorianus
atgtgtagaaaactagccattgtcacactactgtactccgcggattatttaccgggcgtgtttgctcttggtcatcaagttaacaaactgttaaaggaagcgggtaggaaagatagaattgatgcatgccttgttgtgacaactcccttattcaatgacattttgagcgatttggccaaagatcttttgaaaacaatatacgacgatatcgtacttgtaaaccctttggaatgccaagatgaaagtattcagagaaacagtgaaaatctagctcttttggaaaggcccgaattgtcgtttgctctaataaaggcaagactatgggaactaacccagtacgaacaagttctatatttggattcagacactttacccctgaaaaaagactttctaagattgttcgacattatgtctaaacaaactaagttacagattggtgctgttgctgacattggctggccagatattttcaatagcggcgttatgatgctgataccagatgctgatactgcatctgttttacagaactatgttatcgaaaatacttcaattgatggtgctgatcagggcattttgaatcagttttttaaccaaaactgctgcacggatgagctgctcaaagaaagctttccccgagagtgggtacagttatcatttacatataatgtgaccacccctaatcttggttatgaatcttcacctgctatgaattattttaaaccaactatcaaactgattcatttcattggccaacataaaccatggtctctgtggtctcagacaaactttgttagaaacgaatacaatacccaatggaatggagtgtacgaggactttaagcaggaaaacaaattggtagatgacgtctcgaagattgatatcagtgattttaatgaggacaataatgttcaaacagcatctcaagaaactattccgcaaacagcatcttcaggggctattcctcaagataatgatttttctactgaaaaggaagtcgaaacaatagacacaaagcaagaagacaccagagtccagctcaataagccagctcccgttcctgttccactgaatttcactgaatggttgacaactttcataaacaaggataatgtgaattcccaggcaatgaacaaaatgcacgaacacgaaggaaatgatagtggttttgataaagacgacgctaaatcagatgaagacatctacgtgaataacagcgacgctaaaccagaccaagaaagtattgcggataaaaacgacgctaaatcagatcaagacggccatgtgaataacaatgactctaatccagaccaagagagtcacgcggatgtcacacaagaccctattacttataaagatgacatatcagaggatatagaaccgcctgtgcctaccgaagacgacgtgaaacttctggaacaggatgaggagggttacgatgaattccttctagacgtatgcgatgcagatgcgatcaacaacgaagaaggagaagatttcgatgtaggaaaagtgggaaggagtgttgaagatgcactcgaaaaagagaatccgacagaggacgaacccaaaaattcacctcaagaaatgccgaacttcaggttcgactgggaagattctgattacctatcaaaagttgaaaggtatttccctgatgacgtctttgaatatgcagtagaatga

SEQ ID NO: 4647 - DNA, 2205 bp, Saccharomyces pastorianus
atgtctgctgccgctgccaagtctgttgctcacgtgcctcaggcgtcccgacggtacaagaattcgtacactgggtttgtgtacgatatccatacgtttttttacgatctttccgtgttccttttcaacatcctattcacaatcttcttcagggaagttaaggtgcgtggtgcgtacaacgttcccgaggtaggggtgcccaccatccttgtgtgcgcccctcacgctaatcagttcatcgaccctgctctggtcatgttccagacacggcagctgaggacgtccgcgggcgagtcccggtccagaatgccgtgctttattacagctgagtccagtttcaagaaacggttcatttctctttttggtcatgctatgggcggtatccccgtgcccagaatccaggataatttgaaacccgtggacgagaacctggaaatctacgctccagacttgaagaaccacccggaaatcatcaagggccgctccaggaacccgcagaccaccccggtcaactttacaaaacggtttactgccaagtctcttcttgggttgccaaactacttgagtaacgctcagatcaaggagattccggacgatgaaaccataatcttgtccgccccctttaaaacctcaaaggcaaaggccgtggagctcttgaacaacggaaccactttcaagtacgccgagaaaatagacaacacggagacctttcaaagcgtctttgaccatttacatactaagggctgtgtggggattttccccgagggcggttcgcatgatcgtccttccttgctacccatcaaggcgggcgtcgccatcatggccttgggcgctgttgccgccgaccctagcatgaaagtagctgtcgtgccttgtggcttgcactacttccatagaaataagttcaggtctagagccgtcttagagtacggcgaaccgatcattgtggacactaaatatgggcagatgtataaggattccccccgtgaaaccgtctccaagctgttaaaaaaaatcacgaactctttgttctccgtcactgagaacgcgccggattacgacactttgatggtcattcaggctgcaagaaggctgtaccagccgctgaaagtcaagctgccactgcccgctattgtggagatcaacagaagattgctttacggttattcgaaattcaaggatgatccaagaattattcatctgaaaaaattggttcacgactacaacaagaagctggatttggtcggtctgaaagatcaccaagtaatgcaattgaaaaccaccaaatgggaagccttgagatgttttgtgactcttgtcaccagactgatcaaactctctgttttcgccatactgtccttaccaggttctattctcttcactccaattttcatcatttgtcatgtttattctgaaaaaaaggccaaagagggtttaaagaaatcactggtcaagatcaaaggtaccgacttgctcgccacttggaagcttattgtggccctagtgttggccccgattctttatgtcacctactcgatcttactgatgattctggcaaagaggcaacactactttcgcatctgggtcccaaataacccgtttttacaattcgtttacttttacgcattactggttttcaccacttattcctctttgaagacaggcgagatcggtatggaccttttcaaatccttaagaccacttttcgtttccattgtttatccaggtaagaagattgaggaaatccaaactacaaggaaaaacctaagtcttgaattgacagctatttgtaacgatttggggccattagttttcccagattacgacaaattggccacagagatcttttccaagagagatggttacgacgtctcttccgacgtagagtcgagttctagtcacttgagtggtcaaactagaagtcgttcgtcctccgtgcattctatcggctctcaattctccaatgcgctatcaagagtgaattcaagaggctcgttgactgatatccccattttttctgacgcaagacaaggtcagtggaagagtgagggggaaactagtgaagacgaaggcgtgattgacgagaagacggctgagactacgcagaattcggatctcaacaaagaaaatggtcggaatgtagacatctcttccagaattgcttcattagtgagacaaaaacgagaacacgaaaagaaagagtaa

SEQ ID NO: 4648 - DNA, 648 bp, Saccharomyces pastorianus
atggctcaagtcgtagagcttcccccacacattcaactttggatagatcaagatgaatgggatgcatggaaacagcggactgaccccgtacttcatatagagttacgccgttgggcggacatactagtagtagctccgttaaccgcgaacaccttatcgaagattgctctggggctttgcgacaatcttctaacaagtgtcatcagagcttggaatccaagtttcccaattcttttggcgccttccatggtaagtagtaccttcaattctatgatgacgaaaaaacagttgcaaacaataaaggaggaaatgtcttgggttactgttttcaagccctctgaaaaagttatggatataaatggcgatattggacttggtggtatgatggattggaacgaaattgttaacaagattgttatgaaattgggaggatatccaaaggataacgaagaagatgacgaagatgaagacgatgaagaggaagaagaagaagagactgaagacaataagaacgaaaagaacaatgatgaagatgatgatgacgacgacgacgacgatgatgatgacgacgacgacgacgacgacgacgatgaagaagaagaagatgaagacgaggtagaaactccagttttagcagataagcattaa

SEQ ID NO: 4649 - DNA, 879 bp, Saccharomyces pastorianus
atgaccgccatcgcttctactaatgggaagcacgacccggatcatgcaagcaaccaacctatagagtgcccaagattttcccgtggacagaaggaaattgtgcttgaccacgaatatatcaaagggaaggactcgatagttaactctcccgtctcgggaagacagtctgtgagccctacgttgtcgaatgctaccgcaactactacaaaatccatcatgaacgccataggaacttcaggtgctgtggtaagtaatactccggaacctggtttgaaaagggttcccgctgtaactttcagtgatctgaaacaacaacaaaagcaggacagcctgactcaactaaaaattgaatcagaaaaggctaaaactccgaacaacggctcggtatccactccggcctccgtcgtcggcagcaccgcagctataccgaacagcagtgccactccgagaacagtacaggtacctggttccccgcttgttaacgaaatgaaagatcctacacctaagctggatagtactattagtatacttgaccctattaagcctgacaaaatcgccgcctcgtcgacgccgataaacaaggaaagcgatgaagttaccgctataacccccactcataccacagtttcaaacgaagattcaataagtaacatttcgatgcaaactcatgcacgatctacccctgaagatactccagtaaagcaatcagtcattccttccattattcccaagagagaaaattccaagaacctagaccccaggttgcctcaagacgatgggaaattgcacgtactctttggtgccacaggttcattatccgtatttaagatcaaaccaatgataaaaaaattagaagaaattacggtcgtgataagataa

SEQ ID NO: 4650 - DNA, 96 bp, Saccharomyces pastorianus
atgttagtcaaatccggaccatacagcacggttacgtcggtttccttgttccagttgatagagagcgggtctgacttggagttctgcaaaccgtaa

SEQ ID NO: 4651 - DNA, 1746 bp, Saccharomyces pastorianus
atggagaaggaaaaggcatcccatgcgagccccagtattggagtcaacgaatttgtcgtccaaggggaaatatctatagatgattccgaaagatcggtcaagagtgatagcatcagcataagtcaggatgaagatgacaagacagacactcaagataatactagcatactgtccgcaaaaccattctcacaaacagatttagcaattgacgatacgctattaggtaaaaacccaaaatatgagaaactcttcactgaaaagaggaaacgtcgaagaccgcccaccacaagcagcagaaactcaatgaactcggaggacagcgaacaaaagaatcacatgagtggaaaactttaccacattaaaatcttactaggctcggatctaaactcgttaagggattcgttatggataataaagatttctacagaacagaacatcgaaaaaactatagcaagaagttttgctgatttctactggttgtaccaccaattacaaaacaatcattggggaagagttatccctccaccaactaggtccaatatccttgtggagaaggatgagtttgccataaaccatcttttcatgatacgtaataatgaaaagtatgatccaattttcaacttcaggccggaatatatcatatcattacaactgatgaggatgataaagcacatattcaacgataatgtcttacgtttggattctaactttatagattttctcaattgggatgatgctattcctgcagattcacagatgattgttgatgatagcatccttaagggtgataaagtactaacagcatcgtctcaattccgcgaactaaaagagtttcaaaagcaatcaaaaagaaccgaatcaatgacaaattcccacgcttccatcataccaatgacagcgctcactgaagtttacataagccctacgaaattattctctagaaaagattatcaacgacttttccaacctcaaagtaccgacaacaatgtcagtaacaatgacccattgattcaagagtggattcccaagagtaagtctttattcaccagcttatcatttgggtcaagtacgcccgcataccaagaaacatccgctggaatccaagcgtgtcatgactggataactttatgcaaggagcggtggagacagttactgtaccatgtgttagaatacatcgtggatgaaacagtaaaggaaaattctgtaataaatgaattcactgattgtcttaagcagatgtcctcggaagaactcattagagcaaactctgaattattttcaaatttttccgcactaaatgaatcctttctgcaaaattttaaacgtgcttcacagcaagatattttgagacttgtaatattgttcgatgaaaatgtaagattttgcgaatcgtttgaatctatcttaaatcaaagattgaaattaggtagaattctaagcattatcgaaacggatctagaaaaaaaaaaaagttatcttgacaagttatctcataataatgacaaggaccctaaagtccgtatagcagaagacgaattccgtattgtatcaaaaaggtacagccatgtcaagcaaaactgggatgaaatcatggaaaaaattataaatgaacgaaaattctttgaggagagacaagctatcgaaattgacaattgcttcaaatcgataaaggattcaaacacggatgagaaaaggaagtacttgcaattatggaaggattttaaattgaacgaaaaaagagattaa

SEQ ID NO: 4652 - DNA, 1038 bp, Saccharomyces pastorianus
atgctgcgtaatatcaccaagttaaaaggacttggaaatagagttcatggacaatctctgaagccaccattatcccgggttcagttaacacgaagttactactccagtaatggatcttcatatcgtcgatttaataacgacgactattccaaaaaatcatcttttaaagagcttatcctcgataagtcatcaagaaaatacttggccttattttttggtggatgttccctgttttatttcacacatctcgataaagcaccagttagcgataggtcccgatttatttgggtttcacgcccattggagttgaccatcggaaactatacatacaaatcaatctggagacagactcagcaggaaattctacctccacagtacccgttaaccgttaagattgagaatatatttaagaagattgttaaagctgcttataaagaccccagtgtggataactctttgttagacggaataaaatgggaaatacatgtggtcaacgattcaactgcctcaccaaacgcatttgtgctgccgggtggtaaagtgtttatattcagctctattttgcctatctgcgccaatgaagatgggatcgccaccgtattatcacatgaatttgcacatcagctggcaagacacacagctgagaacttatcgaaagctccaatatattctatattagggttagtattatacactgttactggagcaaatgttttcaataacttgctattagatgggttcttgcgaatgccagcatcaagacaaatggagactgaagccgactatattggcctgatgattatgtcaagggcatgtttccaaccacaggaatctataaaagtgtgggagagaatggcaaactttgaaagaaatctgaacagaggaaatgctgtgaatatggagtttctaagtacacacccggccagtgttcgcagaatagaaaacatgacgaaatggttgccaaaggctaatgaaatatatgagcagtcggattgtagcagtataggtaattactataagagctttttcgccatgtaa

SEQ ID NO: 4653 - DNA, 789 bp, Saccharomyces pastorianus
atgttccttaaaacgcctagttgggaaacggtcaatgagacacccaaatcaagagttctgacgataaacgagctaatctcgcccggtttagatacagagtctaaaagaattttggccactcctgcaaggcggtactgtaagacttcggtaactgaattgcaggagtctcctacattcgagcacccatccgaggacgccgaaagccctgcctaccaatacaatccacagtttcactttcacacaccaataacccccagaacgcccaggtttgaacatgcaggaatttttttctctccaacgcctccactgatctctcccacagccgtggctgaggaagacaataacggttccctgggtgagatttcacaaacattgaagacaagactcaactgtgctagggataaggtatcgaaagaacatgaaggccacttttccgcgaagaaaaactcaaattctaccaatgcgtatccagctttgatccctcctcctttaactgaaaagatacgaaagggttcatatagcaacaaatttgcctctaagcatagacgatgttactctttagatgaatctaaaaaatttttaagttctttagaagactcatccgcgcatgaggcgtttctaaaagcaatttcgtctaaacacgccaaaaacgataatgtggagaatgtgaatgcctcgccgttacgttggtcttcgcatcgaagagcgcagagtatacagggcgactctttacatgactttgccaccattgataccttgttgaaaatgtcttcatcaaaagagaattga

SEQ ID NO: 4654 - DNA, 246 bp, Saccharomyces pastorianus
atgtttcaaaacatcagagaactgaaaataccgttcgaaacagaaaagcaggctagtatagccactaaagtgctttctccagacccaattctgaaaccacaggatttccaagcagactacagctccgaaaacaatgtcatgcttgcccggttcagaagcatcgacgatagggtgctacgggtgggcgttagcagtgttattgacagcatcaagaccattatagagaccatggatgaactgtcttag

SEQ ID NO: 4655 - DNA, 1077 bp, Saccharomyces pastorianus
atggcgaatactacgtctgtcgcagtcggttgtgcggtgggtatacccattggtgtgggtattatagtagcagtagtgttttggtttaacctacaaaaaagatataaggaggaagagaagaacgataaagaattggagagagcaatatacgatgaaagtggttttgtatcctttgacaattttggacccttacgagacagtaaagacgatgcaggattaaccagtgcggagttgaaaaatcctgatcacacatcgggttcatcagaaggatctgctcatccagaagagaaaaacgatggtaaatcacaagaactagagcacccgctggccaaaaaaaacagtaaatactatgttccagcatatcgtagaaaaataaatttactgcaagtacgaagtaataactacaataataaagccaagcagaaatctatcgtggatttaccgagtatgaacaacagttccaatgtctcactgtcatcctcccaacagcacataacgaaaagacaaatcagtgtttatgatcagatggtccctgtcattgctgatgaaggagcgaattttttttcagacccttcgagtgataacgctaatatcaataatgtccaaaacaaaccttcagtggtagaacttaaaaataatgctcgccaatctagtaatgagaatctaataaaaaatttacaaaaccaggactttggttcgtattacccaagaagagcttcatcctcgaatttgaatggcaatatatcaaatgcatcgtttcatacaagggattcctccataacatctgtaaacaaagtggatgcactagaggatgtatttgcgacgcccaaaagtggagctttgtcacaattaccaagcacgttcgacaaaaataatgaagagtcagatgattgtcgttcagttaatgacgacaaggtagtcacaacggacaaagacaatggggacttgtataaactgcagaataattacgacatgagcaacattggggaaattgctgaggaagatcaatacgaaaatgaattcactaactattcacagagcaaaagagaattcatagaaagcttaaggcctaaatag

SEQ ID NO: 4656 - DNA, 1956 bp, Saccharomyces pastorianus
atgtttacagtcaactctaaattcgtggtcattgatgggtggctagtggacgttgtagagcgaaaaccggtcaatttcaggagccctgagataaggttgctaataccgaatgatgatgattatgagaaattattaaagcaagacttggtggattggacagaattaaagaaggattcccagtccattcttgtaggggtggattcagtggagttatttaagcatataaaattaagcttgcaagagttttttctcctagacgatgggaaagtagtcctgaagaggattcggagcaaatcgcattacaaagtgatcaagaagtttgctcagagatgctgcaggttatttttgccaaaatggggtacgatatatatctatccgatgatacaagatgaccgggtccggccagatggagttcttcagttttctttagatgttcagcccagtttagaatacccgctaatcgacataaacgtcaacaaccagtacattataatcgagggcttcctaatatacttaaatgaaaggagactctgtaagtggaacgataacaacttgagggattggataggtctaaaaacatggacttatttgagaaggctttacaatccaataagcctcgacatagtttacaacttgaactcgaactattattttgtgaaagatgatcagttctttcaaatcatggggaaaagggccttcgtaaggttctccaatgtggtgggaaacgacacgcgcgataaagtcccgttctatgtttgtgttcgaacaactaccacgaaagctacacatattgcttatattgtaacagatgtaacacaaatttccttcaatgataaaaaagatggtctaaaattcatcgtcagaaaacggccaatcatggaagatgtatattctgacgtgaacatttcagaattggaaaaccagctttttattgaagtgaaggttgtcgaaaatggtttctcaacttacatttttcaattagaaaaccagctcatgaaatttattaatgaagaggagaaaactaattacagggtcggcatgatatctggtgaagttctagatcagattcgcgactttcctgtatcgaaatttactatgtcattaattgccgcaggtgaagacagaaaatatatcgaactacttcaagaactagcaaggaggttagaaaaaatatgcatggaaaagacgttacgctcattggaggagataagagaaaagtttgatcaaaagtctggtatgcaaattggactcgaaatggagtattaccaaagcactgaagaatgtaaaagaaacctcgaagttatcaaagacgacgtcatgctcatgttagtgaagcggctaggcagtagatcggtacatgagtacggcttggtaagagaagagtatatttcacccaggtttttagcagcagatggatttttgatcgatttggcagaagagaagccaataaatccaaaagatccacgtctgttaacgctgctaaaggattttcagcgtgatagtattgcccgactcagtttgattgattgggatgatttcaaaaagtcccaaggtccaattccattacgagctcgaacgttgtttaaacattgcaggaaactaaataaaatttttacacaagatgcggactttaaattaaatttgccgccctcagaagtaaacttgacggatgcacagataacgatatcatatccctgcattcctatatttttggaggacaaaaacgttcggtacctgtatgaagacagctttattcctgggagtagaaccgctacaacaccttcatctgcaacgtttcaattaaattgcgaatggaagaaccgtttacagaatgacaccgaattacaactgcaagaaggcgttaagcgtatgcgacttttaacatcttacgaagaattaagatcgaaatacatatctgcttttgagaaactacgcgctgatgattacatcgactaa

SEQ ID NO: 4657 - DNA, 2529 bp, Saccharomyces pastorianus
atgaaccctgcattacgaaagaacgcaaaaccatcgtttgtttgcttgcgatgtaaacaaagaaagataaaatgcgacaaactttggcctgcatgctcgaaatgtaaggcttcatcatcggtttgcacttatgaaatggaaccaggtaaaacgaacatatctcccccaatcactaataatccgtacggcgacctcacgggtattactccaacatcgatgcccacaggcgcctcttctacatctaccctaacttcaagaaccaaggactggaaaatgaaaaactttgccatgaagctatggaatgtccatgacaagcttgtagtaatgaacaacatcaccattgttgataacccatttgctagtcataacatcattcaacaagatttatttgctaaggctttagccacttgcatacacggtaaaatactgattgatgttgaaaatcatcgtgaaaatgcccttactaacggcaaaagaagagaactgagcttaccaatcaatgatatcggacctttgtttttcgttgataaagccgtactgaagttcgttgatagcgcttccaaaacaactaaattatcgcctccaatagattttctatataacacgtatgactatgaacaaatgaatcctcaagaatgtaacgaaaaattctccataaacattcttttacaagagctttcccaatatctgcttagtagacatgaggttgacactttagtaatggacttttacaagacaatctatccggtatatccgttcttggaaatatcattatttgaagagaacttgaaggaatgcttacagctcaacgacttcaatggctacaacatcgtgctaaccgctaaggactccagaagaaatctggaaacaatcacactgctaaccattatactggccctttctcacagacgcttgactttaacgaccaacagtccctttaaagagtcttcttatgtgaaatcaaatggtttggcattgctcgctcataaatttatttctttgatgaacgtctttcaatacatcaatgaatacacgttttgctgtttactgtattttttcgtattaaggtacttaaatcccgatcaaattgacatgtatcccacccatggtgacttattgaacctaaagttcctcaacgatttggccataaaactaggtttacacgaagaaccctttcaatatacaagatatattagcgaaagggatgattatccaagacttttcaatttaagaagaaaactatggcttggtgtgcagtttttaaagtttcaaatatcaaccccggaaggggattctgatatattgagtttagaatatctgcgctcttttattaaaggtgatgaatcgttacctgaactatttgaaaaaaactaccattttactaataatttagatttatcattgatggctacatcagagaacgtttatcattttcacttgtctttacaagttctattaacttcttgcacccccataaatggcacttcgtatttgaaggaaatattggataacatcaacaatacaaaggattttttaaatcagaaatttccaattattttgaactctttggaagaaccaatactaaaaagcttgcacattagcattccatccttgttcgcaagttctgtaccatttgattttagtacttttgaagaaaacgagacctttatggctaatgttataggctatacttctacaatgaatgtctaccacagcctggcgttgtattttgagaaaaattacttcaaaaacactttagagtatgaaccatattatcaccgtttcacttttaccgctatgcaagattatttgacgttaatgaaattaatttcggaatatttcaacgggaatttggctcatttacgagaaccttatgggtttgttacccagacggttgttcgatgctcaatactgagattatttgcattccaagccactttactcgtaaaattatttttcaagaaagacacatgtagccaaccgtctatagtcatgggaatggagaatgatagaaacggaagagttattcaggttattaagagaatgatcaagctaatgtccttccacatgaaattgttgatcgaaattgttacctcaaaattggaaaacgattatctcggttcatttatatcagtatctatattcagatatatcatgtatttggtggataccgacgcactgtcttcacttatatccgactactggaagaacagcactaatttgaatgaaaagtatcagagaatccataagattgtgggcttgaaatgggggttggggagaaacaagtcgttttctgttgaatcaaagctaagtaatccgcaaaccttagcaagtcttaatttagatatcttagaagacttggaaaaactgatttccgaacatgatttttcgagaagctttagtggcaacgctgatcctttacaaaatgaagtcgatttcatgaattgtgacaatgaagccttaaatcaattgttggcaattgaccttgataggctacttggaatttttcccgacttaaccagcttttaa

SEQ ID NO: 4658 - DNA, 138 bp, Saccharomyces pastorianus
atggtttacgcctcctccaaggatgccttaagaagagctttgaacggtgtctccaccgatgtccaaggtactgacttctctgaagtctcttatgattccgttttggaaagagtcagcagaggtgctggttcccattaa

SEQ ID NO: 4659 - DNA, 537 bp, Saccharomyces pastorianus
atgtccaactcggtcgtcgaatctttggagggtagatgttatcgattagaggcgcttttaggcagcgggtatagcaataattccgatgtttcggtgcaattgagtagattgtacgtccaactgcacgatttatactgtcagggtcaaaagtactctcaaagcctgttgcaactcttggatgtgtttatagctcaaaatacggggagtacaggtactcctgatgatatccgtatattcactagctgttatgatgagatctatagtttatacactaaatttgatcaactgaatgatcaatatgtggagttttgtcaaacacgcgaaaattcattggatcagattacctttaaagatgccaaaatccagacccggtgtctaaaggaattacctggcctggtgaacaattgcaatgtaatgattgtgagatcaatggcaatcttaaatcgttttcttgattggaatatcgaagttaatgaatttttccaacttcaaaagaaaaaattattacatttacaaaagatgattgacaataagtaa

SEQ ID NO: 4660 - DNA, 726 bp, Saccharomyces pastorianus
atggctcccagacgaatcagtaattcaacaatgggcaaaccttctataacaatcacaacagcaaaggctattataaactcggagtatacgcttatcaagtcgcattccaaatataagcttcctacacattttgaaaagctcgatgcaggctctactaagggaagaactacagtagtaaagattttttatcgcagatttgtgaggctgaaaccgtttgtatcgaatgtgaaaatggtcagacagacgtacagcgattatcttcgatataaattcactaaagaagattacgaactcaaacgatacttggtgtttaatcctaacggtttgcaatcaaaaactagccccgagcctatgggcagcacaaaaggtggcgaaaaggtaatgcctatggaagaggtgcaaaaaactttgcaattcattttaaaaagctgttcatatctacccgaaacgaaggagcaaaaatggagtatcgcaagagataatacttattgcaggcaaatcttaaagaatattttaacgatgcaatatgaaaagtataggtcagtcctaaatagaggagtaggccatgatgagcttgatgtcaaattttctcatttaaggacaaaatccagtccgcctaccaaattaaataaaggtgataagaaaaagatcccagttttcaaaatattcagtgatttcgacacaacactcgtacaccttaatgaatcattaggcacaaggttataa

SEQ ID NO: 4661 - DNA, 750 bp, Saccharomyces pastorianus
atgatgaagataagcagcaggaattctgtgctgctggggcaacggttcttctcaacgggaggttcttggcgaggcggtgcgaacggcaccatgactggcatgatgaacaacgtacatcctttcaaattaagatttataccaaagacggcacccacggccacagaggcggcttcttcggatgcccagcattcgagtaagaaggctttcaaatttatagtctccaacaacggccccaccaaggaggccgctaaaagctcgaagtggtccagctatgcattcccctcggccgagaccatcaagtcgcatgaagaggccgttaggaagcagaaacaaaccgtcgacgagcaaatggccgctgctgttgccaagaacgactgtgcgtgtatggaagctccaaagaaaagaaaaagaacgctaaggcctcgcaaggcgctcataacgctgagcccgaaggcaatcaggcatttgaggggacttctggcgcagccggaacctaagctgatcagagtgagcgctagaaaccgtgggtgttcgggattaacctacgatttgcagtacatcagcgagccggggaagttcgatgaggtagtggagcaagatggcgtcaagatcgtcatcgactcgaaagccttatttagcataattggcagcgaaatggactgggtcgacgataagttggcctccaaattcgttttcaagaacccaaactccaaaggtacctgtggttgtggcgaaagtttcatggtttag

SEQ ID NO: 4662 - DNA, 366 bp, Saccharomyces pastorianus
atggtcaaattaacttcaatagctgctggtgtcgccgccatcgcttctggtgccgccgccgtcaccaccaccctagctcaatccgacgaaagagtaaacttggttgaattgggtgtctacgtttctgatatcagagctcacttggccgaatactactctttccaagccgcccacccaactgagacatacccagttgaagttgctgaagctgttttcgattatggtgatttcactaccatgttgaccggtattgctccagaccaagtcaccagaatgatcactggtgtcccatggtactccagcagattgagaccagccatctctagtgctttatccagcgacggtatctacactattgcaaactag

SEQ ID NO: 4663 - DNA, 1092 bp, Saccharomyces pastorianus
atggacacgcagattcaacgtgcaaaggacttgctcgcacagaaaaaatacgcagaggctgccaaacgctgccaacgaagcttggacactctgtcccagggagcatcgttgcccgatcctgaactgatcatcatcttcgcacaggctgtgtacaacatggaggtgcaaaactccggcaacctatttggggacgctctcacggcagctggcgatggttctgggtcagaatccgagtctgacgtgagccaggaggatgatgagggcgaagatggccaggcagacatgcccaactccaggatgttccagtttgaccaagaggaggaagacctgacaggcggggtcgaaggtggtgagagtgacaagagtggtgatgaggataccgaggaagaggacgaagagggcgtgatagaagagggagagcaatcggtcttgcaggtgctcgatgacttcaatccgctgaaggaacaagacgaggaaatcgaagacctctcacaactccgcaagtctgggttcgacgtctacttcgagaacgacctctacgagaacgcccttgacctactggcacaggcgttgatccttctgggacactcgtccctggatggcccacctccaaccgataaaaccaaatcgcgtatcggcgatgtgtaccttctgatgggtgacaccgagagggaggcggagatgttcagcagggccatccgccactacatgaaggcgctgggctactacaagacgctgcaagacgctgtcgaggtcagtgataagactatagaagcagagttcctcgtctgcgatgccttaaggtgggaacaccggatacctacagaggacaagctgaaaagattcaagcacgtcgaggctctactccagaactacatcgcctcgggtcccaaggacgcacagctgcagcaggcaaggctggcgcagatacaggacgacatcgacgaagcgcaagaccagcagcaacagcatgggcccaagagaccgttctcccagccaaccacctccatcggcttccccgcactcgacaagccccttgacggcttcaacgacctgtcccagctggtcaagaagaagcccagaaggcattga

SEQ ID NO: 4664 - DNA, 4899 bp, Saccharomyces pastorianus
atgggtacgtcaagtgaggtttctctcgcccatcacagggatatctaccactactacgtgtcgttgaaaactttttttgaagtcacaggtgagaatcgcgataggtcgaactcgacgagggctcagaaggccagagccaagctattgaagttatcgtcgtcccagttctacgaactgagtacagatgtttccgacgagctgcagaggaggattggggaggatgctaaccagccggattatcttctgcccagggcaaacttccacatgaagaggaaccaggctagacaaaagctggccaatctgtcacaaactcgattcaatgatttgctagacgacattctcttcgagatcaagaggagggggttcaacaaggatctggattccgcaccaccaccaccaccgctaccgcagccgacaaagcaagaggttaccaaggacagcgacgattccgtcaagacgtccactaactctcctataaatcaggtggctccgaacgtctcagtacaaccttctttggtcattcccaaaatggcttctatcgattggtcctctgaagaagaagaagaagaagaagaggtaaaggcaaaggccaaggaaccggagaatgagaaggcaaatacagctgagatagaggaggctaagcctgttttagaacctattgttacagaatctgttgtgcctgactctcaagtactggtccatgatatcacatcgatggtaaagactccaacaacagcacagaaaaactactgggacgtgaacgattctccaataatcaaggtagataacgacatcgataacgacaaggatgttgaacaactgaaaagccctgaaactccaaaccttgaagatgacaattctagttctgtcatggaagatagaatcaaagagctgacggatttgaacagcgatctgcactcccaaatagaagatttgaacgctaaattagcaaatgagatggaaaaggaaaaagaaagggaagaggggaaaggaaaagattcaacaaacaaccacactattgacgaaagttttcaaaaggagctgctgttattgaactctcaaattggtgaattatccattgaaaatgaaaatttgaagcagaaaatatcagaatctgaactatctcaaagaaagaacgacaatagtcacgaatcgaagattactgatgcctttattagcaagtactcttctagcgacggtcttattcccgttcaatacattttaaatgccaacaatctaataacccaatttactacgaggctttccacggtaggtgcaagcccctccactgcaatctctcataacatgggtaaggaactgttccaaatattatctcaactgtcgaaccttgtttcccagttgttattctcagcggacctcttgcagtataaagaccaaatcatcttattaaaggcgtctttatcccatgcgattacttccataagatatttttccgtttatggtcccgtattgattcctaagataactgtccaggctgctgtttccgagattagtttcgctatatgtaatctaattgattcagcaaagattaagtcagattccactgtcaataacaacaatgtgactagtgaaaatatccgacaaacgttggaatattcgccacaaatagccactaccccgatgaccccaactttccctgctgccccttcatcgacaatgaacatgaaaaaggagtttataaaccctcacgaatccgcattttttttaaacgatgtagaggaagaagaatctcctgtgaaaccattgaaaatcactcaaaaggcaataaatagtccgattatcaagccctcttccaatatgattccaacaacttcaagaaaaccttcaggaacgggcttgttcagtttgatgatcgattcgtcaaccgtcaagaacaacgctcataaagatgattacgataaatatgtctctcccataaaaccggctaccactgcctccaattctacgagaaagagtagctctgagattcctaaactaacgttacctcctcaaagcaatgtttattcgaccaccacgccattagaaaatcaaatccctgatattaaaattgagaatactgaagaaggaaaagaaaagagtaaaaatataacggatacggccccaacagtactgacttctagtattgctgataaactaaaacagtttgaacaaaaaccagaaaacaagctgttaaagaaggagaatccaacagcaagcgaacaatcaaagcccaacttgtctaacaaatttataagctcaatgaatgatgtgtccacagatgaagattcaacctctgatgccaacaacgataacgatgacgacgatgatgacgattctacttatatggcactgaaacaaaccatgaaaagagaaggctccaaaattgggagaaaaaatgatcgcgaatcctctgcgaaaaaaactgggctcgatatgaatgactctccggaatcggtaaagatcacatctccagaattggtcaggaagatcacgtctccagaaatgataaagaagactgtgtctccagaagtagtaaacaaggctggatcgccagtgttggctgagaaagttacgtctccagatgttttgaaaaaaattatgtttccagcagcagtaaaaaagactacatctccagaaatcgtacttccagaaacaacaaaaaaagtcacatccccagaagcaatagagaccacatcaccggaaccaatcagcaaatccgcatttcaaaaagcaatcagcaaatccgtacttccagaagcaacaaaaaagaccacatccccagaagtgataagaaaggccaaatctccagaagcaataaggatctcatcaccagaatcagtaaaagccacgtctccagaagcaataagaatctcatcaccagaatcagtaaaggccacgtctccagaagcaatcagcaaacccttctctccagaagcaataaaaaaggctacatctgcagaagcagtagagaagactgcacattcagtagtgttaaataatgatatgtttccgaaatcgattagtaaaactgcaccttcagaagcgttaagggatactggatccccggaagtgaaagaaaagaacgcgtctccacaagttttaaagaagatcatgtttccagtggcgattagtaaaatggcatctccagaagtgataaagaagactgcagctacagaagtggtaaaagaaacaaatcatttaccagaaattaataattcgtacacggaaactgctactttaatcgaacctgtcaatatgaatacagaagacatggccctcaacacttcgagaacaaacgttgatccaaatccctcatttaaacaagaggaggatgagaagaaaaaaaaggtttttaaccaagtaaaaaccactcctcagataatcggtaccgaaaaagaagacgacgaagaagacgattttaataacgttcgtaatgattacaaagcaaataatgtagctcagacacacgttgcccaagaagatttcaatgaaatacacaacggctataaggcgaagggcactactcagacgaacattcctcgggaagatttcaatgaagtacccaatagtttcaaggcgaaaggcactactcagacacacattgcccaggaaagattcaacaaagtacccaacggctatgaagcaaataacgcaggtcaaacatacattacccaagaagatttcatcgaagtaccccaagtagccagtggttacaaggcaaacggcaatgctcacacacacattgcccaagaagattttgatgaagtaccaaacggccataaggcaaaaggcaatacccagacacgtactgccgaagaagatttcaatgaagtacacaatggctacgaaccgaataatataactcagacacacgttgcccaagaagatttcaatgaaatacacaacggctataaggcgaaggtcactactcagacgaacattcctcgagaagatttcaatgaagtacccaatagttttaaagcgaagggcactgctcagaaacacatagctcagggagatttcaacgaagtacccaatggttatggggcgaataacgtagctcaaactcatattggcgaagagaatacacaggtgaaaaaatcaaaccatgtgccaaattcaaacaataaattggtcaacggagggaagccaaagttgaatgatggtgctctcaacagtgttagtgtgaggagtgtttcaggaagtatggcacatcatgaagaacatgacagtgacgacgatgattccagttatcaatttatccccatgagacatgaagggcaacagcgaaagcaagctgtaatggatgaaagcgaagaggacgaagacgaagacgaagacgaagatgaagatgaagatgaagatgaagacgatgacgaagacgacgacgaagacgaagatagtgattttgacgtagatacttttgatattgagaatccagataacacgctttccgagttattgttgtatttagaacatcaaacaatggacgtaatatccacgattcaatcgctcctgacatcgatcaagaaaccacaagccacgaagggcaacctgagaggagagtccaacgcgatcaaccaagtaattggccagatggtggatgcgacgagcatatcgatgcaacaaagcagaaacgccaacttgaagaagcacggagattgggtggtgcagagtttaagagactgttcgcgtaggatgacgattctatgccagttgaccagcgatggggtgttggcgagggatgacaacgacgaggactatgccgataagaacttcaagcaacggttagcagggatcgcgtttgacgtggccaagtgcacgaaggaattggtgaagaccgtcgaggaagccagtctgaaggatgagataagttatttgaattcgaggttgaaatag

SEQ ID NO: 4665 - DNA, 1005 bp, Saccharomyces pastorianus
atgtgctccaacggtattgccaggttcccgggctcccacatacaggccatcgccaggcagttgatccgatcggtgtgtttcttgcacgatttagggataatccacacggacttgaagcctgagaatatcctgatctgcgacgaaacccacatcgctcagaatttgcccccaaagactatccagtcactaagcaaaaggcgtcgtgaggccagtaaagggaaacacaaaatcttgaataacccagaagtcaaaatcatcgatttcggcagcgccatcttccactacgaataccaccctccggtaatatccactcgccactatagagctcctgagatcgtgctcggcttgggctggtcgttcccctgcgatatctggtctatcgcgtgcgtcctggtcgaactggtcattggcgaatctctttacccgatccatgaaaacctcgagcacatggccatgatgcagcgcatcaacggcacccccttcccgacagacatcatcgacaagatgttctacaaatccaaacacaaactgggaaactctccatcggacctgaactcgaccgtaataaagcacttcgataagaaatcgctgactttacaatggccggaaaagaacaaacgcggcgaaaccgtaaccaccgaaaaatcaatgaagagagtcttgcaatcatgcgatcgcctagacatctacatctccaagatcttgaagctggattacggtgacagcatgagcatcaattggaacctgccggcggaaaaaaattggtctttgataaattcaaaaatgctatggaaaaagcaaatacactcttcctccgctgcagccacggacagactcgacaaggaaactttcttgttctggtactggttcatcgacctgctgaggaaaatgttcgaattcgacccgacaaaaagaatcaccgccaaggacgcgctggaccacgaatggtttaacctgggcatactggatgacggtattgcaaattacaataatacccaaggttag

SEQ ID NO: 4666 - DNA, 3771 bp, Saccharomyces pastorianus
atgagtttccttgggtcagacgccagtacgactacaagaataaaggatagcggcggccacgaagtgccgtgcttacagcccatcgatgtggtggaatgcacttatgagcacttcagcgactcgcgggacaagctgtctctgagattgggcgatttagtctacgtactcaataaaggcactaatggctggtgggatggtgttctcatacggcattgcgccgacgatagcagccccttgatgttggatagaggctggttcccttgttctttcacacgcactattctacatgacccacgcaagaccttgtctgccgctggcgagttgggaaggtttcagtccgacattgacgtagatcccgatttgtcaggtcagtcggtcttaatcctaactctagacgagtttctggattattgtaacgatatcgaattccgagggccactggtctggtgtcccacccccacatgcgaacacggccagaagggtcacgagttattatactacaatcaggacttgaacgtctactgcaccaagctaccgtgcttaccgcagggcccagaacctgctttgggtttaccttcttcttcctccccaatatccgcttccaaagatacccgtaagaaaatgcccatcatgtgtgccaccgatttgttctaccttaatgataatgatgcccagagttggacagaccttactcgttcgatacactactatactaatctaacagaactggccctgctgagtaacgataggaaaggttttttagcctctttagatttactctccgtttacataacttatatccagatgactttcagaaatcttcatttagtggataataatttcaaaaaaattctgaaaaagctaatttccacactgtctaaattttcaataaatgcaaacatttggttcaattccactccctttaacgaaagagagagcattgttgcgcaggacgaatccaggaaaaatgatccgttcctacaatcggttttaaaaactttccaaaactttcattttctgcagcgtttactacacttcatctcggaacataatgagtttaccatactacctcaattgtttcctcgttttttcaaagattcgtttaatacaatctcatggaataatccgtttttgcagaagaacttcactcatcgtatgtctcatgatttacccaaggagatggttaaagccgttgcgggcgcttcaggaatagtagtggatagtattaataatatgccggtgtccagacaggacactccatcttcatctgcatcttcttatcacatgataagcgctacttcccaaagaaggagaagaagtacagctttctctaatgtatcaagaagttccagtgaatccgacacaatatggtctaaaaggagaaaaccgtaccccataaatgaggaaaccttaaatctattacaatccaggaaaacgcaacttgatatcaaattgagtcatatggttcaaagcgctaacgactacctaagtaatactgttaatttctcaaaaatgttgaactttgaaatgagttttaagacctataaggaagttagtgaaacggttcctattattgatattttggagaacttggatttgacaattttcataaacctgagagaactgggtgacaaggagcgagtctttgacgaagacgtcgatattgataatgaagataaagagtttttaaaccattctttatcgtcactatcacacattttatcggactattttgacatgaaacaatactttcatgatgtagtagtaaaatttataatggtcactcaacatttgactttagaggatccgtttgtgtttcatccaatgcaaaacgatttgtccactgggtattacgaattaatgactttttcacctctatcaaaagaaactattaagaataggaagaagaaacacgaccaatttgttcaagaattagaggaaaacgataactatcaacaagacgatgataatgttctacttttcaacaacttaatcaaccaagatgaagattcgaatgacctgagattcttcaatcttttccatatcttcaaaaattgctgcgacgattattctgatgttcttaaactagccattgaatcagtaaagcaattgattctcgaaagggaaaatatgctaaactatgctgctagaatgatgaaaaatgatattacagagttgttgttacaaggtgaagatgatggatatgaagcttacagtgataggggggctaatgacaagaacgaggctaacattgtttacatggattctaacactaaaggtgacgctgaatggcaaaaaggccaaacccttctaccgcggtatttgcaacgtgattttgataatgagttgatttggagctcaaataataggatcaaaggaggtactaaagatgcattggtcgcttatctaactaataatgaaaaacgggatacttggttcaatatcacatttttgatcacttttagaagtgttttctcaactacagagttatttagtcgtttgatcgctcgatataacttggtcccgccagaagatttatgttttgaagaatataatgaatgggtgacaaaaaagttgataccggtgaaatatagagttgttgaagttatgacaacttttctcaggcagtattggttcgcgggttattatgagcccgaacttgcgagtttgaatttgaataattttgcgcaactagcagtaaaggagaatgtgcctgggtccatggaactcttgaatgaaatcaatcgaaaattcaaaagtggcgatatgcagggaactactccgcttaaagcgcctgatccccaggtcccacataataatgttttgctcccttcttactctatcgcggaatccattttggctgttgatccggttgcatttgccactcaattgagtatactagagcatgaaatatattgtgatataaccattttcgattgcctgcagaaaatttggaaaaacaagtactcgaaatcttacgattcttccccgggcttaactagatttatcaactttgccaataatttgacaaattttatatcatattctattgtaaaagaagacgatataaacaaacgggctaagctgctctcccattttattttcattgcagaatattgtaaaaaatttaataacttttcatcaatgactgcaatcatttcagcattatattcttcacccatttatcgtctagaaaaaacgtggcaggtggtggctttgcaaactaaggacctgctacgctctctgaatactttaatggatcccaagaaaaacttcataaactacaggaatgagctgaaatctttacatagtgtaccatgtgtaccatttttcggtgtttatctatctgacttaacttttacggattctggtaatccggattttctagtcttagaacaccgtttgaaaggtatttatgaagaaaagaaatacgttaatttcaacaaaaggatcagacttgttgacatcttacaggagatcatatatttcaagaaaatccactatgatttcgttaaagatcagacaataattgaaagcatatgcaacacactagaagaaatccctcacatcgagaaacaataccaattatcattgatcattgaaccaaaacctaaaaacaaggccactgcgaattccgattcaagaggtaaatcacaacagaagttcgacgaaaacgaccctggcgaagaaaaagcacccgctaagaaggacagattcttaaaatttcaattgggcaaaacaaggaagaaacccacaaagctcttcaaatag

SEQ ID NO: 4667 - DNA, 1833 bp, Saccharomyces pastorianus
atgcacacctattgtttagaaagattgtgtacgttttttaatgcacggggtcgcaaatcagagtatttacaatatatagacacatttacggcaagtcacacgatgggtgcagccacggttttgaaaagggctaggaatttactagcaacgttcatagtatgctgctttatggcggtggtgcttgttctggcgctggcacgccatttcatcaacgagcacagggataccaggagttcttcgacgcggatcaaggtcagcgaaggcagcaaaagggccatgcaccatgaccacgtcttcacgaagaccaatgcctactcaacgccattcctcgatctggagcacgacaagaaaaacggcataatctacgaccacacaagaacagtgatacgcaaaaagaaccgcgacgaggagtcgctttctctgcacaagagccttttccacaagtttctgaaaaggctcatcttccggttcatcgaccaagacaaagatgacgagcaagtgacgcagggaaagtttaacaatagcaacaacgaaattgccaaccatgaaccgatctttgagaagatccccgtccattccgacaacccattgcagaagctaatcctgtcggaggacttggcgctggtgcccgatctaaactactatttcaaccagtacaatattcacatagaggagttcagaatagagactgaggacgggttcgttatagacctatggcacctggtgccgaagtacaccacggtagattccgagaagtcaagtcagaggaaaaggccacccattttgatgctgcacggtcttctacaaagcagcggctcgttcgcatccaacggccggaaatctttggcgtatttcctgtaccagtctggttacgatatttggttgggtaataatagatgcgggttcaagccgcaatggaatgatgcgaagctatcgaccccagattccaagtggaactgggaccttcgcgaaatggtcaagtatgatttgactctgctgatcgataccgttttggccaagacacaatatgaaaagcttactttgatctcgcattcccagggcaccacgcaggcgtttatgggcctggtcaatgaagatgagtttttccctcccggatcagggactaaagagtcgttctttacctcgaagatcgccaactatgtcgcgttggcccccgcagtgtatccaggccccttactaaaagaaaagttgtttttgaaactcatgacgaagggaatcgacaatccttggttcttcggggaaacatctttcttcgaaatcatgatgatcgtgagaaacctgtgcatcggtgaaagcttgttttcctttgtgtgttacacgatcttcaactacctatttgactggaacgataccctctgggatatccccttgagagatcgtcatttcttgttttctcctgtgcatgtttcggtgaaattgatgcagtggtggctgtctcctgacccgaataaggtcagtttcaagtttggctcgcacaagatgttccccgataacgtgaagtggttttcaggcgcatcggcgactccaaatatttacctgttcgtccccaagcaagatagactagtggatggagaaagattgatcaatcatttcgttaatgtcgaatcaagtgtcaattacaagatctggtacattgacgagtatgcacacattgatgtgctgtgggcacatgacgtcatcgaaagaatcggtaaaccaattttacagaatttgaataattactatttcaataaggagtctaatgtctttgaaagcgattgttcggacacggaggtggagacggaactagaaatggttgaagaaaaggcttga

SEQ ID NO: 4668 - DNA, 639 bp, Saccharomyces pastorianus
atgttattactaaccgcgtgctctcaaatttctacaggtgctatcggtaatttctcggtgactatcaccggtacttttgggttcgaccactatgaaacagcattactgcaattgcctattggtgccattacggctatgatcattcttatcacaacccaaatgttgtcttgctggggccgtatcactctcataaccacttctatgtacattccagctatcataggttgtattgttctcatcagtttaccattgtctcataagatcggtaacttgttcgcgctgtacttgctttacagtggttcatgtgtcattaccaatatttacatctggaattcatgcaatacctccggttatacaaagagggtgtttagaaatgctatcaccatgattgtatacaacatttcttgcattgtcgctccacagatgtttagagcatattctgctccacgttacatcccagcaaagattgccttattggtcactcaatgcgtttgtgttcctttacaattatacattggttacatttgcaagaaggagaacgaaaaacgtgacaaggaacaagaaggtcaagaaaaaaagaggtaccagtttttggatttgactgatattgaaaacagaaacttcaggtacatttactaa

SEQ ID NO: 4669 - DNA, 882 bp, Saccharomyces pastorianus
atgtcagaacgttccgtcgatattgagaaaaaggtcgctaccagcgacagctgctctgtgactacttcaaatgtcaacgtagaggacgcagatgttgctttaagatttttgaagcagaacggtctcgatgaaggctctacagtagtcgaggatgataccgtggcgggcgaagaggccaacttttatggtgctcatgaactgaaaccggaggtgctgaggaaggtggatctttacattttgccctttttatgctgtacgtaccttttgatgttcttggataaggctctactgaactacgctgcatccatgggaatcaaggaccatttgaaaggtgacgaattttctaatttgggtaccatcttttctgccgcttatattttcatggaacctgtggtaacgtacttgatccagagatttcctatctctaaaatcctgggttcgtttattaccatctgggggatcgtgttagcctgccattgtgcctgtaagtcgtacgcctcactgatgattgtccgtactcttctaggtctctttgaatcctcaagtgctgttggttgtatcgctattagcggtatgtactatactaagtctgagcagagtgcaagaatcggattctgggctacacaggctggtactggttacattgtgggtgggctgatttcttttggctttttacattaccacggtacttctttcacttcttggcaaattatgtttttggttgttggtttggtcaccgttgcattcggtattctgacgttcatatacttgcctgataacgtcactaatgcttggttcttgaacaaagaagaaaaaatccaagtggtggagcatatcagagctaaccaaacaggtttggaaacaaagaaattcaaaaagtaa

SEQ ID NO: 4670 - DNA, 300 bp, Saccharomyces pastorianus
atgaagacggttcattacaaagagatcacctaccaacaatatctccaattgcaacctgatcaacaggaaaaatacctggcactctgtcaaagagacttcgaacgagagactgaaaggatcgcatttgaacgtcaaggaggtgtgcctggtattgcaaggaaagtagcacaagaggaagtcgcttggttcgatcgtgtcacaacgtggtcatatatgaatgcatatattccaaaatataggagaaaaagaaaccttgtcaaaatcaatatgatgaaaatacccactgtacaagaatattaa

SEQ ID NO: 4671 - DNA, 1389 bp, Saccharomyces pastorianus
atgagtcagtgtggtcggcgccgtttaccctgttcttggttggcacacatgtatatattacgcatatgtatgtttaaagagctcttgctaagaaacacaaataagccaagaacgcaagaaagtaataacgcaatgtccgcctccctattcaacaacatcgaactgctcccccctgacgccctttttggcatcaagcaaagatacggtcaagaccaacgcaccaccaaggtcgacctgggtatcggagcctacagagacaataacggtaagccatgggtcctgccaagtgtcaaagccgcggaaaagcttatccatagcgacgaatcctacaatcacgagtacctcgggatcactgggctgccctctttgacgtccaacgccgccaagatcatcttcggtacgcaatccgccgccttgcaggaggacagagtaatttcggtgcagtcgctgtccggtactggagcccttcatatagccgccaagttcttctccaagttctatccagacaaactggtctacctgtccaagcccacctgggcaaaccacacggccatctttgaaaaccaaggtttgaaaaccaccacctacccctactgggccaatgagaccaagtccttggatttagacggcttcctgcgcgccatccaaagcgccccagagggttccgtctttgttcttcactcttgtgctcacaaccctactggtctggacccaactaacgaccaatgggcccagattgtcgacgccattgccgccaagaaccacgttgccctattcgacaccgcgtaccagggtttcgctacaggtgacctggacaaagacgcctacgccgtgcgtctgggtgtggagaaactatccacagtctctcccgtctttgtctgccagtcgtttgccaagaacgctggtatgtacggtgagcgtgtgggttgtttccatctagcgctcacaaagcaagcccaaaacaagaccatcaagcccgctgtcacctcccaattggccaagatcatacgtagtgaagtgtccaatccacccgcctacggtgccaagatcgtcgctaagctgttggaaacaccggaattgaccgagcaatggcacaaggatatagtcaccatgtcatccagaatcaccacaatgagacatgctctaagagaccacttggttaagctggccaccccgggcaattgggaccatatagtccaccagtgtgggatgttctccttcaccgggttgactcctcatatggtcaagagactagaagaaacccacgccgtttacttggtcgcctcgggcagagcctccattgccgggttgaaccaaggtaacgtggaatacgtagccaaggccattgacgaagtggtgcgcttctacgctactgaagctaaattgtaa

SEQ ID NO: 4672 - DNA, 1497 bp, Saccharomyces pastorianus
atgatggaacgtgaacaaattgtagaatatattcaggagacgcctattattcccagaagggtcattcaatattcggttccgaggcaaaccatcgcgaagcctagccctcacgtcgaaactttggtggcatctaatactttacaggacttgaatttgtcccatcatccggtcatccatgatcctttgcaaggtaaagagtattcaactcaaaaatactcaggaaagacgaacaaccaaagattaagtttcgaggagcatcaaaatgagcaatgccaaaactctattgggttgattaaaagagtgaacacttttttcaagaagaagtcgtcatcgagaaaaaatagtatcaaatcaactggcggtgtcaagccagatgatgaaattcagattccaaaacaacatgaaaaaaaagctgatccaccaccagcacagcccgctttaaggaacttgcctaaaaaacatgaggaaaatagtaaaagacatggcctgttttcttttgaagagacacctcccgtggaagtgccgaggcaggagtatccaaatgccaagaatttagcgccggatacaacatctcttagaagaaccaaatcgtcatctggcagttttgtctcgttagaactaagtaaagcgaagtttgctactttggagcctgcgccgttcaagaatcccactgaaagacaaaccccgcaacctcgtgaacaaaggaatgattctgcaacgcaaaacccaaatataacctcaataaaggaccaaaaaaaaaatcttcaaatggaacaaaacaggctaatcattgaaatcatacaccttgaaagcctactaaacgatcacaagaagggtgttccctacattactaaaaacaaatgtgaagaaaaatcaccccaaaaagataactccaccttggcaagggcaccatgctcaacgcctcccgatactaaatccctaactgaaagagccctttcctcttctctcagacgtgattctcttagcgacgggcccattatcgatctcgaaggttttgaatttgaaaagcatgatgatcctcttagggataaatggaatgctttgcagtctctggaaaacatctttgagtccaaattcgaatctgcgcccaaaccaatccagggagacgaattcgccgcgattaaagaaagaagatttcaaatagcgaagataagtaatctctgccttcaggtagaagaatctatcaaaagaaggcaagaattggagggcaaactaagagagaattcgcaaggtactgacggcgaactgcttttcttgatgatggaaagtaaaagaagacaaaaaactctttcagtagtacagctgctttccaagataatcagggagaaatccaaaaggcttaccgcagaagagcaaaacttcgtgaaccaaaacgaggtgaaacccctcatttcagatctttcagtcaagatcaataggttgaattccatcctagagatgaagaacacttgtatcagaaagctaagtaatcaataa

SEQ ID NO: 4673 - DNA, 624 bp, Saccharomyces pastorianus
atgaaaaccgccaaagagatagagcctagtgctaccataaaccaggatgaaattcctaaatccaaaatttttctatttgttgaaaaactatcaataatctctttctccgtttgttatggagtagacgttatgacgccatcattatattatctaactggaaagtacccaaaggtcattggctttatgcttgtgcagtctgccttggtttgtatgacgcttctcataaacctggtttatcttttcttattatggagaaatggactacttaagaagcagaataaaagagagccaaaaagatgttccaaagtgtcatgctctcaatgtaatgctagaaggcaatatccaagatggtttaagttgaagcatttgctactatcgctagcaacgctgacttttggaatttactcacttatcaagatagacttcttttttgagactgaccaaactgttgacttataccgactatcgcagctattcggctggcaactcagtgcaatttgtagtttcatccttcttaccttttatgggaaccagttaagtttacataatggacctcttcaagtgaatgacgatgacgatgaaaagaaagcagtgcttggaatgagagcggatcaacgggtttag

SEQ ID NO: 4674 - DNA, 519 bp, Saccharomyces pastorianus
atgtatgataatagcgactcagagcaagacacaccaatgcccaaccatagtggtatgttagaaattatcagtaactgtttgcgaaagattgaaaccaagtactggaaccaccttttcactaatcttaagatgacgccaagagatttattagctttatgcatagaagagaacgaggccaagatgcttggaatacttcttctggtgtttttgaactacgatgagaaagagatggtaaatgacttacatttcaggaagccagaggtggaaacaaaagacaacgaaaccacagatgattcatcgacaagatcttcagataaatctgttacaaacgtattaaaggatgaagaattgatgctaaaagttctagagctcctggtggcaagtgctgcaaatgctacggacccaatgaaagctaccgattcgtgggacatgtgcttccaattgatccgcttacttaaggaattggacaaagaaaacaatacgcgaatggtacagaaggctctcgagaggctcaagtga

SEQ ID NO: 4675 - DNA, 2223 bp, Saccharomyces pastorianus
atgcacttatggccgattagcccgcctcaattgcttaaaataccgccacgcaacacgaaactagacaatggccccataaacgacgataatatccttcagtcaatggctctacctcaggccaatgtcgttatcatactaactccaacgagagtgctcatttacaattttaagcctatggcgttggttgcaagtcatgaaagaactacggcttctctcaaagaatttggtgaaaacaggtccatgaaaagatctgctccatataatgatatcattgagggacttatttccaaaaaagattcacaatacttattgtggcatcaggggaagcttgtgttttacgttatgactgacaaaaattttcttttgacctaccaaattctaaaaaattgcacaaatgagataattttcaaagagtacggaatacctgttatagaacctcttttactcaacgaagaagaaatgaacagcggcgaatatgatttcaatacagacgatgatacacttacagtgtttgacaagaacaactcttcaaaagttatacagaatgggtttggtataactaaagagaagggtttcctacatttcctttccaatcaggaaaatatcgatgaacttccagtaaagaaattggaacttcgtttaaaagttgtcctgaaatttgattatgaaatcatagatatgattggcatcaagacgttttccaaggttggagatgggcgttatgaggaagttttgatagttctctttccccatggattgcaattattaacaatattggactttaaggtcagtaaaagttcgttagttgaagtaaagaacggaataaagaccatagtgtgtaataaacaactaatggttctatcacatgatcccgaggaaaaacaaaccatagtaagcattatagacatagacaagcaagccatagaagcaacaccattgttagacattccggaagaaccgttgacgtgtttcgaagttaacggaagattattgattgttttcaaagaaaagatagtatgctttgattcaaaaattaaaaaaataagctattcttggaaaccgccatttgtaataaaactttgcggtaaaattaatagtgaaattttgctcctcatttctgaggataataggaacattcatttttatacggaatttggaaacctcctgtttgccacatattttgaccaggacgactatgatgaagataacgatgatgagaacgttaaaagtgaagataaaaaaaaggtggccaagtatgaaatatctgattttgcctacctggacaaatccttgataacagtatctcgttctggagaataccaattttggaaattatgggaagaaatgaaacagacgcaattcgatttcaggaaccccaaatcctacgtattgaccaatacaaataacgatataatcatatattcaccagtggccagttcctctttgaacaacgataacttacaagtcatcaaacttcctacgaagactttcaataatcatatcgctttagtaaagattaactcctctttgaaactatgtgccacttatgtgtcgaacaaaaatatattgcttattcaaaatttggaaaccaatgtatggtctagttttgcagaccaaaatgtcttagatttgcattggttgggtgataactatttaatttgtcatatgaaaaatagcgatggctcaacaagtttggaatgtttacgaattccgcttcaggaggcgaataaggacatagaattgtcggattacattatctgggaatacaggattccagaaaatacgactgtgttcagtgtacatgttaatgccctatttcggtacaagctgttgaaaataaaatccaaggacaacgaaacttcagaaaagcaggcggaagctttatttaagacagcagaggttatcttagttactgatacccaaacaattgtttttgatgtaatttctactgtccacccaagtggtttgaacctcatcaaaagattttatcaatacctaaaaatcagtattccaattgatgtacaacctaacaagattgaatggataacgaatatgaaagatggtttgttattttttgccgataggaaaatcatgaaattatgcaaattgaatggaggaggctggcaaaccttgactttactaagtaacttcgaaagaatagttgatgttatcaagacgaaatattcctggtccagggcctcaattacgtcatatactctttag

SEQ ID NO: 4676 - DNA, 639 bp, Saccharomyces pastorianus
atgatatggaccaaagaaagacaaagcctgttagaaaagatgaataacacggaaaattataagatcgaaatgatcaaagagaatgaaatgttaagagaacaactgaaggaagcgcaatccaaactgaacgaaaagaacatccaattgagatctaaggagattgatgtcaataaactatctgatagggtaatgtcgttagaaaatgaactcaagagaatggagattgaactggatagaaataaaaaaagaaacgatacaaacttgcactcggcgggtacagtttcatcgtactccataccttcttctacggtatcaagcaactacggggtaaagtcattatcttcctcaatgccgttgaaagaagaggaagatgtaagaaaagaagacgttaacagtgaaagacgatcgagcgaatccatcggggatttaccacaccgtgtaaactctctaaacatacggccatacagaaacaacagctctgggataggaggcctctccgaagatttggacattgactttaacgatagttttgcctctgaagaaagctataaacgtgctgcggcagtaacgtctacactaaaggccaggattgaaaaaatgaaggccaaatcaagaagggacggcatgactaggacatag

SEQ ID NO: 4677 - DNA, 1923 bp, Saccharomyces pastorianus
atgctagtctctgcaatttcccttcaggctttcgagacaaattgtgaactactgtctaattttacaagtaacaatactaccgtactcattagcacagattttggttgtgagttagagcccgtagctatgagttactttggaggtaaatgtaagtgtgttctctccatttcatgcgaggtcgagtgcagacagctatcacttggctcttatgcattggtcaatgacgaccaatgtactattactttggggttaacatactgtgacgagaactttgaaacagacccctgtattttggaaaacacaaaggcagctttattggaactaaagggatccagtcgttcaaatgttaataggtttcttttggagttaaatgttacgaaatggataaagtctcagttgattttagattcaaaacaaatggccttgaaaatgtgggaagtgattattccaaagatttctttaaatattctttccattatttacgaacaatttgattatgacaaaatgttagaaaacaaatcaacggagattattttcagagacctagttcaagaactatttggaatttgctttgcacaatgtagtagtaaagtgactaaatttttacaagtaacaagccagggggaagaggaaataaatttttataaaattgtcaaatattgtgaaagtaagaaattgcaacttatcaattctactgcaaatgaacatcctgaatatttatctttgccttttgaaccatattgcttttatcaccggttcgaatatccggctcaaatccttcttcaccagccgattatcctggcaaagaagtacaatgttccatgttcaaatttaaacttcctgtatggattctacacgagattgctgacactaagtggactatcaataaacggaggccggtgtgaacatgcactgtcaatgctggacaacagaattggcggtggcatgaatgttgctgcgggaattaacagtggtcaagattttacagatggagataataaggatgaggataaaagcaaaatgacagtggacaaaaatactaaggaaggttcctatataagtttaactcaacgattttccatggtaagtccggtgagtggcagtgatcctgctttaccggcagacctaaaaacactatatttgggtgcagaatacattagcaattgcgacgcgaatttatgtagtgacgaacaaccactaaagtctcctgtcagggtggatatgggttataaagatcagtatttgacagataatgtaagacatacattcgaagaggcatacttggcaaatgaagatgacttttcctgtcttggaattgacgatagaaacactacgaaacccatcaaacccttagaaaaacttggaataattgctgtgccacattttattaagcggttttccactaaaagatcgagtaaagataaatcaaatgctatgaagagaccctacactacaagcagtttagagctgcaattgaggtctgatcatttcacgttcgctaaagaataccaagatttacatagacaattaaattatgaagcaaaaccgaagacgcagacagaactggattcgaggcgtcgaaactacgctgggctggaatcgcaaatgtggaaaattaaacaccgattcaatatccacaggggagcactaccacgccctcaaactaacccatatgagatactactagatcacatagaagttttgaacagtggcaacactggggatattttgagatttaccacaagtagatacggtggtgttgatacgtacgattctatcttgaaagatcagtctaagattatgagcgttttaggtaagcgttgtgcctactcacctccggctttgctcaatgatcaggatcatgatccagattacgatcacggccacgctcaagatccagaccacccgagtcatcaacactaa

SEQ ID NO: 4678 - DNA, 138 bp, Saccharomyces pastorianus
atgaatttattcttcgtcttcttcttcttcttcttctggagtgacttggtagaaggccaatctgtattcgttggtcttggtggagacgaatctgatccagtctctcaattggttcttcttcaagtacttcttggttaa

SEQ ID NO: 4679 - DNA, 996 bp, Saccharomyces pastorianus
atgactcctaagagagtagcccaattgcctgttcataatggagccacattgcctccacaagagataatcgatcttttcaagattacattcctcgaacaactgtaccccaaagaccaggacgaagaaaacaccccattaagtgagcagatacaggcagtgaaaactgacctttataatagagactacagtgccgctttcagtaatgacctgaaaagaatggcgtattgttgtcgttggtcaccctccagagccacaagttatgcttctgtattggctcattttccggaggttttgaagatcatcagatgtgaaactgaaagccaagactcaaacgtattatgcgttggaggtggcgctggaagtgagctggttgcattagcaagcatatttactttatcaagagacttttcgtccaagtttgcctctgctttgaaaattagcaatgaggaaaggaaagagcctgggaaactgaacatcgaactagtggatattgctgattggtctaccattatcggaaagctaacggccacgataaaatcgaagtggttatacgacggccgggaagcagaagcattcaatgtcaacttcgtcaacagagactgcctgcaaatgacacaaccacaggatatcaagatgtaccaaagccttaatctaataaccctattgttcactacaaatgaattattcacacagaagaaagtggaaagtatcaagtttttacaacgcttgaatgagaactgtgccccaggatgccatcttctcatcctagaaagcgctggtagttactcacacatcacgatcaatgataaaaaattcccgatccaattcctcatcgataccatcttagtgggtaatagaaaagacaaaaggacaacgagcccatggtctttaatatcagaaaacgacagcatctggtacagaatggatccaaagctcgactattctatcaaattagagaacatgcgcttcttctaccgtctctacgtcaagaactaa

SEQ ID NO: 4680 - DNA, 705 bp, Saccharomyces pastorianus
atgagacgtgaatataacgtagaatgtgtcaccggtaagccacaagtttcttatagagaatctatcactattcctgcagattttgactacactcacaaaaaacagtctggtggtgctggtcaatttggtagagttattggtactctatcgcctgtagaagatatcaccaagggcaacatatttgaaaccgcgattgttggtgggcgtatcccagataagtatttagctgcatgtggtaaaggtttcgaagaagtgtgcgaaaagggaccattgattggtcatcgtgttctaaaagttgaaatgttaatcaatgatggtgctattcatgcagtggattctaatgaactatcgttcaaaaccgctactatgtctgcgttccgcgatgccttcttaagagcgcaaccggtgattatggaacctatcatgaacgtgtcagtgacatcaccaaacgaatttcaaggtaatgtcatcggtcttttaaacaagttacaagcagtgatacaagacacagaaaatggacatgatgagtttacactaaaggctgaatgtgccttgagtacaatgtttggtttcgctacatctttaagagcttcgactcaaggtaaaggtgaattctcgttagaatttagccattacgctccaacagcacctcatgtacagaaggaattgatctctgagttccaaaagaaacaacttaaaaaatag

SEQ ID NO: 4681 - DNA, 1575 bp, Saccharomyces pastorianus
atgagtgttcagacaatgatgtgggtgcctcggagagtggttcgaggcggtgtccctttttttgttaactcaaagctgtgcttggggctctcaaggagatctttccacgggagctcaataactcgttctacatacgaggaggaaaaagttttagtggatgaaataaagcagcagctgacacctgccgacatcgaactatccaagaagctacgtaacattggtatatccgcacatattgattctgggaaaacaacttttactgaacgtgttttatactatacaaaaaggatcaaagctattcatgaagttcgtggtagagataatgtgggtgcaaaaatggattccatggaccttgaaagagaaaagggtatcactatccagtctgccgctacttattgctcttgggataaaggggacaagaactaccattttaatttgatcgatacgccgggccacattgatttcactattgaagtggagcgtgctttgagagtgctcgacggtgctgttcttgttgtttgtgctgtttcgggcgtccaatcccaaaccgtaactgttgatcgccaaatgcgtagatataatgttcccagggtgactttcattaataaaatggatcgtatgggttcggatcctttccgtgccattgaacaacttaactcgaaactaaagattcctgctgctgccgtacaaatacctattggagcagagtcgaccttgtctggtgttgttgatctaattaataaagtagctctttataataagggtgataatggggagatcattgaaaagggaccagttcctgaaaagttgaaacccctaatggaagagaaaagacaactgcttattgaaacgctggctgatgtggatgacgagatggcagaaatgtttttggaagaaaaggaacctactatagaacaaattaaagctgctattcgcagagccacaattgccagagctttcacaccggttttgatggggtctgccttagcaaatactgggattcaacctgttcttgatgctattgtagactttttaccaaatccttctgaagtgttgaatacagcattagacgtgagcaagaatgagactacggtcaacctagtccctgcggtacagcaaccgttcgttggactggcattcaaattggaagaaggcaaatatggtcagttaacatatgttcgtgtctaccaaggacgcttaagaaagggtaattatatcacaaacgtgaagactggcaagaaagtgaaagtggcgagattggttagaatgcattccaatgaaatggaagatgttgacgaagttggatctggtgaaatatgtgctacttttggcattgactgtgcttctggtgatacattcaccgatggtagtgttcaatactccatgtcatccatgtatgttcctgatgccgttgtttctttgtcgattacaccaaagtctacggatgtatctaatttttcaaaggctctgaacagattccaaaaggaagatcctacattcagagtgaagttcgatcctgaatctaaggaaactattatttctgggatgggtgaattgcatctggaatttacgtag

SEQ ID NO: 4682 - DNA, 2091 bp, Saccharomyces pastorianus
atgtggggggacagtatgcgcgagcctggtatgaccatggacaatgaattgaaggcagtgaagccgctgatggaagaggatggtgtggacggtgcgaggagaataaataagggtatgggcttccagaagtcttctaccgagcacctattgatttcgcctggcagagacggctcagtaccgttgaatgggttgaagtcatcgcctgcagatccgcacttgtcagatgtgaactctattctggaaaactcccgtattggtgatgggacggcgttgacgtctgtcaataatctcatcatggccacgtcggcgaatggtgagggtgatggtgatggtgatggtgctgatggtgatagtaagagaccgcctatctcgaattcttcgtcccggtcgtcattttttgacacagttttaagcacattttccttgaaatcagcttcacaggatacagttaccaatgaagccagagatacagaggttcggttcgcctccaaggaggctaatgagaagttccatcaaattttcaaatcgataccttctaaggcaaagcttgtcggggactatttctgctacttccacagagaattcccctaccaaggcaggattttcctttcggacacacatatatgtttcaattctactgtactaaactggatggcaaaggtgcaaattccattgaatgaaatcaagtacttggacaaggtgaccacgaattcaggtgccatttctatagagacgttaacaaacaaatatacattttccggattcatgtcaagagataaggttttcgaattgattacacgcatttggtcgaaggagaatttgaccaagatcaatgatgttatggaggtggatgaaaggatctccaagacaaagggcatgtcgccggcgccctcctccatattcaacagtgtttctacaaatgcatataacgatttcatatcgacaacgactacagaacccacaagcagagcttcgtacatgagtgagaacgacatgctcattgaagaagcaatcaggtctgtggacgattatatggggacgccaaaagcatcttcatcttcaccatcattgtcgtcatcgtcgtcgccaccatcaacatttggttcttcaacaacatattatcgcaggcccgtgtatagattgaagcaaaatgccccattccagtatgacgggccctttcatgtggatgaaacaatggacttcccgtataaacccgaggtaaacaacgaatatgtgctagtagaacgccaattcaatgttccaccaggcctgcttttcataatgatgttcaatgaggacaatccaatttttgaattgaacttcctaaaagatcaagactcatcgaatatttcgcatattgggacatttgaaaaagtcaacaaggacggacagcattacagaaatttccaatataccaaacaattgcattttcccgtggggcccaaatccactaactgccaagtgacggagattcttttacattgcgactgggaaaggtatataaacgttttaagtataacaagaacaccgaacgtcccgagtggtacaagcttcagtaccaggacgaggtacatgtttcgctgggatgatcaggggcaaggttgtatattgaaggtaagcttctgggtggactggaacgcgtccagttggattaaaccgatggtagagagcaactgtaaaaacgggcaaatcagtgccaccaaagatcttgtagagttggtcgaccagttcgtaggagagtatgtggaactaagcaaggaaagaacggatgcactcaatgcgttaccaagtgttgcgtcatttgggtcaccaaggaaaattgcgcccgagttggtactgcccgagacgaatactgacgctgcgggggaaaccccagaagtgagcaacgatagatggaggttcaattgggtgaacatagtgatactagtgctgttgacactgaatctgctgtacttgatgaaactgaacaagaaaatgaacaaaatgacaaaattgatgacgcataagaacgacgttaccgtgcaccggaatttattagatatacctgccgaggtgcaatggtcgaaacgaagagaccgcagtagattgtaa

SEQ ID NO: 4683 - DNA, 516 bp, Saccharomyces pastorianus
atgggtagatattcagtaaagaggtacaagactaagagaagaacaagggacttggacttgatctacaacgatctggccactaaggagtctgtgcagaagcttctgaaccagccattggacgaaaccaaggcggggctggggcaacattactgcatacactgtgcaaagtacatggagactgctatagcgctgaagacgcatttgaagggtaaggtgcacaagagaagggttagggaactgaagggtgtcccctacacgcaggaggtgtctgacgctgctgcgggctacaacttgaacaagttcttggaccgcatgaaagatatcacacactctgtgggtccagagaaggagtccaacgaggtcttactgaaagagcatttggacaacgccttggcgaacgttgccacgacagaacccactctgccgtgggcagccccagacgctgaggctgctgacgctgaggctgctgccgctgaggctgccccagtagaagccgagcctactgctcaaccataa

SEQ ID NO: 4684 - DNA, 399 bp, Saccharomyces pastorianus
atgatggaatctgataaccccttcagcacatcagaggcaatgatgaataaaaggaacgttggaggagcgagtgcgaatagcagagaagggtccagcaacggcggaggcctaccgctatatcaggggatgcagaaggagcagacggtttttgaaagaggtaacgctcaactggactacatcctggaaatgggtcaacaatcgttcgaggatatcatggagcaaaataagattttatccaaagtacaagaacaaatgtcaaatggcttcagaacgttgggtgtttcggaacaaaccatttcttctattaacaagagagtttttaaagacaaacttgtcttttggattgcattaatccttttaatcataggtatttattttgtcttaaaatggttaaggtag

SEQ ID NO: 4685 - DNA, 930 bp, Saccharomyces pastorianus
atgttcaaagaacctgatacggatactgtaaatcaaacatacctcgacgcagttttgaccccagaatcagggacgactacacaagcaatgacaccttccaccccacccagatcgagaggcactaggtatcttacacagcccaacgccaatgctggctctaacgggataatgcaaccgcaaaggacccctcaaaagccttcacagaacttggtccctgttactccatcgacagctagaccgttcaagaatgcaccattactagtgcctcccaatgcgagcatgggtatgacctccccattcaatgggcttaattcacctcaacgctcacctttcccgaaatcttcagtcaagagaacactatttcaatttgaaagccacgatgatgagatagtaagggaggaacagaaaccgttaggtcgtgtgaatagaatgctgtttcccactgaaggtgtgcagcaggatgaagaggaggaggaggaagtgttgctcccccccagcagacccacctctgccaggcagttgcacttatcactcgatagaaatgaacttgatgaagcgtacagaaagaagattattaaagatgtacccggtacgcccagcgacaaggtgataacgtttgaactggccaagaattggaacaactattccccacaaaacggaaccagtagccaagaaagcggagatgaggaagaagtcatcatcagatcagcacaagtaagtaaaaatccctttgcatcggaagaagcagccactcgggagattaggagtgaacgcaagaaagcattattaagagaaaaccctgatatagaagatgtgataacatatgttaacaaaaagggtgaagtagtagagaaacgaaggctcactgatggagagaaacgaaggttcaaaccaaaggcgttgtttcaaactggggatcaagagcattga

SEQ ID NO: 4686 - DNA, 816 bp, Saccharomyces pastorianus
atggccggtgtcgaagctgagaagatggctggtagtgcatcgtggggtgaattattttccactaaaaccaaggttttccagcgtgtgctgatgggtgttcttgttcaaatgttccaacaattgactggtaataattatttcttttattatggtaccattgtttttaagtctgttgggttaagtgattcgtttcaaacgtccattgtcattggtatcgtcaattttgcttccactttcttcagtttatacactgttgaaaagctagggcgtcgtaactgtctattgttgggcgctgcttctatgatggcttgtatggttatttatgcttctgttggtgtgactagattatatccaaacggtaagagtcacccatcctccaaaggcgctggtaattgtatgatttgtttcacctctttttatattttctgctacgccactacctgggctccagtcgcttgggttattaccgccgaatcattcccattgagagtaaagtccaagtgtatggctttggcgtccgcttctaactgggtatgggggtttttgattgcattttttacccctttcatcacctcagccattaacttctactatggttatgttttcgtgggttgtctggttgccatgtttttctatgtgtttttctttgttccagaaaccaaagggttatcactggaagaaatccaagaactatgggaagaaggtgttctgccatggaaatctgcaggctgggtgccttcgtctagaagaggcgccgattacgatttagaggatctgaaacatgacaataagccatggtacaaagccatgatataa

SEQ ID NO: 4687 - DNA, 180 bp, Saccharomyces pastorianus
atggcctttgaagaaaaagcaaagcccattgctccacagcaaccccaagctgctgatgaactggtgtcttcgttaagtaatgactcacacttaagcgcaccatctcaaaaattttccaatgacgaattgaaggctggcgaggtcgagcctgacatgtctcacactgagcctatggaatag

SEQ ID NO: 4688 - DNA, 123 bp, Saccharomyces pastorianus
atggaaatagacgatggtataacggtccgagagaaacttcgagatgtcgtaatgactattaataagcttcaggtagatataagagaaatgaaagaaatactaaccgttctagcaaataaataa

SEQ ID NO: 4689 - DNA, 987 bp, Saccharomyces pastorianus
atgtttaactttcagaattttactttaaactcgtttgaggattgttacggaaaagcttctgaaacgtcaagaatggaggaagaaaaattagaatcaaataacctgaatgcgtcttctttgaaaaaagtaaacaaaagtaaaaagagcgcttcaagatacgaccagaagaatgtatttagaaactcgatgactggggtgatacaagtgacgccgctgaaaccaacgaaggttatagagcaaaatattgactttgctaaaccgaaaagttttggcctccttcagtcgacacatactatctgttttagcaagaaaaatgcctctgtggatatgaagctgaacacgggtgctcaaaaccccaatgatatcaataatgatttgctccgtggaggagcattaacagacttgagggccaatagtaatgatgaggcggaaactagacaactgaggaaattccgatggtcgaataataaagacaaatgtttttgtgaaaagttaacagtcatatattgggctctcttacttgacacaacaaagcgggcaaataagagaagaccaattttgtgtcaccaggtcatagctgagtttttcaatagagtttataaggaaaaattaagggttcctataacgtcgagatacatcagagataatttagtcacttggacgactcaaggcaaagaattgcatgaaaaaggctggatagatattgctaaaactggcgatttccaagagcaatttagctttgctactataaaattatatgaaagtgcagaatgcggacgttttatcgcaagcaaggacaaggtttctaaagatggaaacacagaaaaatactgttcgtttcaaccagaagaagagtccattgatacgaccgatgaaactggtccagttacaacatggaaaagtacgaaagaagatcgaagagagttgattaggaatcaaattttggttttggacttgcacgatgaggaattttcgaaaacggtttga

SEQ ID NO: 4690 - DNA, 2025 bp, Saccharomyces pastorianus
atggcatgcatacagctttttttgctgtgttttattgtttctgtaaccagggcattttacttgccaggtgtggcgcccactacttatagggagaatgatgagattccattactcgttaatcatctaaccccatccatgtcctatcaacaccaagatgaagatggtaataatatttccggagataaggaacacttcctatactcttatgactattactacgacaaatttcatttttgcaagcccgaacacgtcgaaaagcaacctgaatccttgggttccattatatttggtgatagaatatataattctccattcgaattgaacatgttacaagaaaaagagtgtgtttccttatgtaaaaagattattcctgggaacgatgccaaattcatcaacaagttaatcaagaacggattttcccaaaattggcttattgatggtttacctgctgctagaaaagtccatgatggaagaactaagacagatttttatggcgctggcttcggacttggtttcgttgacgtaacacaagtggtaaatggtgacactgaacaaacacaaacgggcagtggtgagattgaatcggaaaaaccaaaaaccaccaacgaaggtatagaattggatgcccgtgaccaaggtcacaacatggtgcaaactcgtgagttttcatactttgctaatcatttcgatattcaaatcgaataccatgaccgtggtgaaggtaactatcgtgtagtcggtgtcatcgttaatccagtgtctataaaacgatcctccccaggtacttgtgaaacaaatggctccttattagaactggatgaagaaaatgataatgaagtttattttacctattcggttaaattcgaggaatcccccacttcatgggctaccagatgggacaaatatttacacgtttatgatccttctatccaatggttctccttaattaacttctctttggtcgttgtgctattatcatccgtcgttatccactcactactgcgcgctttgaaaagtgatttcgctcggtacaacgagttaaacctagacgatgacttccaagaagattcaggctggaaattaaaccacggtgatgttttccgttcaccaagccagtcactaatgctctccattttggttggttcaggtgttcaattatttttgatggtcacttgtagtattttttttgctgcattaggtttcctatcacctagctctagaggctcgttagccacggttatgttcattctatatgccttatttggatttgttggttcttacacatccatgggtatctacaaatttttcgatggtccatactggaaggcaaatgtgatcatgaccccgcttttagttcctggagctattctactagtaatcattgcactgaactttttcttaatgtttgtccattcttctggtgttattccagcaagtactttgttttttatggtattcttatggtttttattctccattccgttatcaattgctggttctctggttgccaggaagagatgtcactgggatgagcatccaacgaaaacgaaccaaattgcaagacaaatccccttccaaccttggtatctgaaaactctaccggctactttaattgctggtattttccccttcggttctattgccgttgaattgtattttatttacacaagtttgtggttcaataagattttctacatgttcgggtttctatttttttcattccttttattgacgttgacaacctcgttggtcactgtaatgatcacttatcattcgttatgcctagaaaactggaagtggcaatggaggggatttatcgtcggaggtgtcggttgcgccctgtatgtatttatccattccattctattcactaaatttaagttaggtggattcgttaccattgttttgtacttgggatattcttctgttatttcattgctatgttgtttagtaactggatcaatcggtttcattagcagcatgttctttattagaaagatttactcatccatcaaagtagattaa

SEQ ID NO: 4691 - DNA, 5712 bp, Saccharomyces pastorianus
atgggagatggtacaaacacctcgttcctcaaatttgaaacgaaattgaggtttacaaattttggccagtataaagatatcaataaaaaaagatcggaacagcgtagatacattacaatgaacgattcaccttatcacagatgtccttttcttcttccgctattttaccaagattctgatacataccaaaaactgtatggggctattgctccgtcgtcttcgattccaactttacctcttcctactttacctgatactatagactatattatcgaagatatcgtgggcgaatacgcaacacttctagaggctacaaatccatttaaggatttatttgctgaaactccatcaactgttgaccctttgaaagctagttttactgaagatgatgatgacgaagcagcagaccctttagaattcaaacctgtcgcttttacggaagagataaattatgaacgggacaactatgttattgatgtatcttatattctcctggatattgacccattgctatttgtctttaccaagagcctattagaacagttttattctgaagatatggtacaagtcttggacgatatcgaaattgggattgttaaacggttaagcaatcttcaagaaggaatcatctctatttccaacattgatgtccacgttgcctatttaaatctaatttggcaagagacaggtgaggaaggttttgagctctatttggacagtatcaactaccaaatgagtgaaaaatctctcgagaaaaacagaacaagtaaatcacttgacttagcagtcttggccaaggtaaagactgtgagagcaaccattaatcagaagaaaactccagagttgtctaaggatcgtccacctgcgctttcattaggccttgaaggatttgaagtgtggtcttctactgaggatagacaggtcaattcactaaatctgacatcatcggacataaccatagatgaatcccaaatggagtggctgtttgggtactgtagtgatcaggggaatctcatacaggaagtttttacatcgtttaatgccattcagtatacgagaactagtacgaagacagagcttatatcaaaacttacagctgcaagtgaatattataaaattagtcacgatccttacgtcataacaaagcctgctttcattatgagactttctaaagggcatgtacgcgagaatcgtagttggaaaattatcacacgtttgagacatattctaacttatcttccggatgactggcaaaataacattgataaggtgttgaaagagagaaaatatagttttgccaaagacgctaaaaacatcttcatgtccgtattttcagcttggaggaactgggagttttcagatgttgcaaggtcatatatatatggtaaattgtttttggcagaccctgcgaaacataaaagaaactcaattaagaaattgctaaagtgcaccatgggatcattttatcttaccgtttatggtgagggatatgaggtcgaacataactttgtggttgcggatgccaacttagtagtggatttgacacctcctgtaacaaatttgtcctcaaaccgagaagaaacgattgaaatcacaggaaaagttggttcggtgaaaggcaagtttagtgataaactgctcaaattgcaagatctcatcccgctggttgcagcagtaactgaagatgataaaagtgatccaaaagccgaattagcaaaacaattcaaaatgaataccgtattattagtagataaaagtgaaatacaactggttatggatcagacgaaagtaatgagtaggacagtaggtggtagagtcagtttgctatgggaaaacctgaaagactcaacaagtcaagcaggttcattggttattttttcccaaaaatcagaagtatggttaaagcatgcgtccaccattttaggtgaggctcagctttgtgacttttcaattttagctactacagaagcttggtcgcataagcccacgatcttggttaacaatcaatgtgctgatcttcatttcagagcaatgagcactactgaacaaatggtaactgctattactgaaatcaaagaaagcgttctgaaggttaaagaacaaattacgttcaagccgaaggcaaagaataagtcgcagtttgtcggcccaaaaattaatactgttttatcatgttacttttcaaatgttagttcagaaatcatgccgctttcaccgttttatatccgtcatgaggcgaagcaactcgatgtctacttcaataaattcggttcaaatgagattttgttaagtatatgggatactgattttttcatgacatcacatcagaccaaggaacaatatttgaggttttcttttggcgatattgaaatcaaaggaggattttctaaagaagcttattcgttgataaatgttgatgtttcaatatctatgattaaacttaccttctctgaaccgcgtcgtattgttaatagttttttacaagacgagaagcttgcttctcaaggtataaatcttttgagctctttgaattccttgttttctaccacagacctaacaaaaacgaagaaagaaacgcctacaaaaatgataaactggacattggataccaatattagttattttggtattctggtaccagtggcatccacttattttgtttttgaattgcacatgctcctactctcattaactaatacgaacaacggtctacttccagaacaaactagagtgacggggcaactgtctattgaaaatattctctttttgataaaagagcggtcattacctattggcctctccaagttacttgatttttctataaaggtatctactttacaaaggacggctgacacggaacagtccttccaagtcgaaagttcccatttcagagtctgcttatctcccgattctttgctaaggctaatgtggggagcgtataaagttttggacttggttcagtactattcaaaacgccatgcacctaatatttggaacattaaaatgttcacaggtaacagtaacaaaccaaaagaaatacctataaatttccgttccatacacattttatcttacaaattttgtataggttggttattccagtatggagcaggggatgatccgggtttaatgttcggctataatagattattttctgcatatgaaaaggattttgggaagtttacaattgttgacgcattcttctctgtttcaaatggtaatacttcaagcaccttcttttctgaaggaaacgagaaggagaagtacaatagaagtttcttaccgaatatgcaaatatcttactggttcaaacgatgtggggagctaaaggattggttcttccgatttcatggtgaagcattagacgtaaattttcttccttcatttatggatgttatcgattctactttacaatccatgcgagcatttcaagaattgaaaaaaaatatcctggacttttcccacgggtcagatatggaaaacagcagtcctgatgccgctccaaatactgaaactgcttcgaatagtttggctccctttcttgacaacattagatctgttaactgtaattacaagtatgatggtggtgtttttcgggtatatacatatgacgacattgaagctaaaagtgagccgtcatttgaactcaaaagtccagttgtcaccataaattgcacgtataagcacgatgaaagcaaagctaaaccacataggatcagaacattaatcactgttgatccaacacataacacattatacgcaggctgtgctcctttactgatggagttttctgaaagtttacaaaatatgataaagaaacatagtaccggcgaaaagaaaccaaattttacaaaatcttctacacaaaatgtcgattataagagaattttggatcaatttgatgtaggtgttaaacttacatcggccaagcaacagttaagtttgagctgtgaaccgaaagctaaggtccaggctgatgttggatttgaatcgttcttgtttagcatgacaaccaacgaattcgattctgaacagccactgggattttctttaactttagaacaaacaaaagcatctattaagcatatattttcaagagaggtgagtacatcttttgaggttggctttatggacctaacgcttttattcacacatcctgatgtcatcagcatgtatggaacaagtttggtgtctgatgtaaacgtcttctttaatgtgaaacagcttcaaaacttgtatctgtttctagatatatggagattcagtagcattttgcatacacgaccttcgcaaaggcctaataataaggaaattaatatgagttcactagcgccgaccagcaatctcgatgctggtgctgaaataccatggtgctttacgcttatttttacaaaccttagcggtgacgtggacttgggcccttctcttggtgttatttcgttaaggtcccaaagaacgtggctagctacggatcactatgacgaaaagcggcaactattgcacgcttttactgatggtattagcttgacttcagaaggtagactgagcggtttatttgaagttgcgaacgcaagttgggtatctgaagtcaaatggccactcgaaaagagtaaaaatactcacccgttagtctctacctctttgaatattgacgatgtagctgttaaagctgctttcgattaccatatgttcttaattggtactataaacaacatacgctttcatcttcataatgagaaagattccaagggtgtcctgcctgatttactgcaagtatcgttttcatccgatgaaattactctcagctctactgcactggttgccgcaaatattttggatatatacaataccattgtacgtatgaggcaagataataagatatcgtatatggaaacactgcgagattctaatccgagtgagtccaagcaaccgatattgtataaggatattttgagatccctaaaattattgagaacagatttatcagtgaatatttcctccttgaaggtccaaatctcgccaatatctttatttgatgtggaagttttggtagtaaggattggtaaggtttctatacgttctgaaacacattcggggaagaaattaaagacagatttacaacttcgagtcttggatgtctcagcagcactttctacttcaaaagaagagttagacgaagaaattggagcttctattgctattgatgattatatgcattatgcatccaaaatagttggcggtaccattgttgacgttccaaaacttgcagttcacatgacaactctacaagaagaaaagaccaacaatttagagtatcttttcgcatgctctttctcagacaaaatatccgtcaggtggaatctaggacctgtgaattttattaaagaaatgtggactacacatgtcaaagcgctggcagttcgtcgttcgcaaacagcaaatattgcgtttgggcagacagaagaagaacttgaagaatcaattaagcgagaagaaaacgcttctaagttcaactatattgcgcttgaagagccacggattgaagtgcctcaaataagggatctgggagaggccactccgcctatggaatggtttggtgttaatagaaagagattgcctaagttcactcatcaaactgcagtgatccccgtccaaaagctagtgtatcttgcagaaaaacagtatgtcaaaatactggacgatacgcattga

SEQ ID NO: 4692 - DNA, 807 bp, Saccharomyces pastorianus
  modified_base (4)..(37): a, c, g, t, unknown, or other
atgnnnnnnnnnnnnnnnnnnnnnnnnnnnnnnnnnngtgagttttttaatttcgtgacttctgaggaatatacaggtgtccttggtgccagggaggttggagaagtcgtgacaaagagctcggtggtggacttagcgcctagtttggattcagagtgtcaggatgacagtatgaagaatgatgctgaaggcaatgggcctgtgaaaagatctgatctgaaaagaacgaccaacgaaactgatatttggttcacattttcggtttggaacggtgctttgatattaccggaaacaatatacagtttcgatccctgtattgcattacatttcactgagctcgttgttgattttaggagctgcaattattatatggacataatggccgtgctaaatggtacatcaataaaacgacatgtttcaaggcaaataaatgaagtttttgactttatacgacgtaacaatggtgccgatgaacaagagcatggtgtgctttctgaccttaccattcacggacataggatgtacggattgccgccaacggaacccacctatttttgccaatgggatatcaatcttggtgatttgagcattgattctgacatcgagtttttaaaaggattttttaattctttctataaggtggggtttggatataatgacttggagaatatattgttatacgataccgagaccatcaatgatatgacctcactaaccgtgcatgctgaaagaataaaaatgagcctaaatgatccagtaatgaaatcgcatcaatcgttagtgcagaatcgctactgtttacgttga

SEQ ID NO: 4693 - DNA, 684 bp, Saccharomyces pastorianus
  modified_base (4)..(37): a, c, g, t, unknown, or other
atgnnnnnnnnnnnnnnnnnnnnnnnnnnnnnnnnnngtgagttttttaatttcgtgacttctgaggaatatacaggtgtccttggtgccagggaggttggagaagtcgtgacaaagagctcggtggtggacttagcgcctagtttggattcagagtgtcaggatgacagtatgaagaatgatgctgaaggcaatgggcctgtgaaaagatctgatctgaaaagaacgaccaacgaaactgatatttggttcacattttcggtttggaacggtgctttgatattaccggaaacaatatacagtttcgatccctgtattgcattacatttcactgagctcgttgttgattttaggagctgcaattattatatggacataatggccgtgctaaatggtacatcaataaaacgacatgtttcaaggcaaataaatgaagtttttgactttatacgacgtaacaatggtgccgatgaacaagagcatggtgtgctttctgaccttaccattcacggacataggatgtacggattgccgccaacggaacccacctatttttgccaatgggatatcaatcttggtgatttgagcattgattctgacatcgacgttttaaaaggatttcttaattctttctataaggtggggtttggatataatgacttggagactatatcgttatacgat

SEQ ID NO: 4694 - DNA, 804 bp, Saccharomyces pastorianus
atgtcctatgttctcgggactaacgaatttctttgcttgattttgcggctactcttagtaagttacgtggaagtgatccagaatggtgaaacaatctctagttgtttccaaccgttccataagaatgaaaactacggtacgataccttcagcaaacgaacagataacaccggttatctttcataatttgatcatggacatggtgttgcccaaggtggtcgccatcaagggcaacaaagtcacgaaagtgtcaatgaacctcattgacgggtttgactgtttctactccacggacgaccacgacccgaaaactgtgtatgtttgcttcacgctagtggatatacccaagatcttgcccatcagagtactgagtgggctacaggactatgattccaacgccacgaacgaattattgagttcgcatgtaggccagatactagactgtttccatgaagagctagtgaaataccgcaatcaaaccttgaatagctctggaaatggccaatctagtagtggtaatgggcaagacaccattagtgacattggagatgccaccgaagatcaaataaaagatgttatccagataatgaatgataacatcgacaagtttttggagaggcaagaacgagtgtctctactagtggacaagacttcacaactgaatagcagcagtaataaatttagacgtaaagccgtcaacataaaggaaataatgtggtggcaaaaagtcaaaaatattacgctgctgacttttacgattatactttttgttagcgctgtttttatgtttttctatttatggtaa

SEQ ID NO: 4695 - DNA, 930 bp, Saccharomyces pastorianus
atgactaatgataatggattcttgggagaggcaaataatgagaggtacaatcctggaaatagaaactttttggccgtaccagaaaactctatggtgcataacgataataaaattgatgatgtcagcaacgggccctttcctatctatgtccaagaattcactgaaaagcaaatcttggaagaagcatcaagggctcctcctggatccatgccatctattgattatccaaaatcaatgtttttgaaagggtttttttcagtacaaaccacctcctctaaaccgttacctatcgttcgtcataacatcatatctgttttaacaagaatgaaaattgaattcaaagaagtcaaaggagggtttatatgtgtccaacaaaggccacctattgcgacttcggtagtacctgcaataacgactagtgatgtgggctatgattctggaaaatcagtgaatctccaaaccagtttagacaaccaattatcaagcagttaccatagttcaacatccacagcatcaagaagtagctcgataaggcgccaaggctcttataaaaggggacagagtggtataccattgacgcctctcgcaggtagtacgcatcaaaggaactcatccatccctatgtctccaatttctggaagtcaaagcaacggtatatctgaagagctctcatccgcatcattggagtatattcaacagcaggatgatatcttaacgacgtcaagagtccaaaatataaatgacataaatggtcaattcgagcaaaacaacgtttacgataataaagaaaggcctccaattagatttgaaattcacatcgtgaaagtgcgtattgttgggttggcaggtgtgcatttcaaaaaggtttctggtaatacctggttgtataaggaactagcatcgtacatcttgaaggaattaaatctatag

SEQ ID NO: 4696 - DNA, 2319 bp, Saccharomyces pastorianus
atgcccgatccaaacacagccgattatttggtgaacccgaatttcaagacgagtaacagggactccgtatcaccagcacccgaagctttcaatggtacacgaattgccgcaccggctaccttacgcatgatgggcaaacagtccggaataaaacatgaccagcaacaaccaccattgatgcctcctgcggatgtcaaacagactaatggacaagcagatcaaagacaaagcgacgcagccgtttctgtcggcagtaataacaatagtacgaatgggaacatggaattcaggcaattccatagaaagtctctgggagactggcagtttttagaaaccgtcggcgcaggctctatggggaaagtcaaattagtcaagcactgtcaaacaaaagaagtttgtgtaataaagattgtcaatagggcttccaaggcttatttgcacaaacaacactctttacctccaccaaaaaatgaaaatgaactattggaaagacaaaaaagactggaaaaggaaattgctagggacaagagaaccgttagagaagcctccttgggccaaattctctatcatcctcacatatgtcgtttatttgaaatgtgtaccatgtcgaaccatttttacatgctttttgagtacgtttccggtgggcaactgttggactatattatccaacatggttcattaaaggagcatcatgcgaggaagttcgcaagaggtattgctagcgccttgcaatacttacatgctaataatatcgttcacagagatttgaaaattgaaaacatcatgatttctaattcgggtgaaatcaaaattattgattttggcctttccaatatttttgactccaaaaaaaaattgcatacgttttgtggttcattatactttgcggcaccggaattattaaaggcacaaccttatacgggaccggaggtggatatctggtcgttcggtatagttctttatgttttggtctgtggtaaagtaccctttgatgatgaaaactcaagcatactacatgaaaagatcaaaaagggtaaggtggattacccatcccatttatccatcgatgccgtttctttactgactaggatgatcgttgtggatccgttaaaaagggcaactttaaaaaatgtcactgaccacccatggatgaatagaggttacgattttaagactccatcatatgttcctaatcgtgttccattaacgccggaaatgatagacagccaagtcttgaaagaaatgcaccgtttggagtttattgacgatattgaggatgcaagaagatcgttgaatcaactgatcactgaaagagaatacatccaattttcacaggagtattggaacagattatccaactccaaaggattaagttcaagcttaaacaacaatcatttgaattccactgcaaaccaaaatccaattcaaactcagctttcaaacagccaattgacaaatgctactcacgaacaagataatagttttgatgatcccacttcagcatatcatccattattatcaatttaccatttggtatcggaaatggttgcacgtaaaatagctaagttacaaagaagacaagcgttggcactgcaagcgcagtcacaacaaaggcagcagcaccaatcagtatctaatagcaaagctgctttgacgaatacgtcacctgcggttatgaataaactgagaagtacacaaaaggaatcactttctaatactggtattttccaagtacctgcaaccccctcaccaggaacgtcaaataactctaattcaccaaagaaacccccattacgtgttatggttcctcccaaattaacagtacctgaacaagcgcatacttcgccgacatctagaaagagttcggatattcataccgaattagctggtgtcttaaactctagtcccggtcctagatctgtggagtatcaacaatgttcggcgtcaccagcttcagttgaagcccaagagaaaaatctaatcggtggaatctttagaaaattatctcaaagtgggcagtcccatcagcagaggcaacaagaaccactttccgaaagacaaccgccaacttatatgccgaaatcaaatgaaaattctatgagggtaccgaaaagtcatactcgtactatatcagattatattccaagtgttaggaggaacccttcctatatgacaaactctgttgatacaaaggagcgcaatactgttaaaagtaccgttataatacctccggcaaggtctgcatcacaaaagcaaagcagcaatctacctgctctacctcaggacgcggaattgattgtacaaaaacaacgataa

SEQ ID NO: 4697 - DNA, 1044 bp, Saccharomyces pastorianus
atgactgtggattacgagaaggaccccagggctagagaagctgttagtatttgggaaaagggtgtattgaaagaaaaagatgggtcgatgtcagatgccataaacttttatagaagtgcattgaagatccatgacaacgtagaaagaatttataggaaaaaattgcacgatgagtggtcattgcacaaaaaattgtcggaattatccgttctttctgaaagctcaaatgtccaggacacagcagataaagacagtgctcgtgctactgacgatgtcgaactccccccctgttggattttggaaatgctgcccaatgatattttactgagaattatcaaaaaggttgtgttgatgtccggtgaatcatgggtaaatttgtcgatgagttgttccactttcaatagactttgcttccatgactctatgcctttcaaaacctttgcgaagtacatatattccaaacagaagtatgatcaaatggcaatggaccttaatgggataagcaacgtaagtatgtttgaacaagaaatgtggcaaggggatgatatctgtatgttaaaggaaagaccatatatcaaatttgaaggtatttatattagtgtggtaaattacctgaggtatggttccaatgcagagggctcatcgtcccttttaaacccggttcacatgatcacctattatagatatctgaggttttatgagaacggccaatgtctaagattactcactacagatgaacctagttttgtcgtgaaacattttgccatagataataaacctaaacatagtgatacgtgttattggagtcttgggtttgattataattttggtcatttgaagattacaaggtcagacgaaaaatatacatttactgaagaatttcaaatcaagaatcaagacactaaaaggtatcaaaagttgaaatggctaagttccactgttgtggataaggagggaaatgcatctgattgttcgttgaggaatgagaaatcgttctatttttcaagagttaaatcttttaagggcgtcaacgcaaatcggtga

SEQ ID NO: 4698 - DNA, 117 bp, Saccharomyces pastorianus
atgtatccgtatagatatgtatatatacacgggaattgtgtcattttaaatggggattctagtttctgtgatttggtctttcagtttctcgtcccattccaactttttcttctgtag

SEQ ID NO: 4699 - DNA, 1947 bp, Saccharomyces pastorianus
atgaatttagattcagaaggtgaacaatccgaaggagatgctgatatgtctgacggaatgtctgatgacccagacaaacaggagactgacgatgaaaatgaggaagctaaacaagaagtcgataacgaagctgatgagccagattctgacacagatgctaaccaagatgagttagatgataatgaaaacgacgatgctcaagaggacgttgatatggcaaacgaggaggtcggagaaaacgaagaaaatgagtcagatgagcaattcatgtcagatgaagagcaattaaaacaagataaaaatatagaagaaaacaaagagaaagggggagaggagaacgctgaagggctcgatggtgttgaagaacaggcggaagtcgaagacatagatcaggaggctgctgttcaacaagactctggatccaaaggaactggagcagatgccagagatactcaggaacaagaagacatcggaggctcaggaaccacccagaatacatatgaagaagaccaacaagattcaactgagaacaatgaagactctcgtgaggaagccaaagctgccttaaaacagttaggtgacagtttgaaagagtaccacaaacgtcgtcaagatataaaagaggcgacatccaatggcgaagaagacgagagcgttgagaaaaagaatgagcgtccagacgaatttgaacatgtagatggtgcaaacaccgagacagacactcaagctctaggctctgcaacccaagatcaattagagactattgatgaagatatggctatcgacgacgacaacgaagaggaagaatccaacgaaaaggacttgacagaagacgccgatgccgagaaaatggatatcgatgaagaggatatgttacatgatgctgaagatcatgagacgaacaatgaagttgaaaataaaaaatcagggtttattggtgaaagaaaggaagaacaagattacggaagtgggttcccagatgaacatttcttagaggatcaagataatgaagacgaattagaagccctaattgaaaatattgatgatagtgcgcatgacgaaaacgctatcgcagaaccagaaagatcattagaagaatcccgccaattgtggcataagagtgaaatttctactgctgatttagtctcgcgtcttggcgaacaactaagattaattttggaacctactttagccacgaaattgaaaggtgattacaagaccggtaaaaggctaaacatgaaacgaattattccgtatattgcctcccagttccgtaaggataaaatatggttgagaagaactaaaccaagcaaacgtcaatatcaaatcatgattgcacttgatgattcaaagtccatgagtgagtccaaatgtgttaaactagcttttgatagtttatgcttggtctccaaaacattgacacaactcgaggccggtggtttgtccattgttaaatttggtgaaaatgctaaagaagttcattccttcgatcaacagttcagcaacgaatctggggcaagagccttccaatggtttgggttccaagagaccaaaacagatgttaaaagacttgttgctgaatccatcaaaatcttcgaacgcgctcgtgcaatggcacataatgaccaatggcaattggaaattgttatttccgatggtgtgtgtgaagatcatgaaaccatacagagattggtacgtcgtgcgagagaaaacaaaatcatgttggttttcgttatcatcgatggtattagttcaaatgaatctatcttagacatgagtcaagtgaactacattccagatcaatttggtaatccacagttaaagattactaaatacttggacactttcccgtttgaattttatgttgttgtgcatgatatcagtgaactacctgagatgcttgcactaattttgcgtcaatactttacagatttagcatccagttaa

SEQ ID NO: 4700 - DNA, 12783 bp, Saccharomyces pastorianus
atgtcccaagatagaattctgttagatttaaatgcagttaaccaaaggttagctctcttcgactctgcgttcccttctgatgctattgagaaacctttcaagttcaacagcaagaaatcaatatcagaaaatctaaacaaattagcagaaacattattacagagcagttccatcgtcggtcatgttttcctctacaaacacattttcttagaaattgtagcacgttggacaaccaactctgacaaaaaagactccgttgttgtaattgaacaattaggaagtatcgttacaatattcccatctgcaatgccattaatcgaagattatttagacagagaaaacgatcatttcattactgttctccaaaatccatcttcgcaaagggactctgatttgttcaaaattttattagcatattatagattattatatcacaacaaagaggtatttgcacgctttatccaacccgacattctatataaacttgtggacttgccaaacgaagaccaacaaaaccaggttattacgtttctaacgttgaaagttctatctttatacttggatatgggagaaaaatccataaatgatatgatagacatttacatcaaatcacacgatacactattgggctggtctaaggatgattctaaagtagattacagttttctcgaattgaatgaagctaaaagattttcaaatttttctaaattacccaatgttccagagtgttttactgtcgataaaaagcataactactttgttattgaatctcaggatctgaatagtaaggttacatccatctgcggtgtcattgtacctaagatccatactattcatgacaaggtatcatacccattaacacttgttcccactgaaaagacagtttcttccctccgtgagcttgcaaagagaattcagaattcgacaccaattatgcttgttggaagagcgggctccggtaagacatttctaattaacgagttaagtaagtacatgggctgccacgattcgattgtcaaaattcatttaggtgaacaaactgatgccaagttattgatcggtacctacacatctggtgacaaacccggtacttttgaatggagagccggtgttttggccaccgcagttaaagaaggtagatgggtgcttatagaggatatcgataaagctccaacggatgttttgtcaattcttttatcgctgctagaaaagcgtgaacttacaatcccatccagaggagaaactgtgaaggcagcaaatggtttccaattaatatcgactgttagaatcaatgaagatcattcgaaggaaaatgctaaaaaaatctataacttgaatatgattggtatgagaatctggaatgtcattgaactagaggagccaagcgaagaggacctaacacagattttggttcaaaaattcccaatcttgaccaacctcattccaaaactaattcactcttacaaggctgttaaaagtatttacttaaacacacggtttatttcattaaacaaaggtgcacatacgagagtcgtgtctgtaagagatttaatcaagttatgcgaaagattagatgccctatttaagaacaatggaatcaacaaaccagatcaattgatcgaatcttccatttatgatagtattttctccgaggctgccgactgtttcgccggtgctcttggagaattcaaagcttttaaacctattattcaagcaattggtgaatcattagacatcgcctcctcaagaatttctttgtttttgacgcaacatgtgcccaccttggaaaacctcgacgatagcattaaaataggaagagctctgttgcccaaggaaaagctaaacatacaaaggaaatcaatgaacagcacatcatttgcattcacaaatcattcgttgagactaatggaacagatatctgtttgcatacagatgactgaacccgttttactggtaggtgagacgggtactggtaaaaccaccgttgttcaacaactcgccaagatgttagccaaaacattaacagtaataaatgtctcacaacaaacagaaactggagatctattaggtggttacaaacccgtaaactctaaaacagttgcagttcctatccaagaatactttgaaactcttttcaatgccacgttttccttgaaaaaaaatgaaaaatttcataaaatgcttcatagatgctttaacaaaaatcagtggaagaatgttgttcggctttggaacgaagctttcaagatggccaaaagcattttgaaaaccaccgagtctgatgatgaagatgaaagcacgaaaaagaaaaaaagaagactcaacacccatgaaaaaaggttactactagataaatggagagacttcaatgactctgtaaagaaattcgaagctcaatctagctccattgaaaactcattcgttttcaattttgtcgaaggttcattagtaaaggctattagaaatggggagtggttattactcgatgaagtaaatttggccactgcagatactctagaaagtatttccgatcttcttacagaacccaactcacgtagcattcttctttcagaaaagggtgatgctgaacctataaaagcccatccagactttaggatattcgcttgtatgaaccctgctacagatgttggtaagagagatttgcccatgggcatcagatcaagatttaccgaaatatacgttcattcaccagaacgcgatatttctgatttactttccattatcgacaaatatattggaaaacacagtgttagtgatgagtgggtaggaaacgatattgctgagctttatctagaagccaaaaaactttccgataaaaatacaattgtcgatggttcgaatcaaaaaccgcattttagtattcgtacattaacacggactttgctttatgttactgatattattcatatttacggtttacgtcgttctctttacgacgggttctgtatgagttttttgactttacttgaccaaaaatccgaaagtattttgaagccagtaatcgaaaaattcactttgggaaggttaaagaacatgaagtccgttatgtctcagacgcctccttccccaggtccagaatatgttcaatttaaacactactggatgaaaaagggtccgaatgaaatccaaaatcaagcacattacattatcacaccttttgttgaaaagaatatgatgaatttggttagagctacatcaggtaaaagatttccggtactgattcaaggtccaacatcatctggtaagactagtatgattaagcatcttgcagacataacaggccataaatttgttcgtataaataatcatgagcacacagatttacaagaatatttaggtacttatgttaccgatgacacaggtaaactatcgtttaaggagggtgttttggttgaagcccttcgaaaaggttattggattgttttagatgaattaaatcttgccccaacagatgttttagaagctcttaataggctacttgacgacaacagggaacttttcattccggagacacaagaagtggttcatccccatcctgattttctcctttttgccactcaaaatcctccaggaatatacggaggccgtaagattctctcaagggcttttagaaatcgtttcctggaattacacttcgacgatattccacaagatgaattagaagttattctacgggaacgttgccaaattgcaccatcatacgcaaaaaaaattgtcgaggtttatcgtcaattatctattgaacgttccgcttcaagattgttcgagcaaaagaatagttttgccacactgcgtgatcttttccgttgggctttgagagatgcagttggttacgaacagcttgctgccaatggttatatgcttctagcggaaaggtgcagaaccccccaagaaaagatcactgttaaaaagactttagaaaaagtaatgaaagtcaatctcgacatggataaatattattcaagcctagaggataggtccctggaatccgtaggttccgtgacttggactaagggaatacgccgactatctgttttggtttctagctgtttaaaaaacaaggagccagtattattagtcggtgaaactgggtgtggtaaaactacaatttgccaattattagcgcagttcatgaatcgggaattgataactttaaacgcgcatcaaaatacagaaaccggggatatcctaggagctcagagacctgtccgtaataggtctgaggtccagcataagttggtaaaccgtctaagaattgttttagatgttgctaacgatgaggaaataaatcttcaagagttattacagctttactccaacatggataggaaaaatatacccgaagaagcccacattgaaataaagaaactaaaggacagtttgaatattctattcgaatggaatgatggtcctctaatccaagctatgaaaactggaaacttctttctactagacgaaatatcgctagctgatgattctgtacttgaaagactaaacagtgttttggaaccggaaagaagtttgttgttagcagaacagggatcatctgacagtcttgtaacggctgcagaagagtttcagttttttgcaactatgaatccaggtggagattatggtaaaaaagaactatcccctgcgttgagaaatagatttaccgaaatatgggttccatccatggaagacttcaacgatgtgaacatgataatttcctccaagctttcaaaggacttgaaagaccttgcaagcccaattgttaaattttctgaatggtttggtaaaaagttgggagggggaaatgcaaccagcggtgtcatttctttacgtgacatacttgcatgggctgagttcatcaataaggtatttcctaaggttcaaaacaagtcgacagcgctaattcaaggtgcatcaatggttttcattgatgctcttggcacaaataataccgcttacttggctgaaaatgaaaatgatttgaaatcgcttaggtcagaatgtattgtacaactactaaaactgtgtggtgaagatttggaaccacaacacgtaggtgctaatgacattaccattacgcaggatgacttgcaaatcgggatgtttaaaattccaaggctgccagatggccaatcctcctcctttaatttaacagcccctactactgcctcaaacttagtaaaagtcgttagggctatgcaagttcacaagccaattttacttgaaggtagtccaggtgttggtaaaacgagtttaataactgctcttgctgatattacaggaaataagcttacaagaatcaacctctctgagcaaacggatctagtcgatctatttggtgcggacgcacctggtgaaagaagcggcgagtttgtatggcacgatgctcctttcttgagagccatgaagaagggtgagtgggttctattagacgaaatgaatttagcctctcagtctgttttagaaggtttgaatgcctgtctagatcatcgtggtgaggcatatattccagaattagacatctcgttttcttgtcaccccaactttctcgtctttgctgcacagaatcctcagtatcagggtggtggtagaaaaggtcttcctaagtcatttgtaaatcgttttagtgtggtcttcattgatatgcttgcagctaatgatctcctcctgattgccaaacatttatatccaagtattgaaacagaggttatcactaaaatgattcagttgatgtccgctctagaagagcaagtttgtaaaaagaaactttggggtagttcaggttcaccatgggagtttaatctaagagatactttacgttggttaaagctactaaaccagtattcaatttgtgaggatattgatgtgtttgactttgtcaatatcattgtcaaacagaggttccgtaccattagtgataaggacaaggcacaagttcttattgaagatatttttggtaagttttcaactaaacaaaactttttcaagctcagtgatgaatatattcaaatcaacaacgaagtggctttaagaaatccacactaccgttatccaattgctcaaaatcttttcccattagagtgtaacactgcggtctatgaatctgtattgaaggcgatcaataataattggccattaatacttgttggtccttcaaattctggtaaaactgaaaccataagatttttagcttccgttttaggtccccaagtagacgtattttcaatgaacagtgatatagatagtatggatattcttggtggttacgaacaagttgacctaactagaaaaatatcatacattaccgaagatctaataaatgtcttaagagaaattctgtctatgaatatgaagttgccaccaaacactacggcaatcacggaaggtctcaatcttttagaacatttgctcaataatattatcacacccgacaaatttcaagatctcaaaaatcgtttcaacaagtttttctcgcatttagaggagcactccttattaaaagagattggccaaaacattgaggagatgtcagacgtcgtcaacaaggaagtttcggtcagatttgaatggttcgatggtatgctagtcaaagcagtggaaaaaggtcattggttaattttagataacgccaatctttgttccccttccgtcctcgatagactaaactcccttttggaaacagatgggtcgctacttatcaatgaatgtagccaagaggatggccagccaagagttctcaagcctcatcctaattttagattgtttttgaccatggatcccaaatatggtgaattatcccgtgccatgagaaatagaggtgtcgaaatttatatggaagaactaaactaccgctctaccaatttcgacagcctcactttgggatttgaacctaaagaaactgatataaagcccgtttctattgatcattgcatggaaaaaatgaatttaagcgaactgaaaacatcaatgccatttaaacacttcattccatcccatttgagtaagccatgcgcacttgcccaaatacacgatattatatcgttatcagatgatgatacgcttgtagaatctcttgcgggtgtgattccaatttcccggttgggggaaatcggtaaatggactaataatatttcgaacaataccgagtactcagaacaaaagattgcagagaagctttatgtttttataacatttttagccgatatggatattttacagaagaccaataatctatacatccccgcaaatctaaaactaaaagaggcattaggagtacaggccaagcaactaactgaagaggctttattgcttactttgaacggatacgttcttccaacaatcagcaaatactgcgatgagatcagatctccagagtcactatatttattatcgactttgcgtctattgcttaactcactaagcacaatgaaatctgtcaatacgaaatcaacgcatggtaagattgacgaattgacttacattgaattatcagctgccgtcgttaatggtcgtcacgtgaaaaatactcctcgcattccaatcttctcaattctttacaacctttcaaatgtcatatctgaaaatatcaagaatgaggaattattttgcgggcctaacaagtatcaacactattgggatttactagtaatcataaccgcagcattagaaacagccactaataaggatgaagcacgtctaagagtatacaaagagttaatagacaattggataacatctgcaaaggctgcgggaatggaaacatctccgtttagtgacatcaattcagagtttacggatgttttacatttatcaagagggcactcaataactttattgtgggaaacgtttagaaagaagtatccaacaacctcggaaagctggttagcttttgaaaagcttattatattatctaaaaaatttgacacggttcgactactacaattttctgaatcgtataactctattcaagatctgatggatattttccggcttttggttgaagacgttttggataataatttgacagagtttgaccttttagtgtcgaagctagaggatggtataaacgaattagaactcatttccgacaagtttttaaacaaaagaaagcattattttgttaatgaattcgacagcttgatcaggtacacattctcacatgactgcaccgagctgattaaagaacttgcacctgcttcatctttaacgacacgaaagctcacaaaacttgctatcaacaaatacaattacccaccgatctttgatatcctttggaccgaaaaggatgccaaattcacttctttcacttcttccatattttcgtctcagttccttgaagatattgtctgcaaatctaacaatttgaaaacattttctgggaaccagataaagcagtctattagtgatgccgagctcttgctctcttctactattaaatgttcacctagtttattaagaaatcaagtgaactgttataaagctatgctatcaacctggattggtagaattattgacatacacgttggtatggactgttcgaaattgacttcaaaagatatatgctcttctatggaaggaaaggctacttcggagacatgcgctaccttaacagaatatatactccccgctttagagttggctaagagttctgagtcattggaatcattaggagaggcatggattttgtttggtacaggattacttctgctttatgtaccagattctccatatgatccagccatacatgattacgttttgtatgatttgtttttcaagaccaaaaacttttctcagcagttggttaagaattggaaaaatgtccgtgaagtcaccagtggtgacgaagaaattctcacagaaaaacttgttaatgtcataagtgatgatgacgcacctcagtctcctagagtctatcgtgcgaatgtatctattgactgtctatttgacgagtggatggcgtttttaacctcaactatgagttcccaacagataaatgagttaatgagtgcttataagtgcaactctaatcaatcggatcgtcgattagagatgcttcaacagaatagtgctcatttcttaaatcgtctcgacagcggctactccaagtttgctgatttaaatgacatccttgctggatatatttacagtgtgaactttggtttcgatttgttgaagcttcaaaagtccacagatagggccacattccagatttctccattatggagtatggaccctatcaatatttcaagcacagacagcgtcgtgagtgcttatcgtgaactgtcaaaattcttcaaaaaaagtaccgtagaaaatagctcagtcgaaaagattttggtttacttcttaacactattcaaattccataagaaagacgtgctactaatagatgtattcagagctgccttgtatacgctatattcaaggtggtcacttagacgtttaagacaagaacaagaggcaaatgagaagtcgagtatgttcaggttcaacgatgattcagatgactatgaagccgatttcaaaaatctattccctgattatgaggataccgttttgataactgatgagaaggacggttctacctacgaaaacttagaagagacttacttccaagttgcagacacatacatctctgtctttgatagaaacaatagcgccaatttttcgaccgagttacgaaacggtgcaaaaataacgacaattttgaaagaagagttagtaaacaccaagatcgaatgtttaaagagtggaactttatcggctgtcattaacagacttgatgaagaaacccaatctttcaaaaatgcaaaagattttggaagtatagatttttaccacgatttctccatcgctgagttccaaaaagcaagtagcattattgagagcattctaaagtcagttttaaaattactggagcaatggccagaacatgcttctctgaatgaattgtatcgagtttctcaagagttcttgaactaccctgttcaaatacctttagctagacagctgcaaaaaattgaacaaatatatacgttcttagctgaatgggaaaagtacgcatcttccgaggtatctttgagtactaatgtgaaactgattactgaattgatagtttcgtggaggaagttggaactaagcacctggaaaggtcttttcaattcggaagacaaaaaaattagaaaatctattggcaaatggtggttttatttgtacgaatctattatcatatcaaacttcagtaatgaaaaggaggaaatcacggctaacactactcttttggtaagctcgttgaacctatttttcagtaagagtaccttgggtgagtttggtgccaagctggatcttgtggaagcattttacgaacatattcaactaattgggttcaaaaattctaaagtagaaggtttactccacaatacattaaaattttactaccagtttaaaccgttaattgatgaacgtatcaaaggagggaaaaagagtctagaaaaagaaattgacgatataattcttttagcaagttggaaggatgtcaatgttgatgctctgaaacaaagttctcgtaaatcccataacaacctttacaagattgttagaaaataccgtgatttgttaagtggcgatgtaaaaacaattatcgagagtggtcttgtattttccaaagataataagataaaattatctactttaagacagcatttttacgaagaccctaacctagagacttcaaagattttggttaaagaaattactagttggagctccagaccttcggcactaaggaacatcgacattgtagaagtgaacatgaattcttacctagaaaaaatatcttcgcaagaatttccaaattttggggattttgctttagaattttatgttgaagctgaaagattgcgtaaggaaaccccaggtgtttatacgaaggagaacaagaaggtattggcatatttgaaaactcaaaagagtaaggtcttaggtgacgcattaaaagaacttagaagaatcggtttgaaggccaatttcagggaagatattcaaaaagtccaatcttccactacaactattttggcaaacattgcttccttcagtgaaaaatatttgaactctgcggacacatttttcttcaaaattctcgatcttttacccaaactgagaaacgctgtatcaaatccaagtgatgatatccctatatcggctgtagaaagaggtatggcccttgctcaaagtttggtattctctttaattacggttcgccgtccactatcagagttcacgaatgactattctagggtgaacgatatgatgttggacctagaatgtttttccagctcaaagggagacattgttcattcctctatgggagcaaacatagacaatgttagaatatttgagaaatggttgccttctttactggattatgctgcacatactctgtccgttatttcaaggtattctacatcttcagcggaacagaaagttttattagatgcgaaatcaaacctatcgtctttcttcctccagtttaattcaagccgaattctcgattcttcattcattgagtcgtattctgcatttgaatcattcattaacaagttattaataaagcttgaaaaggcaaagacggcagagaacagttttgtcttcgatattattatatcatggattaagaaaaacaaatcaggatctattaaagatgaacaacttgaaggtccttctgtagaagaaattgaaaaagccttccgccgtattttcacatctataatactatctttccaaaagataatcggggatggttttgaatccatatctgaagacgatgatagatggctagctaatagtttcaagaagatcatgacaaacgtcaaactactaaggtccggacttgttactaaaaccatcgaagccgcattatctttattaaagagctttgactttacaactacgaaatcaatctacgtaaagtcgattatatcattcacgttgccagttattacccactattataacgcaatgaccgttgtgcttgataagtcgagaacatactatatcaacacaagtcatggtacctatattctgtcaacgatattgcatagtctagccaaagatgggttctgttctccagaaccaccatctgaagaggttgacgacaaaaacttgcaagatggtacaggtttaggtgatggcgaaggtgctcaaaataataataaggacgtagaacaagatgaagatttgacagaggacgcacaaaaagaaaacaaagatcagcaagacaaagacgacagagatgacgaaaatgaagacgatgccgttgagatggagagcgatatggctggtgagttagaagatatatccaatggtgaagacaacgaaaatgaagatgaaaacactgatagtgaagaggaagaattggatgaagaaattgacgacctgaacgaagatgatcccaacgcaattgacgataaaatgtgggatgaaaaagcaaacgaaaattcgaaagaaaaagataccgaacaaaacttggatggaaaaaatcaagaagaagatgtgcaagccgccgaaaacgacgaacaacaagaagataataaggaagaggctgaagaaaactcaaacacgcctgaagatggagacgaagaagtggagaacgatgaggatgctgaagaggaaaatgatgtcggcgagcaagaggatgaagttaaagatgaacaaggtgatgatttagaagctaatgttcccgaaattgaaactcttgatctcctgaagatatga

SEQ ID NO: 4701 - DNA, 780 bp, Saccharomyces pastorianus
atgacgggttatgtctccacaagatactacagggcccctgaaatcatgttaacgtggcaaaaatatgacgtcgaggtggacatttggtctgctggctgtatctttgctgaaatgatcgaggggaagcccttgttcccaggtaaggatcacgttcaccaattctctatcatcaccgacctattgggttccccaccaaaggacgtgataaataccatctgctctgaaaacactttaaaattcgtcacttcattaccacatagagaccccatctcattttcggaaagattcaagacagtcgaacctgatgccgtagatcttttggagaaaatgttggttttcgaccctaagaagagaatcaccgcagctgatgccttggcgcatccttatttggctccttaccacgaccccaccgacgagccagtagcagacgctaagttcgattggcatttcaacgatgctgacttgcctgtcgacacttggcgtgtgatgatgtattcagaaatcctagacttccacaagattggaggtagtgatggacagatcgatatatccgccacatttgatgaccaagtcgccgcagccaccgccgcggcggcgcaggctcaggcacaggttcagttacacatgtctacacattcccacaacggtgctggtagcactgataataaccaatccgacattactggtggcaataaaactaccgatcatatcgccacgaatgacaccattacggattacggcaaccaagctattcggtacgctaacgagttccagcaataa

SEQ ID NO: 4702 - DNA, 540 bp, Saccharomyces pastorianus
atggtactttcagctcctaaaaatatccaaaatgaggaactaatagccaaactcacaaacaaaaatatcgaagtggtaaacatgccattgaataagacagtagaattcaatacaaccataaaggccctcgatatctccattgattctgaactcgataatcttctgaaatggcaacgtatcagcggtagttacacagtcgccactgttgttggccgactagttaaggagactcttccacaagtcaataaccatcaaaagacagcttctaggagtaaactggtcttgaagccgttaaacggttcatcaagaagtcataaaaccggcgcattgtctattggtgatgttaggttagttcaactaaagaaacagttaacggaaaaaaactacattgcagaattcaaaggtgaaggtacacttgtcatcaatggaaaagtggcagtccgtaaaattaatgatgcagaaaccattattgatggtaccccctctgaactatttgatactgtcaagaaattggtaacagatatgttagcaaaaatttag
